United States Patent Application Publication US 2008/0050393 A1 - sequence listing, part 43

SEQ ID NO: 141226 - DNA, 4932 bp, Homo sapiens
  misc_feature (1)...(4932): n = a,t,c or g
atcaaatatatgtatcatcaaaggttgcatctgtacagtatgtaaatgctattaatgtcgtcactcacatgcacgacagtccttggttcccccaggaagggcctggtggccccagctctctcttgggattatgtgtatacataaataaatattgggctgtttccctcttcctgtgaagtggttctcaaattcctatgtactgtaaagctgtacccttaaaagtacagatgtggtccgcgcaacagtggctcacacctgtaatcccagcactttgggaggctgaggcgggtggatcacttgaggtcaggagttcaagaccagcctggccaacatgggtgaaacctcgtctccgctagaaatacataaatttgccaagcatggtagccaagtgcctattaataccagctacttgggaggctgngggcaggagaatcccttgagcccgggaggcggaggttgcagtgagccaagatcatgccactgcactctagcctgggcaacagagtgagactccgtctcgaaaaaatatatttaaaaaaaaaaaagtacagatgtgatgtgcagaacatattgttttcgtagatttttatacttgatcaattaatggaatcagatttttagataagtgtaattttctctataggagaccacgttgctacatctgttaatgcctgtcagtgatcaaaagaaacttaaaaagtggaatgggatatggcttttggtacctgaaaataaatgctttaataattgtaagccagataaaagttattctttttgttttttttcttaacagtctggctgttgtttgaattaaactcttaaacaggatgtttagttagagggtaattgttgagtaatgatgcatacaacagcatacttccctttcttgctgggggtgcagcttttcngntttcttgttttactttgacagtgcaaggggaactgaaaataatttccattgtattatttatcttagttcagctgagggctttatgagacagtggatggggaggcagtaagacggtgatgagataaaatgtgtgtgttgcactgactgtctataaagttatcatcctttcttcatgaaaaagtagcatttaaatctggatgagtttataaaggattacaaaatgctgatttatagagtaaactttaaaatattaaagactaaagactaaaagaagagtaatgaagtaatgtaggctgtcacttctctagatttgtattgttgaaaatttaactttggacatctttatagattattttagacctacaaaaactaccctcaactctgtggctacagctagaatatgaagcattcattgctacaccagttctntctttctagatattgttggtgngtcataatgtttgaggctgtatttgtaagtcttgcaagtgtgagaaagagccgtatcttttgacttatacttcaggttaaggttttgtaatgtttcttcttcaaaaggcaagtgaagctgtcatcctcattctcctaaggccaagacacaaacattgacacgtcaaggttttttttttttttttttttggcctgagtctcactttgatgtccaggctggagtgcaatggcacgacctcggctcactgcaatctccacctcccaggttcaagagattctcctgcctcagcctctcgagtagctgagattacaggtgcccgccaccacgcctggctaatttttgtatttttggtagagacagggtttcgccatgttagccaggatggtcttgatctcctggcctcgtgatccgcctgcctcggcctcccaaagtgctgggattacaggcgtgagccaccgcgcctggccacattttgtttttctcttactgtttgcttacttgtatgacgtagcctgtgtccaaagttttgactaagggaatgatggacctgttcccacttggggaacttgaagaagtgtttcattagcagactaatgaggaaacatattgtctagagagagagaaaaaaatccctggttccctgaaaagattagattgcaatttgtgcccctgaattgagttcaggtttttacagctcagagaagtaacagcaggtggttgcaacagcttgtgatgttggtacattgtcgatagaatgtggatgattaacgtgtataacttacaattttttaaatcagggagtattttataaagtgccaacctgataaaatatcctaaattctacagctaccattcattccttttttcagagtaagcagcaggtaatgttgacattaagctcttcagcacaatacaaacacatttcatgtacaggtatagatagccatggtgaaggcacaaagatctacaaggatttttctttagtagttatacaaaagaatattacattttgtggtctgtacagtgtaataaaccagcaatagggacaacaacaaagagaatctaagaaagaagactatgcctaagtatagggaaagtttagagaatcatttttagacaggacacattttgcagtagtgaatgtggtaggttttctgcctaagaggctcaaagtagctctaattcaaatgcctgaggccagcagcgactctgaatgtgactgtaaaagggtttctggtcactctgtcgcttggggtcgactccaagtcttgggctaaggcaatgggaagggaccatctctcgtcagcctgcagcttcataaagggagaatcagagacggccgtggctcagggcatgcacgaacgctcttgcagtcacggttgataacgtggaaaaaaaaaccaactgtgtttttctccccatctaccaagttctcctcgatgaatcaataaagggagaatgaataattgggctcccacccggagagattctgctgcagtgtcggcaatgagagtcggtggtttgggggtgggatgctgcgggaagccgtattcaatgacaacagaagctacacaaccaaacctgaggggacagaggtagccagaggcttggtggtcgacacagaacgggacagacggcagcgagatggaactagagactctgcctcctaccatggcatggggctggcagtcaggcagtccgggggcgccgctccgtcgcagggtggcggccaagtcctcacaagagctcatactgcttgaggtgcatccgctggatgatgtcgcggcagtcgttgaacaccctgcggatgttctctgtgtccacggcgcaggtgaagtgcgggtagcagtaatgtttgccgtcaccggtggccgtgctgatcctcaaaaacaggtcccggataaagaacttggctcttgtaactttgggatcttctcctgcatctggtgttgcgtcttcaggaacagtataatttgcatattctgggaaatagtcttcaatttttgatttccctgccaagactttttctgccagcatatcttgtttgttcaagaacaagatgatagaaatggtccgtaaccacctgttgttccagatgctttcaaaaagatccagggactctctcagcctgttggtgttgttatcttctcgaatcaccatgttgtagctactgcaggctgcgacgtaaatgatagctgtgacatcgttaaagcactggatccattttctcctctcatccctctggccaccaacatcaaacatgtggaagtttactttgtccacttggaatcgtgtctcaaaaatcccagatgtcagaactctgcatctgaggaggtcctggtctgtgggtgtgtagtcaaccaagctgacgctgtcgattctttccaggaagtattgtgcacagtcaatcagctggtattcgttggatctctcaaagcatgccttcacgccttcatcgtcccaaagttttttcacatggtcaaagaattcctgggaatattcaaagtcagtgataggggctatgctcttgatgtagtctgatcgaaattggttttcagggttggccagcggaactggaggtattatagtactcattgctgaaacaattgtcacgatagcatctttaacatttttccggatgtccagaattttctgtttcttttcctcgggattaaacccattgacgtgcaggatcctcatctgtttgacgatagtgcttttcccagactcaccagcccccaggagcagcaggcggtgggtagccttgtaagccaggcgctctttctgcaactgcttctcgatctttttgttggcctcgcgtcgttctttttcatcgacgccctggtcttccgtcgtcttgctgttgccgcccaaacaccccatgcctgcccgctgggatggacgtcaggaagttaggaatgtgcgcaaaaagcaatagagagttggagacgtgtgcggctcctgcgacggctcctctctttcctgctgctgaaagagatggtctggtctcttcggtgttttccgattcagagcaggcgtttcttctccctccccctgcccaccgcaaactcccaactaaatggctgtaaggaagacgcgcggagtaaaatgcctttttacacgagaattgtttcaaaatctgctggatgaatacagcacaatgaacggagacggggggcgagggcgcggtctccgctggagacagccgaggtggcgcacgccccgggttcgccccacgtcccttcgcccgcactccaagcctcgctcagccccgcccagcgtccccgaggggcggcgcgctcggctgggtgccgggtcccaaccagccggggtggtggctgagcgtggccgaggacagagcgcgccacggggtcccagaggcgacgatgggcacctgccgggctcctgccgggccggctcgcgcctgctatcctcagccgtcggacgtgcgccccctccctggtctgggatcccggtgcgggaagggagagggaggctggctttgggggcggccgggctgggtcccgagctctcggagagcgctaccgctgtaggggtcagggagctgacc

SEQ ID NO: 141227 - DNA, 2291 bp, Homo sapiens
atgctggtcttgaactcctgggctcaagtgatccactggcctcagcctcccaaagtgctgggattacagcctttggaaaaaacccagtacggcttcctaggaacagatcgtgtagaagagaaaacttcagtgataaccatcagagttagtgtgacccacagacacaacagctacatggaagcagaaaaccttacagaattatcaaaatttctcctcctgggactctcagatgatcctgaactgcagcccgtcctctttgggctgttcctgtccatgtacctggtcacggtgctggggaacctgctcatcattctggccgtcagctctgactcccacctccacacccccatgtacttcttcctctccaacctgtcctttgttgacatctgtttcatctccaccacagtccccaagatgctagtgagcatccaggcacggagcaaagacatctcctacatggggtgcctcactcaggtgtattttttaatgatgtttgctggaatggatactttcctactggccgtgatggcctatgaccggtttgtggccatctgccacccactgcactacacggtcatcatgaacccctgcctctgtggcctcctggttctggcatcttggttcatcattttctggttctccctggttcatattctactgatgaagaggttgaccttctccacaggcactgagattccgcatttcttctgtgaaccggctcaggtcctcaaggtggcctgctctaacaccctcctcaataacattgtcttgtatgtggccacggcactgctgggtgtgtttcctgtagctgggatcctcttctcctactctcagattgtctcctccttaatgggaatgtcctccaccaagggcaagtacaaagccttttccacctgtggatctcacctctgtgtggtctccttgttctatggaacaggacttggggtctatctgagttctgctgtgacccattcttcccagagcagctccaccgcctcagtgatgtacgccatggtcacccccatgctgaaccccttcatctacagcctgaggaacaaggatgtgaagggggccctggaaagactcctcagcagggccgactcttgtctcttacggtgtccgagctacacagagccacagaatctcacaggtgtctcagaattcctcctcctgggactctcagaggatccagaactgcagccggtcctcgctgggctgttcctgtccatgtacctggtcacggtgctggggaacctgctcatcatcctggctgtcagctctgactcccacctccacacccccatgtacttcttcctctccaacctgtccttggctgacatcggtttcacctccaccacggtccccaagatgattgtggacatgcaaactcacagcagagtcatctcctatgaaggctgcctgactcagatgtctttttttgtcctttttgcatgtatggatgacatgctcctgagtgtgatggcctatgaccggtttgtggccatctgtcaccccctgcactaccgaatcatcatgaacccacgcctctgtggcttcttaatcttgttgtctttttttattagtcttttggactcccagttgcacaatttgattatgttacagctcacctgcttcaaggatgtggacatttctaatttcttctgtgacccttctcaactcctccaccttaggtgttccgacaccttcatcaatgaaatggtcatatatttcatgggtgccatatttggctgtctccctatctcagggatccttttctcttactataaaattgtttcccccattctgagagttccaacatcagatgggaagtataaagccttctccacctgtggctctcacctggcagttgtttgcttattttatggaacagggcttgtagggtacctcagttcagctgtgttaccatcccccaggaagagtatggtggcttcagtgatgtacactgtggtcacccccatgctgaaccccttcatctacagcctgaggaacaaggacattcaaagtgccctgtgcaggctgcatggcagaatcatcaaatctcatcatctccatcctttttgttatatgggatagaaatggcagcaaaatttaacacctaggcctgcaaattctgcctccttggtcacattattttggttgcttgatggctttcattcctctctgggtttcgtatgtgaatattgcttgctttgttttgtctttaattgcaatgggtgagtattctggtatcctttgttcatcatacacatcatgaatgattccaatataaa

SEQ ID NO: 141228 - DNA, 624 bp, Homo sapiens
atggctgcagcggcggccggggctgggagcgggccctcggcggcccaggagaagcagttcctgccggcgctgctgagtttcttcatctacaacccgcgcttctggccgcgggaaggagaggacaaggtttatagctcggtgctgcagcagtgctacagcatgtacaagccttatagtaggaatgtgtccccattgatgaaaaagcaaaggtgtccaaattatgcagacccacagaatctaacagatgtctctatattcctcctcctagaagtctcaggggatccagaactgcagccagtccttgctgggctgttcctgtccatgtgcctggtcacggtgctggggaacctgctcatcatcctggccatcagccctgactcccacctccacacccccatgtacttcttcctctccaacctgtccttgcctgacatcggtttcacctccaccacggtccccaagatgattgtggacatccagtctcacagcagagtcatctcctatgcaggctgcctgactcagatgtctctctttgccatttttggaggcatggaagagagacatgctcctgagtgtgatggcctatgaccagtttgtagccatctgtcaccctctatatcattc

SEQ ID NO: 141229 - DNA, 543 bp, Homo sapiens
tcaatgggactgggcgccatggagcagggggtggtgctcgtcggggaggctcgggccgcacaggagcccacggagtgggggaggctcaggaatggagggctgcaggtcccaagccctgcccgagcccgcgctcagatgccccagctcagccgagaggccgctcgcgccgggtccttcctcttccccaagtgcaggcagagcccccggagccatggccagtccttccggcagctccgaagccactggcaagacccgaggcagggatggccggcccaggagggaggaggacgacgtccctcccgaggagaagaggctgcggctgttgctgccccgcatcttcctgtttttcttccctttcttgttgagcagcgagagttgagaggaggcagatggcttccatcccaaaaatcgctctcctctttccatccctccctcttttacgtggacactgccaaagaccaggataccagaatgcagtggagtgaccaagtgtagtgggaccttgggaacgcgagtctggaaccaggcggctggggtttgcat

SEQ ID NO: 141230 - DNA, 1392 bp, Homo sapiens
atgcccccccaccaccaccacgaatggtctcaccccaaatgttgtgactgtgccaaagctgagaaatccaggtttctcctcagcaagaaagaaaatagctgcaacgtggatgcacctctacaggagccccaggctgacaataaccttcctgatctggtttcaaccctggatgcttttacctggtgcatccatcagggatttcagggattccagcacaacgctaagtgcttctatggacgagcttcccttaatctcagcagcaacaaccccaggcaatggagcctgttgacagatccatttgccactgaagacagtaaggctcagagaggggatggaaagaggagagcgatttctgggatggaagccatctgcctcctctcaactcttgctgcccaaccagaaagggaagaaaaacaggaagatgcgggacggctacagccgcagcctcttctcttcgggagggacgtcgtcctcctccctcctgggccggccatccctgcctcggggcttgccagtggcttcggagctgccggaagggctggccacggctggggggctctgcctgcacctggagaagaggaaggatacggcgcgagcggcctctcggcggagctggggcgtctgagcgcgggctcgaatttcctcccaccccctgctgagagccagttgcaaggagagactagggaagggcattgggtaactttgttgctaaaagctcttctggataaagacgtatgggaaaagaagcaaatagagttcagcagaagaggacagccccaccaccagcaccacgaatggtctcaccacaaatattctgactgtgccaaagctgagaaacccaggtttctcctcagcaagaaggaaaatccctgcaacgtggatgcacctctacaggagccccaggctgacaataaccttcctgatctggtttcaaccctggatacttttacctggcacaacgctaagtgcttctatggacgagcttcccttaatctcagcagcaacaaccccaggcaatggagcctgttgacagatccatttgccactgaagacagtaaggctcagacaggctacagccccagcctcttctcttcgggagggacgtcctcctcctcctcccttctgggccggccatccctgcctcggggcttgccagtgtcttcggagctgctggaagggctggccatggctccgggggctctgcctgaacttggggaagaggaaggacacggcgcgagcggcctctcggcggagctggggcgtctgagcgcgggctcggttgcaccccgatggtctccctgctcaaggaggagagaagagaagggacgccacgagagggtggacatcggccaaagccacctcgtctttgctcttaccctgtgtcttccatga

SEQ ID NO: 141231 - DNA, 1634 bp, Homo sapiens
  misc_feature (1)...(1634): n = a,t,c or g
ctcaaaaaagatctgttggtaggcaatgggaaggtgcattcatgtcatcctgcaggaggaattctccacgagttttgagcagcctcggttttcccaccacctccaaatcatggaagaaacagggtaagagcaaagacaaggtggctgtggccgatgtccaccctctcgtggcgtcccttctcttctctcctccttgagcagggagaccatcggggtgcaacctggccggggcggggaggaggtgcagggcattgccagagcgggcctgtccatgggcaagggacagcgacctcctgggccaggacatgtgagagctacgcaggcctgggcccggcgtggcggaggtgcgcgacagcggccagaagagggcgccagagtgccaggagccgcccgcggaggagcccgcaccggccccgatacccagctccgcgccacgcggacccaccgagcccgcgctcagacgccccagctccgccgagaggccgctcgcgccgtgtcctttctcttccccaagttcaggcagagtccccggagccatggccagcccttccagcagctccgaagccactggcaagccccgaggcagggatggccggcccagaagggagaaggaggaggacgtcccttccgaagagaagaggctggggctgtaactggaaaggggaagcgcacagcccgagggactgcgagaaccggggaggacgcgccgcggccaggcagggaggagaccggcacccagacaggtggcgaccgcagaggagcagcacgggcagccctcctcgccgtgggcggcatcagagcccccctgcccagtcttggggttgctcctggatgccgtctgggaggcttgctcatggtgacatcctcatctccccatgcactttacctgcattcagagcttgggtcacctggacactgaactcaggtgaattttctctgagatcccgggagaaggaggacagttctctggaaggttttccacggccgatcacggaaagggtgagaaaggagaggtcctggtcggcgacacaattacggtggcagtgtaacgccaggaaactttattgcgtgaagtccctctcactccctctacctccctcttttacggtggactctgccaaagaccaggattcccagaatgccagtggagtgaccaagtgtagtgggaccttgggaacacgagtctggagccaggcggctggggtttgcatccctggttcttgcccctccttagctggctgaacatggcacaagcccacttaccctctctgagcccttacctgtccttcggtggcaaaatggatctgtccaaanaggcccccattccccggggttgttactgctgagattaagggaagctcatcccatagaagcacttagcccttgtgcctggcacatagtgtatggtggataaatgggacttaggactaaaactcatgccttggtgtgtttttgcagtgatgttttgttctggggtgcatcaaaagagacaaggttcttggttgggcatgatggctcaagccaataatcccagcactttgagaggctgaaaagggaggatcacttgtgcccaggaatttaagaccagcctgggcaacatggtgaagcctcatatctacctaaaaaaaaaaaaa

SEQ ID NO: 141232 - DNA, 828 bp, Homo sapiens
atgaggttctcggactccacactcagcccggctggacttcaagtcgggctgggtcttacccttcaggccagcatggccacggagataaaggaaagccaggtttatctcttctcccctggagtatctgttcccttaagagccaagaagagacaaggaagaaaaccagccaattccaaacacaaccagggggaacaaattctccaggtcctgggagctctggggccttggctggaattctgggtggagactctggtccgggaagccattgccctctttcctgtacatcctgtgccggatgatggcacatctggcagccaacactcatggacagccaaccagcaagctcactgggttgggagccactccccagagcttgtcttccatgatggatgcagaaaagggttcagtcagggaaaggaaactaacatgggccaagagcctactgcgtaccaggcccacgctagaggattgacctacaagatgccatttgatccttgcaacagctttggccagctctgtgagcgatccaggcctcagtttccttacccagaagttagggatgataaaaggaagttccttacaggaccaagtgagaatgatgcatgtgaagtatttggcccaggtctggcgcatagaacagactgtgttcctgtgtttacctgggggcaagtacgcttcccctacatcatttatggctgtcccctttcctcccctctgaggcctgcagagaagggaaaaacagaccctaaactgaagaagtgtgtccctccagaccttgtgggcagagggcaggatcccagcctcatcccctacacggggacaccatag

SEQ ID NO: 141233 - DNA, 966 bp, Homo sapiens
atgccgactgtgcttgcatgccctgcatttgactctagaggatccccgatctgccgtttcgatcctcccgaattgactagtggagtgcgagctctagaagaatcccctaatgccattactttgcctgtatgtggtcgggatgtgaagtttactcttgaagtgctccggggtgatagtgttgagaagacctctcgggtatggtcaggtaatgaacgtgaccaggagctgcttactgaggacgcactggatgatctcatcccttcttttctactgactggtcaacagacaccggcgttcggtcgaagagtatctggtgtcatagaaattgccgatgggagtcgccgtcgtaaagctgctgcacttaccgaaagtgattatcgtgttctggttggcgagctggatgatgagcagatggctgcattatccagattgggtaacgattatcgcccaacaagtgcttatgaacgtggtcagcgttatgcaagccgattgcagaatgaatttgctggaaatatttctgcgctggctgatgcggaaaatatttcacgtaagattattacccgctgtatcaacaccgccaaattgcctaaatcagttgttgctcttttttctcaccccggtgaactatctgcccggtcaggtgatgcacttcaaaaagcctttacagataaagaggaattacttaagcagcaggcatctaaccttcatgagcagaaaaaagctgggaaaaggagccgaagacttcaccacactcttctcagagtggtggcagaaatagataaacctgatccgagagatgaactagcaggtctgttgcagtttgctggaggtccactccagaccctgtttgcctgggtatcaccagtggaggctgcagaacagcaaagattgctgcttgctccttcctctggaagcttcatcccagaggggcaccagcttgatgccagccagagctctcctgtatga

SEQ ID NO: 141234 - DNA, 1032 bp, Homo sapiens
atggtggaagacaaagaggagcaagtcacatctgacgtggatagcggcaggcaaagagagagcttgtgcagagagaaacgcctgttttcgaaaccatcagatctcaataagaagcgatgtttcaaacaaggaagagtccatcaaccaggattcccaaccatgctctgtgatgtgatgggcaaagaggtcactccctcatcaggtccactcctgggttttggggaagcaccctctgatcgctggcactatgcctgcatttcttttgttagatgttccaggagaaacacagagccactgacaattagaatgatcagacaggagcggggtggctgtgctgcaggcccaagccaggggaccctgttggaagaagagcagggggctacagaagctggtgccaaggtgctcagggatccaaggcccatgggactcaatgtgggtttgagtgctggctctgctcagactccaggcagctttctgtgtcactctggaggcccacagtggtcaggtgggctctcccatgctcagcttgcaaaggttcacggcagcagttcaggctcgtcttgtgcaggtctgctgcagtttgctggaggcccactccagaccctgttttcctgggtatcaccagtggaggctgcagaacatcaaagattgctgcctgctccttcctctggaagcttcatcctagagaggcactggcctgatgccagccagagctctcctagccggcagacaggaaagattaagtctgctcaacatgcaaccctacagccgcccctaaccccaggtgctgtgtcccagggagatgagacttttgtctgtaagcccctgactggaacttctggatttcctgcagaggtgccctgcacagtgaagagcaatctggaaaagcggtctggccacagctactttcctgcgctgtgtggagtccaggtgccactggagtatgaaaaaactcctgcagctcagtgcctgaccgaacagcctccaggttttgtgcttgaaacccagggccttggtggtgtaggctcatga

SEQ ID NO: 141235 - DNA, 399 bp, Homo sapiens
atgggcacacagtcacacctcattgtgaagtctgctgaaacggcacacctggtgtttgtctgcaggtctgttcttgcaactaatgagcatggattggagctcgtcgggaataattgtgactcgatcaaagtgggcactgagaagaaaaggctgtcctctctggtctctcttcacgacatccaccatactcctactgactcctttactacaaactcactaagcactgctccgcagactttcagaaatcttcaggtggtgaggtgtttgagtaaactgagctggcctatctggtggattcccaagttcagcaatctttcagccactgagcattctggcctcaatggtggcagctcccctaccctgctggtggcaaaggaaactcctgttgctgagttctag

SEQ ID NO: 141236 - DNA, 1266 bp, Homo sapiens; identical to SEQ ID NO: 129356

SEQ ID NO: 141237 - DNA, 993 bp, Homo sapiens
atgggcacacagtcacacctcattgtgaagtctgctgaaacggcacacctggtgtttgtctgcaggtctgttcttgcaactaatgagcatggattggagctcgtcggcacgaccagcgtctatgcaggtgccgggggctctggttcccggatctctatgtcccactcctccagcttctggggcggcatggggtccgggggcctggctgtgggaatggccgggggcctggcaggaatgggaggcatccagaacgagaaggagaacttgcaaagcctgaacgactgtctggcctcctacctggatggagtgaggagcctggagaccaagaaccggaggctggagagcaaaatcggggagcacttggagaagggaccccagactatcgaggacctgagggctcagatcttcgcaaataccgtggacaatgcctgcatcgtgctgcagattgacaatgcccgtcttgctgttgatgactttagagtcaagtatgagacagaactggccatgcaccagtctgtgaagagtgacatccatgggctccgcaaggtcatcaatgataccaatgtcacttggctgcagctggagacagagattgaggctctcaaggaggagctgctcttcatgaagaagaaccatgaagaggaagtaaaaggcctacaagcccagactgccagatctggattgaccgtggagggcaagctagaggctgagatcaccacctaccgctgcctgctggaagatggtaaggacttcagtcttggtgatgccctggacaacagcaactccatgcaaactatccaaaagaccaccaaccgccagatagtggatggcaaagtggtgtctgagaccaatgacaccaaagttctgaggcattaagccagcagcagcagggtacccatctggttctaggaacacagggacaccatgactattgaagtgttgaagattccagatgaaacgttttttaaaatgtaagcctacactgcagggcat

SEQ ID NO: 141238 - DNA, 495 bp, Homo sapiens
catgtgtctgttcactggtatccactgagcactgggccgttgctccgtgggtgctcctgtgtcttcaagggagtaacagttacagaggtctcccccttgaagaaagcaaactaagtattgtccctagctgtacttagtatgcaaatgaagtttggccttgagtttcccttttctggaggaagaggctgagggtgatttggagataaaggtagaggtcaggaggctttttccctctacctttcttgtctcccttctactccacggggctgtttataacttgggcttggtcttctgttacagtcttggtgatgccttggacagcagcaactccatgcaaaccatccaaaagaccaccacccgccggatagtggatggcaaagtggtgtctgagaccaatgacaccaaagttctgaggcattaagccagcagaagcagggtaccctttggggagcaggaggccaataaaaagttcagagttcaaaaaaaaaaaaaaaa

SEQ ID NO: 141239 - DNA, 992 bp, Homo sapiens
  misc_feature (1)...(992): n = a,t,c or g
gatagccgggggtctggcaggaatgggaggcatccagaacgagaaggagaccatgcaaagcctgaacgaccgcctggcctcttacctggacagagtgaggagcctggagaccgagaaccggaggctggagagcaaaatccgggagcacttggagaagaagggaccccaggtcagagactggagccattacttcaagatcatcgaggacctgagggctcagatctttcgcaaatactgtggacaatgcccgcatcgttctgcagattgacaatgcccgtcttgctgctgatgactttagagtcaagtatgagacagagctagcaccatgagccagtcatgtggagaacgacatccatgggctccgcaaggtcaattgatgacaccaatatcacacgactgcagctggagacagagatcgaggctctcaaggaggagcttgctcttcatgaagaagaaccacgaagaaggaagtaaaaggcctacaagcccagatttgcaagctctgggtttgaccgtgggaggtaggatgcccccaaattttcagggaccttcgccaagattcatgggcagacatccggggcccaattatggacggagctgggctcgggaaggaaccgaggaggcagcttaggacaagttatttggtcttcagcagattttagggatgggcaccacagtgggtcacccacacagtctgcttgaggttggaagcttgctgaagacgacgcttcacagaagctgagacgtacagtcccagtcctttggagattcgacttggactccatgagaaatctgaaggccagctttggagaacaagcttaagggaaggttgaaggcccgcttacgccctacagattggagcagctcaacgggattcctgctgcaccttgagtcagactggcacagaccccgtnagagggctaggagcctnctaacccttttaccatctatnccacagataggcactatgattaatagggaagatgaaactt

SEQ ID NO: 141240 - DNA, 366 bp, Homo sapiens; identical to SEQ ID NO: 140634

SEQ ID NO: 141241 - DNA, 398 bp, Homo sapiens
tactaaattcgcggcccgtcgaccggcgttggcggcttgtgcagcaatctccaagatcaaggctcgagatcttcgcgggaagaagaaggaggagctggttgaaacagcatggacgacctgaaggtggagctgtcccagctgcgcgtcgccaaagtgaacagggcggtgcggcttccaagctctctaagatccgagtcgtccggaaatccattgcccgtgttctcacagttattaaccagacttcaggaaagaaaaccttcagggaaattcttacaaggggcaagaagtacaagcccctgggaccttgcgggccttaaggaaggacacgtgccatgcgccgccggttcaaaccaagcacggagggagaaccttgaaggacccaaggaagcaggcagcgg

SEQ ID NO: 141242 - DNA, 547 bp, Homo sapiens
ggtattcaattctttaatggagttacagccacatcgtgggtgcagcagggtgtaggcgattccaaagagcagatgattcaaattcgtgtgcgatgggtacagagagatacgcttggctccagacccacgcgtctccctgtttccctctcttgtggtgggggcacagtagccttcgtgtgtcttcctctagcacagacccctgagctgagggtaggaaaaatgaaggcagcacgagggacgctcccacctcccactctatcctcaagaacctcggccaatgaacgggccactcttgctagttggggtactgatcacttcctgtcctctctgtgaggttggagatgtggccttggaacacaccttcgtgacccccaggagttgctgtaaatccatcggaagtgtgtcctgtgacggacgcgatgtgtctccaaacgtcatccaccagaaggtaactggagattttgtgtgttgccttgacagacccctgagggctggtgacttcatttttatttttatcttcttcacaaggtggcaggaaggagaagac

SEQ ID NO: 141243 - DNA, 1020 bp, Homo sapiens
atggcatcagctggagacacccaggcaggcccacgggatgcagcagatcagaacttcgactatatgttcaaactgctactgataggcaacagcagtgtgggcaagacttccttcctgttccgatacgcggacgactccttcactcccgccttcgtcagtactgtgggcatcgatttcaaggtcaagaccgtctaccgccatgacaagaggatcaagctgcagatctgggacacagcgggccaggagcgctaccgcaccatcaccacggcctactaccggggagccatgggcttcctgctcatgtatgacatcgccaatcaggaatcctttgccgctgtgcaggactgggccacgcaaatcaagacctactcctgggacaacgcccaggtcatcctggtggggaacaagtgtgacctggaggacgaacgtgttgtgcctgctgaggatggccggaggctcgccgacgaccttgccgcatctacagcctcgcgcgtctcctggcggcggcccgtggaagcgcggccctacgtgccggggctgggccaggactctccctgccaaacacgtccaaatgtgcccgggtgccccagggaccccgcccagccgctaaagtgctgtggggtgaataactacacagatttttctggctcttccttcgaaatgacaacgggccacacctaccccaggagttgctgtaaatccatcggaagtgtgtcctgtgacggacgcgatgtgtctccaaacgtcatccaccagaagggctgtttcgataaactcctaaaaatcaccaagactcagagcttcaccctgagtgggagctctctgggagctgcagtgatacagttgccaggaattcttgccactttgctgctgtttatcaagctgggctgacacccaggcctggagaagatgagacacctgggcccatctggctgctggagattcagtctcagttttatttctctgtggcactcactgcttctggaggggagactgttaataaaagatatgggaaccccc

SEQ ID NO: 141244 - DNA, 1173 bp, Homo sapiens
caaaacagaaaattaaatgtgcccctttttgtgcagacagagattccgtggaagatgatattcaattctgtaatggagttacagccacatcgtgggtgcagcagggtgtaggcgattccaaagagcagatgattcaaattagtgtaagatgggtacagagagatacgcttggctccagacccacgagtctccctgtttccctatattgtggtgggggcacagtagcgttagtgtgtcttcctctagcacagacccctgagctgagggtaggaaaaatgaaggcagcacgagggacgctaccacttcaaattccaccctcaagaacttcggccaatgaacgggccactcttgctagttggggtagtgatcacttcctgtcctctctgtgaggttggagatgtggccttggaacacaccttcgtgaccctgaggaagaattacagaggttacaacgagccagacgactattctacacagtggaacttggtcatggagaaggggcagcacggagcggcccgggccacccggaagggccccgcccccgcgccggccccgccccgccccggctgcccagaaccgggaggcggcggcggcggcggggccggggcccggggcggcggcggcgggacgcgaggaccatggctgcctccgagcgccgcgccttcgcgcacaagatcaacagggtccagtgcccagctgtcggggggggggaagggggacagctgtggacgcccccccaccttctgcttcaggctctcccgtcacgggctggaccgcgctggggatggatgggtgattgaatggagggagtgggggctggggacagaaccagctgcttctctgcaaagccgcatctacagcctcgcgcgtctcctggcggcggcccgtggaagcgcggccctacgtgccggggctgggccaggactctccctgccaaacacgtccaaatgtgcccgggtgccccagggaccccgcccagccgtcagctccctgaaagacagaaataagttgatccaaattggcatcgagatctgtggttccctggagaagcaggagggatgtagggcagacggaggaggaggagcagggagcgtggggacctccatcaaccgagagctggtgaaatccagcacagatgagtgtgatctgggggagcccagcacttgtcactga

SEQ ID NO: 141245 - DNA, 203 bp, Homo sapiens
ccacccccaaggtggcaactggtgtctgtcggcatcttctccttcccatactctccaccgggcaccaggcacatgcccgcctgtagggttttctggtgtcttccctccacaaacctgcatcgagggtctccccatgcaccgtgctgttgcttctgtttctctggaaaacccaatacagcgatcttccagtagtcttcatcagg

SEQ ID NO: 141246 - DNA, 2672 bp, Homo sapiens
  misc_feature (1)...(2672): n = a,t,c or g
ttaagaggagacgtccttgtgctcgtccttgtcctcgtcctcctgtgcaccatggcttttgctgtgggcctgacacaccttggggctgccttgtttcaggtcagaagaggagaacttgtagagtgagccatgcttgggtggaaggtaggtgggctcaccaacatcctctacacaattagtacagactgtgatctgaggtggcgtcctagagctttgggataccgctcctagcatggcaaacaccatcagctctgcaccaaaggctgctcggaaatactgtttccttctctcctgagcaattgccacatactggaaatgcaaaagccttgtgaattccatggtaacagcatgatcgctggtataccactcgtacaaataaagtacaacgagggcacagaagaggaaaagcttaattctgcccaggggacagagcttaaaaatctcgcaagggcgtttataaacagtccatggagtatgaggggcgtaagaagctgccagagagactgtgtcgtctacctccacgtacatctcaccgtctggcttccagcccttcccacccccaaggtggcaactggtgtctgtcggcatcttctccttcccatactctccaccgggcaccaggcacatgcccgcctgtagggttttctggtgtcttccctccacaaacctgcatcgagggtctccccatgcactgggcgcagtgccaggaaagaggtcttccagtacgcaaccactcagaccctggccgatggatggccaaaagatgcatcggcaaaagaagcagtcctgagctcacccgccttctctgtcccttcacggtcaatgacctgaacattggcggaattattgggggggttctggttgtccttgctgtactggccctgatcacgttgggcatctgctgtgcatacagacgtggctacttcatcaacaataaacaggatggagaaagttacaagaacccagggaaaccagatggagttaactacatccgcactgacgaggagggtgatcttaaagagtttgctcacgtaaacgcccgtgctgggccctgtgaagccagcatgttcaccactggtcgttcagcagccacgacagcaccatgtgagatgggcgaggtgggctggaccagcacccagcagccgccatcccggcgggaaccccagaaaaggccttccttaccacagcagcccttactttcatcggccccacagacacccacccgcagtttccttccttaaaggctctgcctgatcggtgtttgcagtgtccattgtggggagnaggttttttgggttcagcattttgtaaaaacaaccaaaatcaggaaggtaaattggttgctggaagagggatcttgcctgaggaaccctgcttgtccaacagggtgtcaggatttaaggaaaaccttcgtcttaggctaagtctgaaatggtactgaaatatgcttttctatgggtcttgtttattttataaaattttacatctaaatttttgctaaggatgtattttgattattgaaaagaaaatttctatttaaactgtaaatatattgtcatacaatgttaaataacctatttttttaaaaaagttcaacttaaggtagaagttccaagctactagtgttaaattggaaaatatcaataattaagagtattttacccaaggaatcctctcatgcaagtttactgtgatgttccttttctcacacaagtaatagcctttttcacaagggaactcatactgtctacacatcagaccatagttgcttaggaaacctttaaaaattccagttaagcaatgttgaaatcagtttgcatctcttcaaaagaaacctctcaggttagctttgaactgcctcttcctgagatgactaggacagtctgtacccagaggccacccagaagcccttcagatgtacatacacagatgccagtcagctcctggggttgcgccaggcgcccccgctctagcttcactgttgcctcgctgtctgccaggaggccctgccatccttgggccctggcagtggctgtgtcccagtgagctttactcacgtggcccttgcttcatccagcacagctctcaggtgggcactgcagggacactggtgtcttccatgtagcgtcccagctttgggctcctgtaacagacctctttttggttatggatggctcacaaaatagggcccccaatgctattttttttttttaagtttgtttaattatttgttaagattgtctaaggccaaagcgaattgcgaaatcaagtctgtcaagtacaataacatttttaaaagaaaatggatcccactgttcctctttgccacagagaaagcacccatgaacccacaggctctgtcgcatttcaaaacaaaccatggatgggagtgggcgggccagtccaggccttttaaaggaacgtcaggtgggagcagcccgggtgaaaggccgggcggtggagggaaagtgaaacgcctgatttcaaaagcagtttttttattttgacttttaaattttttcatccgccggagacactgctcccatttgtggggggacattagcaacatcactcagaagcctgggttcttcaagagcaggggttctcagcctcacatgccctggccgtgctggactcaggactgaagtgctgtaaagccnaggagctgctga

SEQ ID NO: 141247 - DNA, 400 bp, Homo sapiens; identical to SEQ ID NO: 112913
  misc_feature (1)...(400): n = a,t,c or g

SEQ ID NO: 141248 - DNA, 1365 bp, Homo sapiens
atggctggggaggccccagaaatcttacagtcatggcagaaggcaaaggggaagctggcaagtcttacatggctggagcaggaggaagagagagtgaagggggatgtgctacacacctttaaacaaacagatctcatgagaactcactcactatcacaggaagaggaaggggaaatctgcccccatgatctaatcaccttccaccaggtccccaccccaacattgggaattacaatcgacatgagatttggactcttccactcaaaatgtggtctgcaagctgcaattccacagcaccaagtggttggctttgcattatctcatttaactgtaaaaggacaatcctatgaccacgcagagctcgaggaggaatgccaaggaagttccactgggacactgaagctaagaccaggaggtgaagagtggcaggacaagcattctgagagagggactagcaatgtctgctggccccacaagaagagctccacaaaggaactgaaagaagccacgggtctgaagttcagtgacagagaagatgggagcttggcaggggccacactaactgcaatgaaagctatcactgaaggggaatgcaccagcttcaagagcccgaacaagagacccagagccagcaaagcagacatggggtttgttgagagaaacttacttacatacagggatggtccagtgacagtgggctacacagaactgctctgcccagtggcagcagacagggcaggagagccgcttaggctactgccgccaggagtcccagtactatcagccatggtcaaccacaccatgttcttcgacgttgctgtcgacagtgagcccttggaccacgtctcctttgagctgtttgcagaaaagtttccaaagacagcagaaaacgttcgtgctctgagcactgaagagaaaggatttggttataagggtccctgctttcacagaattataccagcatttatgtgtcagggtggtgacttcacgcaccataatggcactggtggcaagtccatctacggggagaaatttgaagatgagaaatttatcctaaagcgtacagcctggatcccacgcctgccaagggagactgcgtggagcggtagggggtgtgtaagcgagtatggggtctggccaccgcacagtcatatgtgccagctgctgcagcggagcgggcagctccaggtgccagcacaggcgccagctctctgcaaggctgcagctggaccaggtgcaccgcaagcagcttccacagttggcaccagggaacacagtggcaccctgaagcttggagatgccaggaacctcagggacccaaataccactgctatcaatattacttggcctgtcatcagcatttga

SEQ ID NO: 141249 - DNA, 1256 bp, Homo sapiens
ctggagacccggacctcggctttcaaagcggctgggtgggaagagctgtttatataaacagagattccgctgtaaatgcgctaatatcccggctgccagcgcatggcgagcgcctcccacgcccatccgtaggagcggcgtcccggccgcccctccgttcccagcctgccctgcccccgcctccttcccctcctcggccatggccacctctggacgcctgagcttcaccgtgcgcagccttctaggtttacccgagcaggacgcgcaacacctgccgaggcgggagccagaaccacgcgccccccagcccgacccctgcgccgcctggctggattcggagcgcggccactacccttcctcggacgagagcagcctggagaccagcccgccagactcgtcgcagcggccgtccgctaggcccgcgtctccgggctcggacgccgagaaaaggaagaagcggcgggtgctattctccaaggcgcagacgctggagttggagcggcgcttccggcagcagcggtacctgtctgcgcccgagcgcgagcagctggcgagcctgcttcgcctcacgcccacgcaggtcaagatctggttccagaatcatcgctacaagctgaagcgtgctcgcgctccaggggcggcggagtcgcctgacctggcagcatccgccgagctgcacgccgcgcccggcctgctgcgtcgcgtggtggtgccggtgcttgttcgcgacgggcagccgtgcggcggcggcggcggtggcgaggtgggaaccgccgcggcccaggagaagtgcggcgcccctccagccgccgcctgccctctgccgggctaccctgccttcggtcccggctcggcgcttggcctcttccccgcctaccagcacttagcatcccccgccctggtctcctggaactggtgaggccgcagggcggcacctggggctaccctcgactttggagcgcgctctgcgattggagcagggccggagccgaacgcctggaacgctctccgtccgcctccctgcagccccatctccttgggcgccagggtccctggcgcgccctcatcagccgtcgcgcaagcacacacgagggacgtgtgccagagccccctccctcaccttccctccaccgccagccccagagttagattttatgcttgggccttatttgtatatttttaaatagcgatttgtataggaagcaagttatttttttaaaaaatagagtatttttcctcgtaaaaaaaaaaaaaaa

SEQ ID NO: 141250 - DNA, 397 bp, Homo sapiens
atgcgctttgccaagaagcacaacaagaagggcctaaagaagatgcaggccaacaatgccaaggccatgagtgcacgtgccgaggctatcaaggccctcgtaaagcccaaggaggttaagcccaagatcccaaagggtgtcagccacaagctcgatcgacttgcctacattgcccaccccaagcttgggaagcgtgctcgtgcccgtattgccaaggggctcaggctgtgccggccaaaggccaaggccaaggccaaggccaaggatcaaaccaaggcccaggctgcagccccagcttcagttccagctcaggctcccaaacgtacccaggcccctacaaaggcttcagagtagatatctctgccaacatgaggacagaaggactggtgcgaccccc

SEQ ID NO: 141251 - DNA, 1209 bp, Homo sapiens
atggccagtgttggcgagtttacccccaccccgttcccactcagggctccgcaaacctcggcacactgcagtgcagtcgacctggaggaggccggcgctggtgacccagcttgtgataaactggtcggccagcgcaactaccggtgcggacatgttaagagggccccggggtgggttttttcggggcacgatctcaggcccgctgatgaccgctgtggtatgaatgaggtcaccgcattcggagaggtggatgtccagatgtggactcaggaaatggcctcatcccgaaagtctcgggctacctcggacgagagcagcctggagaccagcccgccagactcgtcgcagcggccgtccgctaggcccgcgtctccgggctcggacgccgagaaaaggaagaagcggcgggtgctattctccaaggcgcagacgctggagttggagcggcgcttccggcagcagcggtacctgtctgcgcccgagcgcgagcagctggcgagcctgcttcgcctcacgcccacgcaggtcaagatctggttccagaatcatcgctacaagctgaagcgcgctcgcgctccaggggcggcggagtcgcctgacctggcagcatccgccgagctgcacgccgcgcccggcctgctgcgtcgcgtggtggtgccggtgcttgttcgcgacgggcagccgtgcggcggcggcggcggtggcgagagctgctggcgtttcgaataccgaaaagtcaaccctgtggaccacgacagggcagaaggagtttctccggagatgagccggcgaggccagggcctcttgtgcaagcagtcactttctcacagaagcgacgacctcgctcccaggcacccgctgctgggagatgcgccagaggagagcagttggggcatcagagcacaacaagaagagcctaaagaagatgcaggccagcaatgccaaggctgtgagtgtatgtgccgaggctatcaaggccctcgtaaaggccaaggagatactactactcccactacacaagtgggaaaattgaaggccaaaaaggttagaagagacttgtccagggtcatacggctggtaagtgacatagaggatctgaacccaagccgtctagttccagatcttacacctctggccacatgggactggaaaggctatttggcagaattcactaggaagggaatggagtctgtttgcaaattaaagtag

SEQ ID NO: 141252 - DNA, 996 bp, Homo sapiens
  misc_feature (1)...(996): n = a,t,c or g
tttttttttttatttcataattctcctttattaggcacaggtaaacatacatactcatggtatccaaaacctagagtatggacctgggattgtggaccccaagtgtccccagaagagtcccacctgggactttccaggtggccacaggacagaccctggcctaatcctggtccctcaaccttggtgctcaggtcagaagcccccatggttgacaggcctgggacccccatttccaaaacagtcttgagttagacaaagaactagcctcatagtttgggattctttatcttcttgggcccaaatccccaggctttaggccctggaaggagaatcttctttaatcaaagaggacaagagattgctgggaacaaaggtcccagagttgagcttgggttggggtccctgaatttggaaggggaggagggccttggagcctttggaaaagggatacctcccctttctctgaaaaagggtaccaagatacaaaggcaggctggtttgtttgtgaaagggattgtccttggacagaggtgcctgagcaccagcatcagtggaggccgacactggtacaaaagtgtaccccagtgtagacaagtgacctatggtccatggaaaagtgttgtcagctcaaaggatgcccagttttgtcaatctctgtgagcagggaatattgtctcctttgctcacttgctgtacttcccagcaccgagaacagggctttggcacctgataagcacccaagcaggaacttgcaatgtgtgtggaacaaagcagatgtgtacacagcacactccacacaggcttctgcctttctcccttctggaaggcactgaaggtttggctcagttcagaggcaggagaaggcttggagctacccccaaactcaatccactgttggcagctgagcgtgtagtagggtggtcctagccatacagaaccacttctctgtctccctcctcttccctggcttcgtcgaattanannanactggactag

SEQ ID NO: 141253 - DNA, 779 bp, Homo sapiens
ggtcttttcacctaattcacttaatgtttgatgactacgtgctctacctgttagaatctctgcactgtcaggagcgggccaatgagctcatgcgagccatgaagggagaaggaagcactgcagaagtccgagaagagatcatcttgacagaggctgccgcaccaaccccttcaccagtgccatcgttttctccagcaaaatctgccacatctgtggaagtgccacctccctcttcccctgttagcaatccttcccctgagtacactggcctcagcactacaggagcaatgcagtcttacacgtggtctctaacatacacagtgacgacggctgctgggtccccagctgagaactcccaacagctgccctgtatgaggaacactcatgtgccttcttcctccgtcacacacaggataccagtttatccccacagagaggaacatggatacacgggaagctataactatgggagctatggcaaccagcatcctcaccccatgcagagccagtatccggccctccctcatgacacagctatctctgggccactccactatgccccttaccacaggagctctgcacagccatgccagcccacatgtggttgtcttggatgtgccgagttcctccatgtctttgcagaaattgttccctctggctgggtgtctcttccccagtctcttcggctgggcattcatgatgggcattcatggcaatcatattgccgtctttgtggcattcctgaaagtaccaccttgagtcctccaggaccttattag

SEQ ID NO: 141254 - DNA, 274 bp, Homo sapiens
  misc_feature (1)...(274): n = a,t,c or g
tggtaggtcttaacaggggtgtcagcccccagaagggaggcggctcgaccgctcagaggctctgtgagggcccgggaggcctggctgggctgtgtggttgagggtaggggaccgggggctgggcggctagaggactcgcccaccttgcagtctccccaggtgcatgggtagcaatagagggagtaggtgtccggcgatggggagccactgccactngggaacccgcccgcctcggatttgggagggactggaggcggcgcnttccgctcgtgcc

SEQ ID NO: 141255 - DNA, 3387 bp, Homo sapiens
atggcctcggcctcggcctcgccctctctgtgtctgcggcgccctctgcaggatttagggggccgggacaaggaagaggacggtcccttcttccaataccaggaagctaaggaggcaagaattaaggttgccgcagatccgtacagattcaccgtgggtaactccagcccctcctccgtggcggccaggagtgggcacagtgggcgtcagctgtcccgggagcaggctcatgggggagcatcggcgccccgccgtcgggcaggccagcgtctagttctctggctcgcggccgagtggtcagagtgtggggagtacgccgagggcgtcagtgagcgagacatcctgctcatccactcctgccggcagtggacaacggtgacagctcataccctggaggagggccactatgtcatcgggcccaagatcgacatccccctgcagtacccagggaagttcaagctcctggaacaggcccgggatgtgcgggagccagtgaggtacttcagcagcgtggaggaggtggccagtgtcttccctgaccgcatcttcgtgatggaagccatcaccttcagcgtcaaggtggtgtcgggcgagttcagcgaggacagcgaggtgtacaacttcacgctgcatgcgggcgacgagctcactcttatgggccaggcggagatcctgtgcgccaagaccaccaaggagcgctcgcgcttcaccaccctcctgcgaaagctgggccgggccggggcgctggccggggtgggcggcggcggcccagcgagcgcgggggccgcgggaggcactggcggcgggggcgccaggccggtcaaaggcaagatgccctgcctcatctgcatgaaccaccgcaccaacgaaagcctgagcctgccctttcagtgccagggccgcttcagcactcgcagcccgctggagctgcagatgcaagagggcgagcacacggtgcgcgccatcatcgagcgcgtgaggctgccggtgaacgtgctggtgcccagccggccgccgcgcaacccctacgacctgcacccggtgcgggagggtcattgctacaagctggttagcatcatctccaagacggtggtgctggggctggcgctgcgccgcgagggcccggcgccgctgcacttcctgctgctcacggacacgccgcgcttcgcgctgccgcagggcctgctggccggggacccgcgcgtcgagcgcctggtgcgcgacagcgcctcctactgccgcgagcgcttcgaccccgacgagtactccacggcccctcccgccggcgagggcgaccaggagtacgtgagccccgactgggcagccgcgcccgagcccgccgcgccgcccgccgagatcccctacgaggagttgtgggcgcaccaggggcccgaggcctcgtccggcccgcccccagggctcgatctcatctccttcggggccgcgggaccgccgcgtcgggagccggaagcgccgccgcctccagtccctcccaaatccgaggcggtgaaggaggagtgccgcctgctcaatgcccctccagtgcctccccggggtggcaatggcagcggccggctctccagcagccccccggttccccctcgcttccccaagctgcagccggtacattcccccagctccagcctctcctactactcctctggcctccaggatggggcgggttcccgcagtggcagtggctccccatcgccggacacctactccctctattgctacccatgcacctggggagactgcaaggtgggcgagtcctctagccgcccagcccccggtcccctaccctcaaccacacagcccagccaggcctcccgggccctcacagagcctctgagcggtcgagccgcctcccttctgggggctgacacccctgttaagacctaccacagctgccctcctctattcaagccctcacatccccagaagcgctttgctccgtttggagctctcaaccctttttccgggcctgcctacccctcaggcccttcagcggccttgtcttctgggcccagaaccacctcgggtcctgtggctacctctggccctgcgtattccccaggcccagcctcgccaggccaggcctattcagctgctcccccctcctcctgcgccccctcctcctcctcttcttctgaatggcaggaaccagtcctggagcccttcgatccctttgagctggggcagggcagttctccagagcctgagctgctgcgttctcaggagcccagagcagtggggacacctgggcctggaccccgcctttcaccacttggcccctccaaggcctttgagcctgaaggtttggtgctgcaccaggtccccaccccactgtcaccagctgctctgcagggacccgaggcgggaggagcactttttctaacccaagggcgcctggaagggcctcctgccagtccccgggatggagccacaggctttggagtccgagatgcctcctcctggcagccccctgctgacctgtctgcactctccctggaggaggtctctcgcagtctgcgtttcatcgggctctcagaggatgtggtgagcttctttgcccgagaacgcatcgatggtagcatctttgtgcagctcagtgaggacatcctggcagatgacttccacctcaccaagctgcaggtcaagaagatcatgcagttcatcaaaggctggaggcccaagatctgaactgcccagctggagctgcacagctggaatgctggtatgggggccccaggtacagcactccggaggagcaggtgctgcctgcaagaaggatctatgtcgagactgaggctgctcagcagccactgggtggatccaggggagatgcatgtggaaatgtggtcctctggggtcagacccctgcacgggacatcttgcctttgagtgtgcagagtacatggggaaggggctgggggcaccactgtgtacctgggcccagtaaggcatttgccgtgattcccacaacggggtcaaaagctggccttcagggtgacctaacaccccctcatgccctgctatagaccttcacaaacgacttccactgctgaagcctgtaggctctgtttagagacaagaagatggctggtaatttaagccccgatttcccaagtgcccactctcctttgtgctctgttggcttttggcctaaagctgccccagagtgagggtgtaggatgtctgtggtctgtgagatgcctttcccttcccccctctgcttcaaccgtggttgaggggggtggggcctggccccgcacacaggtgagtcgtgtacaagcctaacccatggcacctcagaggctccacctgtgggtcctggttcatgggtgacaactttggaagagcacagctctgccatttgaccgaccc

SEQ ID NO: 141256 - DNA, 750 bp, Homo sapiens
atggatggtgggaagaatgcaaaccttggaacaaaatatgaattcctcctccatgagtcaagtgttcttgtgcaatatttcccacagcaaggaccacgtgtctttgtgatatttgagatgtccaacccgtcaatgagaaaccgaatcaagaaaatgcgagctgtggaaggaaacgtcatgacttctttcttgccaactatgacacagcaggagcccagtgtgccagagcctcaacaagaagaaccaccaactgaaagtcaggatcatacacctggtcagaagagagaagatgatcagggtgcagctgagattcaagtgcctaacctggaagctgatctccaggagctgtctcagtcaaagactggggatgaatgcggagatagtcctgatgtccaggggaagattctgccaaaatcagagcaatttaaaatgccagaaggagaacaccttagggatgtcatccatgcttgtgaggaggaggaacctgtgtcaatgactaccctgaactggctgcctgctgacagctcccgtaaaccaaagatgcaaatcagttgtttggactggacaaggaaccctagagggaaaggtcccttaatgggaggccacattgggggccttggccagctcctacctgacgaattcgacgtagcccagaagggagacaggcaaggtgagaaaatggaaaccctgatgattgctgaaatgatgactgtcactggcagcatggacctggtgtgcttgctgcgctga

SEQ ID NO: 141257 - DNA, 409 bp, Homo sapiens
  misc_feature (1)...(409): n = a,t,c or g
cttcaggcctggtggcggcttccaagctaaggaacggtttggggcagtgtcnttcccggaggtcggccgccggtacccgctcaccagctacgcggcgcgtcaggtccgcggaggcgcgggctcggggcgcctgcgggacggacactgcccatctctaagataagaacctggaaaggggactctgttggccattggaaattgcagaataatgtctcaggtgacatttagtgatgtggctatagacttctctcatgaagagtgggcatgcctagattctgctcagagggacttatacaaggatgtgatggtccagaattatgagaacctggtctctgtagcaggtctttccgtaactaagccatatgtgatcatgttattggaggatggaaaagagccctggatgatggat

SEQ ID NO: 141258 - DNA, 874 bp, Homo sapiens
  misc_feature (1)...(874): n = a,t,c or g
aattcggggcagtgtcgttcccggaggtcggccgccgttacccgctcaccagctacgcggcgcgtcatgtccgcggaggcgcgggctcggggcgcctgcgggacggtgaggccctgctgaggactccggacactgcccatctctaagataagaacctggaaaggggactctgttggccattggaaattgcagaataatgtctcaggtgacatttagtgatgtggctatagacttctctcatgaagagtgggcatgcctagattctgctcagagggacttatacaaggatgtgatggtccagaattatgagaacctggtctctgtaggtaaggatatcaccccttccactccaataggggacacctttcttttgccaccctgaattgctggagattctcctaagtaaatggctgaatttctgtaccatgctcccgaggaaatgtgcagctctgttgtgccctgcctaaagcttatctttccatttcagtgaacacccttcatccattcctgtggtccctcttgtgatggcctctcataatagaggaccacagcttaaacaattctatatttgtcctgtaagcaggtctttccgtaactaagccatatgtgatcatgttattggaggatggaaaagagccctggatgatggagaaaaaactgtcaaaggtattgattccacatgagtcatggtgaccgagacaaaggaagatttgttaaagatgtttatagtgagtgtggaagcattttagggatactgtcttcaaagatctcagatagaaatgaaaaattgagggatatttagcttagattttcaaaacaattgtncctccctctcaaattattatctgtatcactcatgtcacctaatcaaggt

SEQ ID NO: 141259 - DNA, 2581 bp, Homo sapiens
ctgaggactccggacactgcccatctctaagataagaacctggaaaggggactctgttggccattggaaattgcagaataatgtctcaggtgacatttagtgatgtggctatagacttctctcatgaagagtgggcatgcctagattctgctcagagggacttatacaaggatgtgatggtccagaattatgagaacctggtctctgtagcaggtctttctgtaactaagccatatgtgatccatgttattggaggatggaaaagagccctcggatgatggagaaaaaactgtcaaaaggtatgattccagattgggaatcaagatgggaaaacaaggaattatcaacaaagaaggataattatgatgaagattcaccccaaacagtaataatagaaaaagttgtaaaacaaagttatgaattttcaaattctaagaagaatttggaatatatagagaagttggaagggaagcatggaagtcaggtagaccatttcagaccagcaattctcacctctagagaaagccccactgcagacagtgtttacaaatacaatatatttagaagcacctttcattcaaagtctactctttctgaaccacaaaaaatttctgctgaagggaattcacacaaatatgatatattaaagaagaacttaccaaaaaagtcagttataaaaaatgagaaagtcaatggtggaaagaaacttttgaattctaataaaagtggggcagccttcagccagggcaaatctcttacccttccccagacttgtaatagagagaaaatctatacatgcagtgaatgtgggaaagcctttggcaaacagtcaatcctcaatcgccactggagaattcatacaggagagaagccctatgaatgtcgtgaatgtgggaagacttttagccatggctcatcccttacacgacatctgataagccatagtggagagaaaccttacaaatgtattgaatgtgggaaggcctttagccatgtctcatcacttactaaccatcagagcactcacactggagagaaaccatatgaatgtatgaactgtggaaagtcttttagtcgtgtgtcccatcttattgaacatctaagaattcatactcaagaaaaactctatgagtgtcgtatatgtggaaaggccttcattcataggtcatctctcattcaccatcagaaaatccatactggagagaagccttatgaatgtagagaatgtgggaaagctttctgctgtagctcacaccttactcgacatcaaagaattcacactatggagaaacaatatgaatgcaacaaatgtctgaaagtctttagtagcctctcatttcttgttcagcatcagagtattcatactgaagaaaaaccctttgaatgtcagaaatgcaggaaatccttcaaccagcttgaatcactgaatatgcatttgagaaatcacattagattgaaatgtgatttctatctaatgaatgccatatatgtgggaaagcctttagtcataggtcatccctgcttcaacatcacagaattcatactggagagaaaccttacgaatgtattaaatgtgggaagaccttcagctgtagttcaaaccttaccgtacatcagagaattcatactggagaaaagccatataaatgtagtgagtgtgggaaagcttttagcaaaggctcaaatcttactgcccatcaaagagtacataatggagagaaacccaatagtgtgggaacccctgcagcctgtagtctccaggcaggccttgggccaccaggctggagagagccgcggccacactcagcggtgcaaggtgacccggctgtcttcctggcaggtcctcgtgggagcggctgtcccttgttcaggggcccgggaccgcgtccccgtcccccgacatgtcccccaagcatgccttcagggcagggtgcagactggaaggctggactggcggggacacgcgtgttctgcatctcctaacgctgtgcccactgtgacatttagtgatgtggctatagacttctctcatgaagagtgggcatgcctagattctgctcagagggacttatacaaggatgtgatggtccagaattatgagaaccttgtctctgtaggtctttccataactaagccatatgtgatcacattgttggagcatgggaaagagccctggatggtggagaaaaaactgtcaaaaggtatgattccagtgttggaagttctagccagggcaatgaggcagaagaacgaaataaagggtattcagttaggaaaagaggaagtcaaattgtccctgtttgcagatgacatgattgtatatcttgaaaaccccattgtctcagcccaaaatctccttaagctgataagcaacttcagcaaagtctcagagataccaaaatcaatgtacaaaaatcacaaggcattcttatacaccaacaacagacaaacagagagccaaatcatgagtgaactcccattcacaattgcttcaaagagaataaaatacctaggaatccaacttacaagggatgtgaaggacctctttaaggagaactacaaaccctgctcaacgaaataa

SEQ ID NO: 141260 - DNA, 2436 bp, Homo sapiens
atgaatgacctttatagcaaggcttgtgaggctctcaacaccaacaaggaaaccaccgttttggactactggaagccagtcactcttcagtacccagagggttacctggcaccaaatagatgcttagtaagtaattgtggagtgaataagatgagtaatgacgaactggtggggcagaatcatggcatggaaggtgaagcttgcataggaggggatgtcttatttaaggactatctaaggcagtggtgcccaacctttttggcaccagggatcggttttgtggaagacagtttttccacagaagcaggaggtggtggtttgggggtgacatttaatgatgtggctatagacttcactcatgaagagtggggatggctcagttctgctcagagggacttatacaaggatgtgatggtccagaattatgagaacctggtctctgtagcaggccttcctgaacctaagccatatgtgatcacggtatttgaggatggaaaagagccctggatgatggagaaaaaactgtcaaaaggtatgattccaggcattcacagcctggcacctacttgccctggagatcaggagcacggcagtgaagagcagcccgaaagtaggagccagcttcatggtgccagtggcaagttctgccaagaggtcggcgccgtcatcaccgccgcgtttacacggactcaacacggaaggccaggaaatgcccaacgccccggccgtggtcaagacgcgcgcggacccaggggccttagccccgccgtcgccgcgacccacacttgccggagtcctcagcagggcctcaccgtcccgcaggcgccccgagcccgcgcctccgcggacctgacgcgccgcgtagctggtgagcgggtaacggcggccgacctccgggaacgacactgccccaaaccgttccttagcttggaagccgccgccaggcctgaagctatcgcgggactgacccagtgcaccgcccacggcgaaccacatttcccagaatcctccccctgcggtacaaatgtcccggaagccgcgaaccgccggcacccgaagaccacacttcccaagggtctctgcggctgcgcggacctggtgcgccgcgggcaaaccggtcacggctttgtaagtagcttaaccgcctggggccgtcgacctagagccggccagctaggaccatgcgcaaattgtcctggggcacacagtcgtcctctggtgaacgatacaactcgaaaccaagggacaccctctacttataagggccatggcgcccggaccaagaaattacatttcccagaaaactgcagccgtgccaaggtcttccgggtcattcctgcgctcacacaaacgtttccctccgagacatgggcagcccttgctgttccctttgccgggaaggttccccaaagaccccttcattccaatgtccacctgctagagagaggcctgcaccttccccttgcaaagtgtacttcagctgtcgcccccagggatctccaatccactgtgggtgaaatattggttaaaaatgtaagcttctggctgggcacgtcggctcatgccaggcatcaaaagggagaagcacagagtcccggcatccgccgtattacagcggatgggtgcatgcgggcggtgacccgagctcgcgcgggctgcggaaccctccactcaccaacgccggcgccgccatgggcccaggggctggattgtgttgctcttcgagagtatgggcaggctctgggaacagagcacataaatcactgcaaaaaagacttcctcagaggttcctgccttccaggtggtgtttgcaaacacagtcctgtctgtgaaagaaaggtgaaagagttaaaaggagccgttaacagtcatcccagcccaaatatttttggtgtctccacgattcgaaggcaaaaagttcaaacctggccttttcttttaagggttttaggagggagagcagagccaactcttggaggcactggactggctgtgacacagaaaaacaagatatgtgaggatagaaaatctgtaccgaggactttgaagaagtccttgtccaatcgccatgggcagtatcggcgacctgacatacgaaatttagacagaccaaacagaaaaatagacactgggaaaaacaaagtcagatctgactcaccttcctgggaccagagactgaggactcaggagttgaatttggtgggcatacactggcagtcgatccattcccctccagaagacagtggcctacagggcgctggaacatcttcaggttgcgcttcccctataagcccgccatctgttgggggtagcccagaacgagtccagcactcacccagtggtgaaatctcactggggcctccaaatgttgtaaccaggcgagttgtagagaaacgccacactctgagactaattcaggactccttttattgctga

SEQ ID NO: 141261 - DNA, 528 bp, Homo sapiens; identical to SEQ ID NO: 129556

SEQ ID NO: 141262 - DNA, 741 bp, Homo sapiens
atgaccagcaaagacaaaacttccagaggaacgatcagacagcagcattcgcggttcaagaaaatccgctgttctgcagccaccactgctggtactcaggcaaacagggtctggagtggacctctagcaaactccaacagacctgcagctgaggcaggtgtctccacagcagctgctccagatgggccaccaccaccatcagtacctactgtagacagcgattctttagagtccgcacagttcaagtgtgacaatctaaaaacttgtcacacttcacatggatctgtcatggcggaaacagcggttatcaatcacaagaaacgtaaaaatagcccgcgaatcgtccagtcaaacgacctcactgaggcggcatatagtctctcccgggatcaaaaacgtatgctgtatctgttcgttgaccagatcagaaaatctgatggcaccctacaggaacatgacggtatctgcgagatccatgttgctaaatatgctgaaatattcggattgacctctgcggaagccagtaaggatatacggcaggcattgaagagtttcgcggggaaggaagtggttttttatcgccctgaagaggatgccggcgatgaaaaaggctatgaatcttttccttggtttatcaaacgtgcgcacagtccatccagagggctttacagtgtacatatcaacccatatctcattcccttctttatcgggttacagaaccggtttacgcagttcggctag

SEQ ID NO: 141263 - DNA, 1455 bp, Homo sapiens; identical to SEQ ID NO: 129557

SEQ ID NO: 141264 - DNA, 1156 bp, Homo sapiens
  misc_feature (1)...(1156): n = a,t,c or g
agccggctcccggcccagtcccgtcctgcagcagtctgcctcctctttcaacatgacagatgccgctgtgtccttcgccaaggacttcctggcaggtggagtggccgcagccatctccaagacggcggtagcgcccatcgagcgggtcaagctgctgctgcaggtgcagcatgccagcaagcagatcactgcagataagcaatacaaaggcattatagactgcgtggtccgtattcccaaggagcagggagttctgtccttctggcgcggtaacctggccaatgtcatcagatacttccccacccaggctcttaacttcgccttcaaagataaatacaagcagatcttcctgggtggtgtggacaagagaacccagttttggcgctactttgcagggaatctggcatcgggtggtgccgcaggggccacatccctgtgttttgtgtaccctcttgattttgcccgtacccgtctagcagctgatgtgggtaaagctggagctgaaagggaattccgaggcctcggtgactgcctggttaagatctacaaatctgatgggattaagggcctgtaccaaggctttaacgtgtctgtgcagggtattatcatctaccgagccgcctacttcggtatctatgacactgcaaagggaatgcttccggatcccaagaacactcacatcgtcatcagctggatgatcgcacagactgtcactgctgttgccgggttgacttcctatccatttgacactgttcgccgccgcatgatgatgcagtcagggcgcaaaggaactgacatcatgtacacaggcacgcttgactgctggcggaagattgctccgtgatgaaggaggcaaagcttttttcaagggtgcatggtccaatgttcctcagaggcatgggtggtgcttttgtgcttgtcttgtaatgatgaaatcaagaagtacacataagttatttcctagggatttttccccctgtggaacagggcatgtttgtatttatattaacatatctttggaggcattcttggacagactcctggctgtccagtttctcagtggcaactattttactggttgaaaatgggaagcaataatattcatctgaccagttttctcttaaagccatntccatgatgatgatgatgggactca

SEQ ID NO: 141265 - DNA, 670 bp, Homo sapiens
atgatgcttcctgagggtgttctagaagcccgttccccagtggctgtatccagcctttccttgcatcatcttcctcttgaagatgcttcaggggcccggcttttcaggcttgccctcaccagcggccgtcagccgacactcagggatgtagctaacaccactccgccagtgctttcagtaggaagagctgaggctgcctgggaggcccggggcgaccggaaaagggctctctcaagttctgaaaagagaatctgccaccagatcgaatttcgacccctgagcttgttcggacgtatggtccaaattcagattaaggtggtcacccaacccgagatgtcaggaaaggccttctgcagagaaaatgtccccccacccgccatctgcagccagacaccaggcttcatggagcgcaagacgactcacacagtggcccaggccttgtcacacgcagtgaggacaatcagaggagcacggtcaccgctcaggcctgatgccagcaggacacccaccagctgccagatgagcacgcaatcactcctcatttgcaaagcacggctcccatcattccagaacccaagacactgtctcacaaagacagctctctgcaaggaactgggaagtaacttgagtccagtcagaccggcaaaaatcagtccctcggccttgacct

SEQ ID NO: 141266 - DNA, 559 bp, Homo sapiens
accggaaaagggctctctcaagttctgaaaagagaatctgccaccagatcgaatttcgacccctgagcttgttcggacgtatggtccaaattcagattaaggtggtcacccaacccgagatgtcaggaaaggccttctgcagagaaaatgtccccccacccgcccatctgccagccccagtgtgtgtgccacacggcagcccttccccgaaacatagtatggattttaaaaatgtgtttatttttgtttcctcaacccacctttataacgtattttttaatttattttgtaatgtcatgtttatgaagtattgctgctatccttgttatccttcccactggttttatatcactgatttattttgtgaaagttgtacactaatgttctatgtcaaaatcaaaagtatttaatgaaatactagttctatttaatgtggttatggaaccagctggaaacacaaaacaaacagtgattgtacacgcaggctgggccgcaggaggtccaggttcattttgttacatatgcaataaacccacggacttttaaaaaaaaaaaaaaa

SEQ ID NO: 141267 - DNA, 496 bp, Homo sapiens
ccagaaagttccataagccagagtaccgtttaaacaattcccttcttgtacctcaacaatatgtacccagggttttatgtatacacttaagatttgggggaatgcaaaagggaagggtgactgtttagaatttccttggaaatgtctgtgcacattacaacgtcccacggagccaaattccttccaaactggatgaagcaaagctcttgattcttgagtcatgatgttattttcttctaatttttccgaaccgtctttgtttgactggacaccatattgacagcttcagatggtaggccaacatatactcctccatagtttctcctcttgtcatcttctgttacggattcttctgttacatctttggctgctcctgcagggccttggcccgcgcccgcgctggtggcggtggagttcccgcagcccatcgcgcagccggccggggaagccgcgctccggagcgaattccaccacactgactagggtcacaaaacgg

SEQ ID NO: 141268 - DNA, 888 bp, Homo sapiens
ctaagagcagcccagccggtcttcggcatcaaggcagacacagatgcgtttttgcagctctgcttctagttctccccaaccccactcccacccttccccgcttcctgccccaccaccactgcccgaaaagtcctgtcttgctctgctgcacttttccaggtgcagcgccttggttccgaggagatgggggagaggcctggaggagcaagtgtgggaggtgggggagcggccggggaccacgtccgggaatcctctcccccaggagagccctgagacccgccagctgcaggtgagccccggcggctgcaggggagcccgcgacagtcctccccgcgctccctcggcagagacgccccgcaggctcgactgctccaggcgcaaccgcccccgcgcgggggacttgccacgctttcggtctttccagaaacgggcggtctgctccttggcccgcgcccgcgctggtggcggtggagttcccgcagcccatcgcgcagccggccggggaagccgcgctccggagctctcggccgcgggtccctcagcatcctcctcgccttgtctttgcttttctttcctcacttcccctccctgccccaggatgtggggaggagaggaagtagcagggggcaccctgcacagtggacgcccaataaatgctattgactgaatgttgtgcaggtctgaagccaaaaccgaaatccccagctgctttaacagaaggccaacgcagctctgttccccatacgcactgcctggcaaaagttcttccccagattggtcatcttgacctattcctctcgaacttgccaaccaggctctcatctcacaccttctcacttgccgatccctcatgtctgcaatcttgtcctccagatatttgcacgccat

SEQ ID NO: 141269 - DNA, 423 bp, Homo sapiens; identical to SEQ ID NO: 125858

SEQ ID NO: 141270 - DNA, 342 bp, Homo sapiens
atccccaaggaagacatgaggaagacgttcagggagcaagggctcagaaatggaagctcaattttaattcaggattctcatgatgataacagcttgttgaccaaggaagagaaatgggtcactagtatgaatgagattgactggctccacgttaaaaatttatgccagttagaatctgaagagaagcaagttaaaatatcagcaactgttaacacaatggggtttgatattcgaattaaagccataaaggaattaaaattaatgaaggaactagctgacaacagctgtttgagacctattgatagaaatgggaagcttctttgtccagtgccggacagctat

SEQ ID NO: 141271 - DNA, 355 bp, Homo sapiens
ctgaagagaagcaagttaaaatatcagcaactgttaacacaatggtgtttgatattcgaattaaagccataaaggaattaaaattaatgaaggaactaggatgaaggttattaattcctagctctctaagaaaaataatattccttttatatatagctgacaacagctgtttgagacctattgatagaaatgggaagcttctttgtccagtgccggacagctatactttgaaggaagcagaattgaagatgggaagttcattgggactgtgtcttggaaaagcaccaagttcgtctcagttgttcctgttttttgcaatggggagtgacgttcaacctgggacagaaatggaaat

SEQ ID NO: 141272 - DNA, 1571 bp, Homo sapiens
tcagccctgaatacccaggccatatccagtgctgtcaggggctggagaggcctccaagcctggatattgggactggtgtttgccgccagtcagggcagctcctgtgggtttttcttctttgcatgtttgtccagaaatggggtttcttgcactgggctctgggcactcactgcactcgtgcttttccatctccgacagttcacctctggggacagaggaggttgctgcctgctggagcacctcagtctctgtgagtataaggacatcttcacacggcacgacatccggggctctgagctcctgcaccctgggtgttgaatcactggctgagtcccgagagggcaaaaggccactgtgggtgtcctggacagtggctctcatgaggtcacttgtcatccacttgcttttaggcctgtgttttgtctttgtcttggatttgtccttgctgatggtagtgacgtttttgtcattttggctctcatttgtgttcacaagccgaatgggaagggccgttgtggcaggcctgctgtggagccctctggccctggctgtcttctcggcatccatggcggtgtcttctctgttgcaggacagggtttctggttcagagttgaagggatcagcattaattaacaggcgactgatgactgagccaccgggtaaggaaccagacattccagcccggacatttgggtacaggatcttggtgttgagcgcaggcagccgtcccggcttcccgggtctcaccaaaaccaagcacacgacggtgcgcagagggaggtggaggcacaagtacctttgcgctggctcctccccttgggaccccgaagtctcgctgtgggacagtggtgggcacactctgtggtccatcttctcctctgactcagagaggcccaggacgaagccctcctgctcctgggtctgggcattctgctcatcgacaggggagtagacgcttatagtgaagtcaatgagggccaggaaagaggtcgaggggaggcagcatgaaggggtcccatctgcatcttcaatgatgtccttcccgatcgaggccagtgtggtccacttgcagttattggttgcacgcacagcacagcgcttgtgggccttaaatttgcacacctcgcaggacagcccgtgcgacgtgaccccagacagagcctcacggcacacattgcagtaggtcggcctcgcgtgggaacaggcgtaccaattgtgcatccctgagaagtggtccatgctgtactgggtgggtgtgttaacagttgctgatattttaacttgcttctcttcagattctaactggcataaatttttaacgtggagccagtcaatctcattcatactagtgacccatttctcttccttggtcaacaagctgttatcatcatgagaatcctgaattaaaattgagcttccatttctgagcccttgctccctgaacgtcttcctcatgtcttccttggggatggccgtccaaccctccccacctggacatccagcactgttgatgaagatgacacctgctgggattgctaaggctgtgaggacagtgcccacttctgcattag

SEQ ID NO: 141273 - DNA, 1655 bp, Homo sapiens
ctcacctactgtatcataggagcttagattcccagctgcttgctctcagctgcagttctctgatggcttgcacagggtggaccagcccccttcctctatgtgtgtgtctgctgctgacctgtggctttgccgaggcagggaagctactggtagtgcccatggatgggagccactggttcaccatgaggtcggtggtggagaaactcattctcagggggcatgaggtggttgtagtcatgccagaggtgagttggcaactgggaagatcactgaattgcacagtgaagacttattcaacttcatataccctggaggatctggaccgggagttcaaggcttttgcccatgctcaatggaaagcacaagtacgaagtttgttttctctatttctgagttcatccaatggtttttttaacttatttttttcgcattgcaggagtttgtttaatgaccgaaaattagtagaatacttaaaggagagttcttttgatgcggtgtttcttgatccttttgatgcctgtgcgttaattgttgccaaatatttctccctcccctctgtggtcttcgccaggggaataggttgccactatcttgaagaaggtgcacagtgccctgctcctctttcctatgtccccagaattctcttagggttctcagatgccatgactttcaaggagagagtacggaaccacatcatgcacttggaggaacatttattttgccagtatttttccaaaaatgccctagaaatagcctctgaaattctccaaacacctgtcacagcatatgatctctacagccacacatcaatttggttgttgcgaacagactttgttttggactatcccaaacccgtgatgcccaatatgatcttcattggtggtatcaactgccatcagggaaagccattgcctatggaatttgaagcctacattaatgcttctggagaacatggaattgtggttttctctttgggatcaatggtctcagaaattccagagaagaaagctatggcaattgctgatgctttgggcaaaatccctcagacagtcctgtggcggtacactggaacccgaccatcgaatcttgcgaacaacacgatacttgttaagtggctaccccaaaacgatctgcttggtcacccgatgacccgtgcctttatcacccatgctggttcccatggtgtttatgaaagcatatgcaatggcgttcccatggtgatgatgcccttgtttggtgatcagatggacaatgcaaagcgcatggagactaagggagctggagtgaccctgaatgttctggaaatgacttctgaagatttagaaaatgctctaaaagcagtcatcaatgacaaaagttacaaggagaacatcatgcgcctctccagccttcacaaggaccgcccggtggagccgctggacctggccgtgttctgggtggagtttgtgatgaggcacaagggcgcgccacacctgcgccccgcagcccacgacctcacctggtaccagtaccattccttggacgtgattggtttcctcttggccgtcgtgctgacagtggccttcatcacctttaaatgttgtgcttatggctaccggaaatgcttggggaaaaaagggcgagttaagaaagcccacaaatccaagacccattga

SEQ ID NO: 141274 - DNA, 2025 bp, Homo sapiens
atgatggggaccgtgatagctggtgggggcctgcaggccacagggcatcaccaaaatgcccccttgagtgggccaaagaggcagtgtatcctgtggggtatcacattgtcaggacagactgaaggaaaggagaagatggttggtggagtccacattcaaactggtattgactgcgaacctctacttttaaatgttcttcatctagacacaagcagtgatggagaaaagtgttgtcaggtgatagaatctccacatgcctttccagctaatgcagaagtgggcactgtcctcacagccttagcaatcccagcaggtgtcatcttcatcaacagtgctggatgtccaggtggggagggttggacggccatccccaaggaagacatgaggaagacgttcagggagcaagggctcagaaatggaagctcaattttaattcaggattctcatgatgataacagcttgttgaccaaggaagagaagaaatgggtcactagtatgaatgagattgactggctccacgttaaaaatttatgccagttagaatctgaagagaagcaagttaaaatatcagcaactgttaacacaatggtgtttgatattcgaattaaagccataaaggaattaaaattaatgaaggaactagtgtttaaagttaatgctgaagaaatctggcctacaagggtggaccagcccccttcctctatgtgtgtgtctgctgctgacctgtgctttgccgaggcagggaagctactggtagtgcccatggatgcggagccactgttcaccatgagaattctcttagggttctcagatgccatgactttcaaggagagagtacggaaccacatcatgcacttggaggaacatttattatgccaccgttttttcaaaaatgccctagaaatagcctctgaaattctccaaacacctgttacggagtatgatctctacagccacacatcaatttggttgttgcgaacggactttgttttggactatcccaaacccgtgatgcccaacatgatcttcattggtggtatcaactgccatcagggaaagccgttgcctatgatgccaggatgtgtctgggaaaagcatgcagttggttacatcttgctgggaaacaggattcagagtctgtgtcttatctgtctgatgagaaggaagcattacttgatgatggagtatgtgtttgcacatgaagacttcttagatctaacagtagcagtcaaaaatgtatccggtttggaagatgctctctggaacatgtatgtagaagaggaagtttttgattgtgacaacttgtaccactgtggaacttgtgacaggctggttaaagcagcaaagagtgaattggatgacttagaatatatatatgacctcttctcagttattatacacaaaggtggctgctacggaggccattaccatgtatatattatagatgttgatcatttgggaaactggcagtttcaattcttacagctccattctcagatatttctactcagttcagatgaaagtacagttcgtctcttgaagaatagttctctccaggctgagtctgatttccaaaggaatgaccagcaaattttcaagatgcttcctccagaatccccaggtttaatcaatagcatctcctgtccccactggtttgatataaatgattctaaagtccagccaatcagggaaaaggatattgaacagcaatttcagggtatagaaagtgcctacatgttgttttatcggaaatcccagttgcagagaccccctgaagatgccaggatatgtctgggaaaagcatgcagttggttacatcttgctgggaaacaagattcagagtgtgagtctcatctgcctgatgagaaggaagcattacttagtgatagaggacaaagcgttgatggaaccaatccagaaaaagtgttcttgttgtctaggccttcttgttgtacaaccaaaaaactgtcagtgggtgttgatcttgtcccctcaaggcttaaggtttggcagttctacacatga

SEQ ID NO: 141275 - DNA, 415 bp, Homo sapiens
tttttttaagctggagccgcttgtatttattcagtacagatttaatgacaaaggcctggagccaacacaatctgtaggtaattgtcacccccaccgccttgggagcagtcctgcgcgcaataggatgatcaaaggtctgcaaaagtaaataaaactcgtctagataaattcctttacactcctttgttacctacttcttgcccttagcgtcagggtaagagaatttagctgccttcagcctttattctctcccgaagctttgcaaaacctcctggacttccaagaaggtttgcgtctctccttataacttttcccaccaccctgactgatctcctacatctcccccttttgttttttgcatcaggttttgttgattgaagagtacagatgtgcacagcagcaggtttgtcaggcg

SEQ ID NO: 141276 - DNA, 550 bp, Homo sapiens
atcctaccagtttccatttcacattgggaaggttgatcatttcagttaaccatgttaggtttttgtaggagattggtcagggtggtgggaaaagttataaggagagacgcaaaccttcttggaagtcctgggaggttttgcaaagcttcgggagagaataaaggctgaaggcagctaaattctcttaccctgaggctaagggcaagtagtaggtaacaaacgagcgtgctggagtttatctagataagtttatttacttttgccgacctttgatcatccgaccttagatcatccgacctttgatcatctgacctttgatcatctgacctttgatcatccgacctttgatcatctgacctttgatcatctgcgtgcaggactgctccctacaggcgggggcaacaattacccacagattgtgctggctccaggcctttggcattaaatctgtactaaataaatacaagcagctccagcttattggggctgcgtactctcttcggcgtctctaaggccgagcaggttcctagctgcgctcacgcacaatacc

SEQ ID NO: 141277 - DNA, 510 bp, Homo sapiens; identical to SEQ ID NO: 127639

SEQ ID NO: 141278 - DNA, 717 bp, Homo sapiens
atgggagtctttgtagacatagggatgcaagcattaaatatgataccaagtatgataccagtggaaaaggtggcatcatcagtagcttctaatagagctgtaacactcatcacatggcccaagattccattccttggaatccgtgaggccaagaaccccaggtcagagaacacgaggcttgccaccatcttggaagtggcccaccgccatcttggaagtggctcgccaccatcttgggagctctgtgagcaaggacccccggtaacattttggcgatcacaaagggacctccaaagtggaactagtgctcagctggcagaactaatagccctcactcgggcactagaattaggagaagggaaaagtgtaaatatatatacagactctaagtatgcttacctagtcctccatgccaaggaagcaatatggagagaaagggaattcctaacttccaaggaaacacctatcaaacatcaggaagccattaggagattactactagctgtacagaaacctaaagaagtgacagtcttacactgcccgggtcaccagaaaggaaaggaaaaggaaataggaaggaaccaccaagcggatattgaagccaaaagagccacaaggcaggactctccattagaaatgcttatagaaggacccttagtatggggtaatcccctccaggaaaccaagccccagtactcagaagaagaaatagaatga

SEQ ID NO: 141279 - DNA, 1125 bp, Homo sapiens
cctctttgggtcccctccctttgtatgggagctctgttttcactctattaaatcttgcaactgcactgtcttctggtccatgtttgttactgctcgagatgagctttcgccccccgtccaccactggtgtttgccgctgtcacagacccgccgctgtcacagacccaccgctgactgccatccctccagatctggaagggtgtccgctgtgcttctgatccagcgaggcacccattgccactcctgattgggctaaaggcttgcccttgttcctgcacagctaagtgcctgggttcatcctaatcgagctgaacactagtcactgggttctacggttctcttccatgacccacggcttctaatagagctataacactcaccacatggcctaagattccattccttggaatccgtgaggccaagaaccccaggtcagagaacacgaggcttgccaccatcttggaagcgacccaccaccatcttggaagtggctcgccaccatcttgggagctctgttacttaaaccaaggactgttggtaaagaaagaacttaaactcataaataaatataaatccaacttgcaatttaaacttgatgttctgtcactgataccaactgatttgctgtattttaagttagggtggaactatccagaaattagattaaacaggttgttacggttctctcgtatgtttgagttcttccagagaacagaaacaaggacaaactatccaaacatcttcaggatttccaaccttgttatgtatatcgtcatcattatccactggaatgcatgtgtgttctactctatttctaaagctattggatttggaaatgatacatgggtctaccctgatattaatgatcctgaatttggccgtttggctagaaaatacgtatacagcctttactggtctacactgactttgactaccattggtgaaacaccccctcccgtgagggattctgagtatgtctttgtggtggttgatttcctaattggagtgttaatttttgctaccatcgttggtaacataggttctatgatttccaacatgaatgcagccagagcagaatttcaagcaagaattgatgctatcaagcaatatatgcattttcgaaat

SEQ ID NO: 141280 - DNA, 891 bp, Homo sapiens; identical to SEQ ID NO: 127644

SEQ ID NO: 141281 - DNA, 435 bp, Homo sapiens; identical to SEQ ID NO: 129635

SEQ ID NO: 141282 - DNA, 346 bp, Homo sapiens; identical to SEQ ID NO: 129636

SEQ ID NO: 141283 - DNA, 1260 bp, Homo sapiens
ctaagcaaagttggcaatgatagataaaacatcatcagccatttcatccagatcaaataactgccacgagaagaggtggcagtctcttctgtctgtatctgcccatgagtctctcagttgatcttccttcatgtcgcagtcagaaatgtgatgggtgcccattcctaagccaatcaagggtttttctaaacattttacacacattaactcatttattcccctcaataacttcatggggtaggtaccgatatcgtgctcatttcctagatatgctaagtggtactgggaagggtaactaacctgccaagggtagagagtaagtcgtggagccacgaagccaacccaaagggtctgacccagggtcagcacttttaacagcacgtcactggagagcctctgagatgcttctaaaaggacgaatccatctgcttctgtctctggtactgagggctttttagattccggaggctttctgaagaagtgaaacattgctgctgctgctgctgctgctgctgctgctgctgctgctgctgctgctgctgctgctgctgggtctagagccatctctgggccctgtaggtattggccacttctggccatcacccacagcagccacagcctcctgcttcttgccccaaagctgccactgtcatcagcctctgggctatggaaacatccaacatcagagggcagaaatgcaacagagttctgattattctcttttccacacagttttagtacaatgaccttgggtgagtcatttgaccatttggggcctcggtttgtgacaaagagatacttaccatgagacatgggtttggggggttggttctgatttaccttattcacttttgaaaatttggaacagtcaccttcactcactagaattccaaggtgctttctgtcacattttgaatacaaatctgaggaagcgtctttgcatcttctagtgatattttttcccgggctcagtgaatctacggcagggcagggtgccctttcccttaactcatgccacagatctccttttctgcattcccaagaggggagaggcctgagagggtcagcaacagtaccaatagggagcagagccagcgcaattctgctctttctggtggcttgactgaggaggaccttaacaccctctactctgaaccctccgatctgctttccatgctgcagtacaatcttttcaccctctgcatagaacccttcaatgtttcccattgatcttatgataaagaccgaactccacagcat

SEQ ID NO: 141284 - DNA, 475 bp, Homo sapiens
atgcgagcccatcaaagtgtatgttgtgggaaaccggagctgtaggtaaaacctgcctactgaatcagttacacaaccaatgcatttcctggagaatatatccctactgtctttgacaattattctgccaatgttatggtagatggaaaaccggtgaatctgggcttatgggatacagctggacaagaagattatgacagattacgccccctatcctatccgcaaacagatgtgttcttaatttgcttttcccttgtgagtcctgcatcatttgaaaatgtccgtgcaaaggtgctgtaaaatacctggagtgctcggcgctcacacagcgaggcctcaagacagtgtttgacgaagcgatccgagcagtcctctgcccgcctcccgtgaagaagaggaagagaaaatgcctgctgttgtaaatgtctcagcccctcgttcttggtcctgtcccttggaacctttgtacgctttg

SEQ ID NO: 141285 - DNA, 1566 bp, Homo sapiens
atggagtttcgtcatgttggccaggctgatctcgaactcctgacctcaggtaaaaatccagaggtaagtcatccaggctggtacatagctcttctccatgaagcctggtgccccaaccccttcttcatgggccaagatggagctctagtcagcacatctaagtcccaagaacaggatggagaaacagagctagaagaggacaaagaggctagggtgtggccatgtcaaaaaagcgaaaacaacaatatttgttaccactgctggatgaacagggccatcaaaaatgggaaacattttgaaaacatgttgaaacccatttatcagccttttgaccactgcagaaatagtttaagaaatcaagaatgtgaacattccggaaaggcgagggtcagctgccggggcgacgcggcgcggagagggcgggcgggggggctgtgggagcgccggtctctatatggcggcggctctgtcgggcctggctgtccgctctcgcgctcggccgccgcccgctcctatggggtcttctgcaaggggctgactcgcacgctgctcatcttcttcgacctggcctggcggctgcgtatcaacttcccctacctctacatcgtggcttccatgatgctcaacgtccgcctgcaggtgggctgtgtggaaatccgggggtttgtttctgctacctccagtctgatcatttgggccatgagcacaggtcaggcagccctgacgtatgagaaccagcctggcactcgcagcttcgccctggtggaggtgttactattgaatagaataatctcgcagaacactaacatcagagaaggtcacctgtgtgactgtgctgaaataggaccaaaaggaaaaattggacagaagaagaaccggacacagcacggctccaagtctgtcactagggtactacgggcggtcacgaaaacaagaccggtggtaaatcaaatcgagttccgaacaaccttcacactgggaactaaacttgatcttagggatgataaagacacgatcgagaaactgaaggagaagaagctgactcccatcacctatccgcagggtctagccatggctaaggagattggtatggaatcctgtgtttttcctcctccttgtacctcttttattgtagtgacagagactggagtccagtctgggaaaggagggtgtgtgtctcccactcagggcctggtgtactcttggggaaccagctggcaaggccctgtgggtcttaacgtcagcgttggaaggtggaagcagggctgggagccggcagaaggcgcccgggccccaggagctgcctcccgctggtggtgtgatcagaagagagtggggtcgagtgtacattgccgtgtggtcgtgtttcctgtaggtgctgtaaaatacctggagtgctcggcgctcacacagcgaggcctcaagacagtgtttgacgaagcgatccgagcagtcctctgcccgcctcccgtgaagaagaggaagagaaaatgcctgctgttgtaaatgtctcagcccctcgttcttggtcctgtcccttggaacctttgtacgctttgctcaaaa

SEQ ID NO: 141286 - DNA, 695 bp, Homo sapiens
atgcaggccatcaagtgtgtggtggtgggagacggagctgtaggtaaaacttgcctactgatcagttacacaaccaatgcatttcctggagaatatatccctactgtctttgacaattattctgccaatgttatggtagatggaaaaccggtgaatctgggcttatgggatacagctggacaagaagattatgacagattacgccccctatcctatccgcaaacagttggagaaacgtacggtaaggatataacctcccggggcaaagacaagccgattgccgatgtgttcttaatttgcttttcccttgtgagtcctgcatcatttgaaaatgtccgtgcaaagtggtatcctgaggtgcggcaccactgtcccaacactcccatcatcctagtgggaactaaacttgatcttagggatgataaagacacgatcgagaaactgaaggagaagaagctgactcccatcacctatccgcagggtctagccatggctaaggagattggtgctgtaaaatacctggagtgctcggcgctcacacagcgaggcctcaagacagtgtttgacgaagcgatccgagcagtcctctgcccgcctcccgtgaagaagaggaagagaaaatgcctgctgttgtaaatgtctcagcccctcgttcttggtcctgtcccttggaacctttgtacgctttgctcaaa

SEQ ID NO: 141287 - DNA, 1107 bp, Homo sapiens
ctgcagttttcctcagctttgggtggtggccgctgccgggcatcggcttccagtccgcggagggcgaggcggcgtggacagcggccccggcacccagcgccccaccacccagcaagccgcgcgcccgtccgccgcgccccgagcccgccgcttcctatctcagcgccctgccgccgccgccgcggcccagcgagcggccctcgatgcaggccatcaagtgtgtggtggtgggagacggagctgtagggtaaaactttgcctactgatccagttacacaacccaatgccatttcctgggagaatatatccctactgtctttgacaatttattctgcccaatgttatggtagatggcaaaaccggtgaaatctggggcttatgggatacagctggacaagaagattatgacgagattacgcccccttatcctatccggcaaacagaatgtgttcttaaatttgcttttccccttgtgagtcctgccatcatttgaaaatgtcccgtgcaaaagtggtatcctgaggtgcgggcaccacttgtcccaacactcccatcaatcccagtgggaacttaaacttgatcttagggatgataaaagacacgattcgagaaacttgaaggagaagaagctgactctccatcacctatcccgcagggtcctaagccatggctaagggagattgggtgctgtaaaatacctgggagtgctccggcggctcacacaagcgaaggcctcaagacagtgtttgacgaagcgatccgagcaagtcctctgcccgcctcccgtgaaagaaagaggaagagaaaattgcctgcctgttgtaaatgtctcagccccctcgtttcttgggtcctgtccccttggaaccttttgtcgcctttgctcaaaaaaaaacaaaaaaaaaaaacaaaaaaaaaaaaacaacggtggagccttcgcactcaatgccaactttttgttacagattaatttttccataaaaccattttttgaaccaatcagtaattttaaggttttgtttgttctaaatgtaagagttcagactcacattctattaaaatttagccctaaaatgacaagccttcttaaagccttatttttcaaag

SEQ ID NO: 141288 - DNA, 408 bp, Homo sapiens
  misc_feature (1)...(408): n = a,t,c or g
ttagagattacaatttgactgaagaacagaaggcgatcaaggccaagtatccgccagtcaataggaagtacgagtgtgagtggggagaagaattttcattgtccaagcaccctcagggaacagaagtcaaagcaataacatattcagcaatgcaggtctataatgaagagaacccggaagtttttgcgatcattgacatttaagacaccaaaaaataaaagactcctacgaagaactggttttgttttcctcttccttttgagaagacactatgaattaaattctacagcttttttttgatatatggaaatttgtagaacagaaatattttagttaaagtgtgactttcagaaagggaaaatcagggcacagccttggtctgtgttccccaaatattcacactttaan

SEQ ID NO: 141289 - DNA, 478 bp, Homo sapiens; identical to SEQ ID NO: 130804

SEQ ID NO: 141290 - DNA, 657 bp, Homo sapiens
caacattgggggagatatctgaagagagcatttgagcaatggcaagtgcccaggtttggtcacatgccagatcctgggccagtgaagcccctccaaccagtagaagtagaaaccaggggaaatgactacaagtttcttctgtttcacttttgggatgaatggctttataagttcagtgctgatgaattcttcatacccgggaagttgtgtgctattgttttctagaaaaggttgtaaaggccaggcgcggtggcttacgcctgtaatcccagcactttgggaagccgaggcaggtggatcacctgaggtcaggagttcgagaccagtctgaccaataaggaagtgaaagtacttagcattgatcaaagaaatttcaaattacgatcaattgggtggggagaagaattttcattgtccaagcaccctcagggaacagaagtcaaagcaataacatattcagcaatgcaggtctataatgaagagaacccggaagtttttgtgatcattgacatttaagacaccaaaaaataaaagactcctacgaagaactgtttttgttttcctcttccttttgagaagacactatgaattaaattctacagcttttttttgatatatggaaatttgtagaacagaaatattttagttaaagtgtga

SEQ ID NO: 141291 - DNA, 386 bp, Homo sapiens
ttttttttttcttgttactttttaaaatttcttttttataaattaatattttattgttggatcctcctcctttctctggagctgtgcttggggctactctgacactctgtctcttcatcaccagccaaggaaaggggctttcgggtagggcgtacgtgcagggcctccttgaagtacttgggaaggaggaagccatcagtattccctgccagagccaggggtccatcgatgaacacagctatttcacaatgggaccgcatgccactgatgataccggggtctccaggcagtcctggggccaggtgaatgtgcgtccttccctggcaggacaggcctttgagtaggatggatggccagtgcttccagaatgtaccatggactagcat

SEQ ID NO: 141292 - DNA, 949 bp, Homo sapiens
  misc_feature (1)...(949): n = a,t,c or g
cggcccccttgagatcgtagacactagtcagtgcggtggaattccacctccctgcccctccgtgaggcagatcctctttttatgtaagttgaaaaaactgcggcccagaaaggggagactttctaaaggtcccacagaggatgcccaagcgatctccaagcccagactttgtttcggttgcctgtggctccctgttaaccctggcccagtccagagcaaggttagctcctgagcaccctgcctgcccacagatggcttcgtgcccctgggcaccctcctgcagttgccccagttccgcggcttctctgctgaagatgtgcagcgcgtgggtggacaccaataaggaagcagcggttcgccctgcagctgggggatcccagcactggccttctcatccgggccaaccagggccattccctgcaggtacttaagttggagctgatgcccttgaagacaccgcaggccctgcccccgatgctagtccatggtccccttcaaaggttacaacacttgtctggggccaccccatgtccggcatggagcagcacccntgcatcccccagcccaggaccccagtctgcntaggttgctgactgcactccaggtgcccaggcctcagctccagctgtctctgcaggcatgcggtcccattgtgaaatagctgtgttcatcgatggacccctggctctggcagcagatggaatacccttcttccgctctgccaatggggtgattctgactccagggaatactgatggcttcctccttcccaagtacttcaaggaggccctgcagctacgccctacccgaaagcccctttccttggctggtgatgaagagacagagtgtcagagtagccccaagcacagctccagagaaaggaggaggatccaacaataaaatattaatttataaaaaagaaattttaaaaagtaacaagaaagaaaaa

SEQ ID NO: 141293 - DNA, 853 bp, Homo sapiens
  misc_feature (1)...(853): n = a,t,c or g
cgactgatccgcaatcgacttggccgtggccgacgtggtcaagacctggcgtttcagcaacatgcgccagtggaatgtcaactgggacatccgccagttggccatcgagtttgatgaacacatcaatgtggcctcaagctgcgtgtctgccagctgccgaatttgtacacgagtatatcgggggctacattttcctgtcgacgcgggagcgggcccgtggggaggagctggatgaagacctcttcctgcagctcaccgggggccatgaggccttctgagggctgtctgattgcccctgccctgctcaccaccctgtcacagccactcccaaagcccacacccacaaggggctcactgttctcacacccgctccaggcaggcacccagctgggcatttcacctgctgtcactgactttgtgcaggccaaggacctggcagggccagacgctgtaccatcacccaggcccagggatgggggtgggggtccctgagctcatgtggtgccccctttccttgtctgagtggctgaggctgatacccctgacctatctgcagtcccccagcacacaaggaagaccagatgtagctacaggatgatgaaacatggtttcaaacgagttctttcttgttactttttaaaatttcttttttataaattaatattttattgttggnnnnnnnnnnnnnnnnnnnnnnnngggcgccccggccggaaatcccaaatttagaaatggaaaaaccggaaaacccccgcaggtgcctttaaagggggcagggggcccaattaaaatttttttaattaaaacaccgttgggccttttttaaggaaacaaaactcctctaggttcaaat

SEQ ID NO: 141294 - DNA, 1093 bp, Homo sapiens
  misc_feature (1)...(1093): n = a,t,c or g
caccagtccaggctccctgggagttgctggggggcggagctgaagggtcctactattcctggagaccactggcactcctttctctctgggctctctctgcagtgggtcattgagggttcaggatgggcagtagggcagggtcaccatggagactaggggccaccgctgggttctttcaggaccgagacgtgcagctgtccaaggctctgtcctatgccctgcgccatggggccttgaagctggggcttcccatgggagctgatggcttcgtgccccctgggcaccctcctgcagttgccccagttccgcggctttctctgctgaagatgtgcagcgcgtggtggacaccaataggaagcagcggttcgccctgcaagtggggggatcccagcactggccttctcatccgggccaaccagggccattccctgcaggtcggggtacctaagttggagctgatgcccctggagacaccgcagggccctgccccccggatgctagttccatggtaccatttctggaagcactgggccatccatcctactcaaaaggcctgtcctgccaggggaaggacgcaacattcaccttggccccagggactgnctgggagaccccggtattcatcagtggcatgcgggtcccgttgtgaaatagctgtgttcatcggatggacccctggctctggcagcagatggaatacccattcttccgctctgccaatggggtgattctgactccagggaatactgatggcttcctccttcccaaagtacttcaaggaggccctngcagctacgccctacccgtgagaaccaccaccccagcccctattccttgttcctgaaagctgtgcccttctgcccctcaccctctctcctagcttccaaccctagactgacttaggtgtccctttctctaaccaactcttgtctttatcaggaaagcccctttccttggctggtgatgaagagacagagtgtcagagtagccccaagcacagctccagagaaaggaggaggatccaacaataaaatattaatttataaaaaagaaattttaaaaagtaacaagaaagaactccgtttgaaaccaa

SEQ ID NO: 141295 - DNA, 544 bp, Homo sapiens
cagttggcttagatggtttctctttacattcagaccggtcaaaatcttctgaaagttcatcaatgagttctgattcactccgaggcttgggtttttcttcaggctctgggcaataggggttttccatctttatccgtggctggttttaatctgtacttcagatgggattgtttcatcatcctcaccacacttctctagtttttcttctttagcttttgcctcatcgacttccttaattgagcggaggtcgagctcaggttctgcttgccgggtgcccagtgaagccgacagagcctcgagtgcttgatcactcattgtatccttctccacctttcttttcttctcttggggtggagcagcacttctgactgtccctgctggactgagcttttaaaacttctgtagattcctctttttcagtttttctttccagcagctgtaggcgacccacaggtgaagtcagatgacaaggcgtctatagcatcatctggccctatgggtttcgaagagtctgcaggaggccctgtgatcccttcctttttag

SEQ ID NO: 141296 - DNA, 838 bp, Homo sapiens
atgggctcgcctacacccgaacctaacctcgatgacattcagggttcttgggtatattcaccgccctacgacgatgtgaggtttcgatataggctggagagatttcgggaacatgggtcctattcgggaacctttaaaaaaatgggaacacgaatctacagaagtttaaaagctcagtcagcagggacagtcagaagtgctgctccaccccaaggaagaaaagaaaggtggagaagactggtttgtaacaatcctttaatggcccacttgagtccatcaagctatgaagtcttcctgaaaaggagtggattcacttacttcctagaggaactgcccagttcatatggttggatttgtgtccccacccaaatctcatgtcgaattgtaattcccagtgtggaggaggggcccgcccaggcactctccagcagcccagagggagctcctcccagacaaccaagcggaaaagaggcgaagccagaaagagacagagacctgccatcgtggccaaggaccccacgaagagggaacagaggtccacgcacgggacccaacctctgatcaagcccagcaggcacaggcctgcctcgcggagtgcaggccagccgagcctgggccgcccatgccgagcccgggcctgcccatcctgcacccacccggaaaccgcgcctgccagcgagcactccccgcagccccagctcccgcccacgcctctccctccacacctccccgcaagcagagggagccggctccagcctcggccagccccagagaggggcccctacagcgcagtggcgggctgaagggctcctccagcgcaggcagcgtggacgcctag

SEQ ID NO: 141297 - DNA, 1602 bp, Homo sapiens
tcagaccccctgttgatgtgtgcaaatgttggctgtggtaggcaggggtggggtgatcaccaggtccccagtgaaatgctcaggtggaggcagcagcagctgcactatggccctgctccttgggagtgtggtgttgctttcagtggcagcagccacaggcaggtggctggaaagcgtgtactttggctctaggtggcgctttatttgtgcctgaggattttcttttgtgattgttcttttaacttttattttttccgagttgaaggaaatagacagctgtagatggttcacaataccaatcacaatgcgataaatacaagttgcttcatttacatgggcaaagtgggatataatagtccagatcacaggaagtgggctagttggtttcttggtctgagcacagtaaagggattccactgtaaaaccaaggctttgccttataacccttgatgctccagcaaactctagcagacctgcagcagaggggccttcaagagctttgtaaaatgcaccaatcagtgctctgtaaaacgcaccaatcagcaggattctaaaagtagccaatcgtggggatgactgaataaagggcactctgataggacagaaatggaacaactttgggtccgtgccatttttaagagttgtaacaccacgaaggtccgtggctccattcttgaagtcagaaggccacaaacccccccggcaggaatcaactctggacacaacaggaatgcttttacactgatccaggtcatgctgatgcaagaggtggattcccatggtcttgggcagctccacccctgtggctttgcagggtacattcactctcctggctgctttcatgggctggcattgagtgtctatggcttttgccagcgcatggtgcaagctgtcagtggatctactattctgggttctctgtctggacatccaggcatttccatacaccctctgaaatataggcagaggttcccaaacctcaattcctgacttcagtgcacctgcaggcccaacaccacatgtaagccacaaagccttggggtttgcatcctctgaagcaatagcctgagctgtaccttggccccttttagctagggctggagctgaagtagcattttttccttctaggcctccaggtctgtgatggaaggggctgggctggtgtgaaggtctctgacatgccctggagacattttccccattgtatcggggattaacatccggattacttatgcaaatttctgcagccggcttgaatttctccatagaaaatggggttttcttttctattgcaccgtcatgttgcaaattgtccaaacttttatgctctgcttcatcttgaacactttgccacttagaaatttcttcccccagataccttaaatcatctctctcaagttcaaagttccacagatttctagggcaggggaaaaatgctgctagtctcttttcacagcaagagtgacctttactccagttcccaaaaagttcctcatctccatctgagacaacctcagcctggaccttattgtccatatcactatcagcattttggtcaaagccattcaacaagtctctaggaagttccaaactttcccacat

SEQ ID NO: 141298 - DNA, 543 bp, Homo sapiens
ttaggacacagggcaccaagtcacttggctgcacacagcacgggggccctggacctggcccacaaaaccattttttcctctcaggtctccgggatgccatgaaggtctctgacatgccccggagacatgttccccgttgtcttggtgattaacattcagctcctccttacttatgcaaatttctgcagctggcttgaatctctccccagaaaatgggattttcttttctattgcattgtcaggttgcaaatttttcaaacttttatgctctgctttctcttgaacactttgccccttagaaatttcttctaccagataccctaaatcatctctctcaagttcaaagttccacaaatctctaaggcagaagcaaaatgccaccagtctctttgcataggaagagtgacctttattccagttcccaacaagttcttcatatccatttgaggccacctcagcctgggctttattgtccatatcactatcagctttttggtcaaagccattcaacaagtctctaagaagttccaaactttcccacat

SEQ ID NO: 141299 - DNA, 567 bp, Homo sapiens
ttatgcaccggaatgctcaacaccatgtgaaaactgccaaaccttggggcttgcatcctctgaagccacagcccaagtgatactctggacccttttagccaccattggagcaactgagatgcaaggcaacaggcccctaaggatgcacacagcagggtggccctgggcctggccctcaaaacaatttttccctcctaggcctccaggcctgtgatgggagggattgccacgaaggtctctgacatgacctggagacattttctccattgtcttggtgatcaacattttatgctccactttctcttcaatgctttgctgcttagaaatttcttgcaccagatcccctaagttatctctctcaagttcaaaggtccacagatctgtatggtgggggccaaataccaccagtctctttgcatagcaaaagtgatctttactccagtttccaacaagttcctcatctccatctgagaccacctcagcctggaccttattgtccatatcactatcagcattttggtcaaacccattcaacaagtctctaggaagtttcaaactttcccacat

SEQ ID NO: 141300 - DNA, 687 bp, Homo sapiens
ctctgtctggacatccaggcatttccatacaccctctgaaatataggcagaggttcccaaacctcaattcctgacttcagtgcacctgcaggcccaacaccacatgtaagccacaaagccttggggtttgcatcctctgaagcaatagcctgagctgtaccttggccccttttagctagggctggagctgaagtagcattttttccttctaggcctccaggtctgtgatggaaggggctgggctggtgtgaaggtctctgacatgccctggagacattttccccattgtatcggggattaacatccggattacttatgcaaatttctgcagccggcttgaatttctccatagaaaatggggttttcttttctattgcaccgtcatgttgcaaattgtccaaacttttatgctctgcttcatcttgaacactttgccacttagaaatttcttcccccagataccttaaatcatctctctcaagttcaaagttccacagatttctagggcaggggaaaaatgctgctagtctcttttcacagcaagagtgacctttactccagttcccaaaaagttcctcatctccatctgagacaacctcagcctggaccttattgtccatatcactatcagcattttggtcaaagccattcaacaagtctctaggaagttccaaactttcccacatt

SEQ ID NO: 141301 - DNA, 1518 bp, Homo sapiens
atgtgggaaagtttggaacttcctagagacttgttgaatgtctttgacaaaaatgctgatagtgatatggacaataaagtccaggctgaggtggtctcagatgaaaatgaggaaattgtttggaactggagcaaaggtggctcttgttatgttttagcaaaaagactagcggcattttgcccctgccctagagatttgtggaactttgaacttgagagagatgatttagggtatctggtggaagaaatttctaagcagcaaagcattcaagagggcaatggggaaaatgtctctgggccatgtcagaggtcttcatggcagcccctcctatcactggcccagaggcctaggagtaaaaaatgtgactgggcccagggtccccatgctgtgagcagcctagggacttggtgccctgcatcccagccacttcagccatggctgaaaggggccaatgtagagctggggcaatggcttcagagggtgcaatccccaagtcttggcagcttccatgtggtgttgatcctaccaaatctacgtttgattggtgtacatgaaagtgatggggagaatggaaccaagttggaaaacacttttcaggatattatccaggagaactgccccaacctagcaaggcaggccaacattcaaattcaggaaatgcagagaacaccacaaagatactccttgagaagagcaacccctagacacataattgtcagattcaccaaggttgaaatgaaggaaaaagtgttaagggcagccagagagaaaggtcgggttacccacaaagggaagcccatcagactaacagtgaatgtcttggcagaaaccctacaagccagaagggacatggatgatgctggaaaccatcattctcatcaaactatggcaaggacagaaaaccagacaccacatgttctcactcataggctctatggcaactactttcgaaaaactgctagcaaatactgctgtagtcagcaggattgtgaaaaacaggctggaatttaccatacagtcatgatggaaaacatcagaagtaatgcagagctgcaggcttgtcaagaaaaagggaaggagtcctcatggcctaatcacctcttaaaggtctcagctcctaatactatcgcactggcaacacctgaattttggagggaacacattcagactatagtacctatgaagcagaaaaaaaaatctctccagtattgttttgaaattttaaaaggtctcagctatgagtctgcagaactttctggtgtcattaaggaagcaggttacaggccagcatatcttcaaatagctacacaggtgttagaactgcatggtcttataaagaagacaagtgtgattatggaatcctgcacaccgcatagtcatatctttcaagtcccagaccttagccaagagcagacaattcaggcccaaagccattcaaggaggtggaggcatctgtatgtgatagggggagccagagtggcccagtgtggggagtggaagctcacccagggttcctga

SEQ ID NO: 141302 - DNA, 798 bp, Homo sapiens
tcatgggctggtgttgagtttctgtggcttttccaggcacacagcacatgctgtcagtggatctaccattctggggtctagaggacagtggccttcttctgacagctcccataggtagtgccccagtggggattctgtgtggttgctccaaccccacacttcccttccatactgccatagcacaggttcttcatgcaggccctgcccctgcagcaaatttctgcctgaacatccagacatttccatacatcctctgaaatctaggtagaggttcccgaacctcaattcttgacttctgtacaccagaggcctaacaccacatgaaagttgccaaggcttggggcttgcaccctctgaagccatggcccaaactataccttggccccttttagccacagctagattggctgtcacagggaaccaaatccttatgcaaatttctgcagctggcttgaatttctcctcagaaaacggggctttcatttctattgcattgtcaggctgcaaatttttcaaacttttatgctctgcttcctcttgaacactttgccacttagaaatttcttctactagatatcttaaatcatctctctcaaattcaaaattccacaaatctctaggataggagcaaaatgtcgccagtctctttgtacaacaatagtctcctttgtcatacttccctagttccttatctccatctgagaccacctcagcctggactttattgtccatatcactaccagcattttggtcaaagccattcaacaagtctcttggaagttccaaactttcccacat

SEQ ID NO: 141303 - DNA, 567 bp, Homo sapiens
atgtgggaaagtttggaacttcctagagacttgttgaatggctttgaccaaaatgttgataatgatatggacaatgaaatccaggctgaggtagtctcagatggagataaaaaacttattgggaagtggagtaaaggtgactcttgctatgttttagcaaagaaactggaagcattttgcccctgtcctagagatttgtggaactttgaacttaagggagatgatttagggtttctggtaaaagaaatctctaagcagcaaagccttcaaaagcctagggacttggtgccctgcatcccagctgctctagccatggctaaaagtgaccaagatacagctcagcctgtggcttcagagggtgcaagccccaagccttggcagcttccacatgatgttgagccggataaccaagtacagaaatctgagatacttcagagaattgtgacagtgttcactgtcagagattcaaagaggcttctggatgagttacctcagagttatccacaagtcatcaagtggcaaacttggaagagtgatggtagaatattggatgacagtgtctactag

SEQ ID NO: 141304 - DNA, 618 bp, Homo sapiens
tcaaacctcaattcttgacttctgtgcacccacaggttcaacaccacagggaagctgccaaggcttggggtttgcacactctgaagccatggcccaagctgtaccttggacacttttagccatggctggagtggctgggatgcagggcacaaagtctctaggcatgcctgcatcctgtgcctgtaaaaaccccaagaccctcatgggcttggacacaagcagctggatgtggtgaagaacccattggcagagagcacacaggcggctggacatcaagaggagcagagtagcataggagcacacacacgcccactggggcttcaggagctgtaaacattcaccgctagatgctgccatggggtcggagcccacgtggcccatgagcccacgtggcccagtacctgccatctgcatgcttccctgagaggtttgaggagcaggacaccaaagaagggagccacacctccttctcacaccctgtgagggcgataaaagaacttttcctgtttcattgccatctgaaaccacctcaggctggacttcattgtccatatcactatcagcattttggtcaaagccattcaacaagtctctaggaagttccaaactttcccacat

SEQ ID NO: 141305 - DNA, 1394 bp, Homo sapiens
gaggtgatgatgatgatgatgatgatgataagatgatgccagtgctcttcagccaaagcccaccagctatacacctaacagttaagcaagttgaatgtgttgattgttgcaatgagggagagcacacatcatggggaactttgggcacctttagtaaaacgatgttacaaagaactagttataggattgtgcttgggttatgtgatttggggggagggttcaaggagatggggcttggctctggattggaagctatgaggaagcagacagaaatatataattgggcacaagtccacagtgccttgtcttctgctcatactgggtccctcttgcctcttgccctaggatatctctgctgccactcaagcccacttgactaccctggaagggcagttaatctatatagaaacaatacttatcactggcttgctgtcaataaatacgtgggtaaaactctgtttgtggctctcagctctgaaggctctcagctccctgattcccactccacactctatatttctgtgtgtacatctttaatttctctagcgctgctgggcagaggttggaacacactggagggctcagaagaagacaggaaaaggtggaaaagtttggaacttcctagagacttgcagggctcagaatacaggaagatgtttgaaagtttggaacttcctagagacttgttgaatgcctttgaccaaaatgctgatagtgatatggacaatgaaggccaggctgaggcccgggggcctaggaggaaaaaatggttctgtgggccaggtccagggactttcatcctagccactctagctacagccgtggctaaaaggggccaaggtacacctcgggccatttctcctgagagtgtaagccccaaaccttggcagctctcacatggcattgggcctgagataactactatattttatttccaagtaccgttgttggtggtatttgattatcacacacttattttgggttatgggaacaaagagacatcagcagaagaaaatgacttcgatattcccaaagtaatgaagtccaggttctttggtgcagctcaagaatgcagactggggcagaaatttgagggtgtgacttctattgtcactctgagagacattccacttcagtgtggagatggatctaagggtgatcctcctgccttggcctcgcaaggtgctgtgattacagacgtgagcagccacacaggactgggagatatattcatagtcttctacgggcaagacttaccaggtaagtcagtaatgttgtatgcagcagaaatgatacctaaactaaaaacaaggacacaaaaaacaggaggtgctgaccaaagtcttcaacaaggagagggaagtaaaaaagggaaaggaaagaaaaagaagtaa

SEQ ID NO: 141306 - DNA, 1465 bp, Homo sapiens
tcaaatagggcagtcattatgccttagagttccaaagtgatttcctttgactccatgtctcacatacaggtcatgctgatgcaagaagtgggctcccactgccttgggaatcttcacccctgtggctttgcagggtacagccttcctcccagctgctttacacaggctgatgttgagtgtctgtggcttttccatgtgcactgtgtaagctgtcagtggatctaccattctggagtccggaggacagtggccctcttctcacagctccactaggcagtaccttagtggggactctgtgtgagggttctgaccccacatttcccatccacactgccctagcagaggttttccatgagagctccacccctacagcaaacttctgcctggacatccaggcatttccgtacatcctctgaaatctaggcagaggttcccaaacctcaattcttgatttctgtgcacccacagactcaacatcatatggaagctgcgaaggcttggggcttgctcccctctgaagccatggcccgagctgtaccttggcccactgctgctgtttctgctgctgtggctgctgcttctttctcttcttgtccttcagaaagaagccttggattctctgagtagcagtagactccctacaggcattttccagatgtaacagagcatcagtgtctctttctgcctcagttagacaagtgaacttcagagaaagggactcctggtgctttgggaaagagaggattcctgttatgtaacgaggtctatattgaatagttccaaacaaaccaagaatgacgataataatatgtacaaaatttgccaggataggtgcccactgatatccaaggaagtcaaatatttgcctctccagcacacaaactcgtgcacccaactgatcttcagcatcttttactttcaccagcgtttcgcacagatgcgtaaggagaaaataccgcatcaggcgccattcgccattcaggctgcgcaactgttgggaagggcgatcggtgcgggcctcttcgctattacgcccagctggcgaaagggggatgtgctgcaaggcgattacagttgggtaacgccaagggttttcccagtcacgacgttgtaaaacgacggccagtgccaagcttgcatgcctgcaggtcgactctagaggattccaagcgtgcgctttctcatagctcacgctcttgaatgcttcactgctagaaatttcttccgccagataccctaaatcatctctctcaagttcaaatttccatagatctttagggcaggggaaaaatgctgccaatctctttgctaaaatatagcacgagtgacctttactccagttcccaataagttcctcatctccatctgtgaccacctcagcctggacttcattgtccatatcactatcagcattttggtcaaaaccattcaacaagtctctaggaagtttcaaatttctccacat

SEQ ID NO: 141307 - DNA, 866 bp, Homo sapiens
gactcttgtgaaggatggccttctgccgcgcgtcccaggccgaccaggacaggtttatttgtatctatcctgcttatttaaataataagaagaccatcgcagagggaaggcgaatccccataagtaaggctgttgaaaatcctacagctacagagattcaagatgtatgttcagcagttggacttaaacgtaattcttagaaaaataaaaatgtacttttaagaatggaatcgtgatgtccaatacaggaggcagagtccgggtccagctcaaacaggaagatgggagcctctgccttgtacagttcccatcacattatacactaagcctaacttctggttcctaggtaagtcagtaatgttgtatgccgcagaaatgatacctaaactaaaaacaaggacacaaaaaacaggaggtgctgaccaagtctttcaacaaggagagggaagttaaaaagggaaaggaaagcaaaaagaagtaacctagtatcagccatcaagtatgtggtactactgtaagagacatgaatggagacttctaatttgtatcggagggaaacagaagctttttgtttgcatcatttaactgaactgtgaacccttgtgcctctcatctttatcatcggagttgacagtgaaacaaatttacatcagaagtttgcatctcgcgtatatgccgtataaaagattttttttgtctttcaatgcagttttttggaagaaaatatttttaaaatgggacaatggactgtacaataagttacttgaaataagttgtttcagataaatttcaattagatttaaaataaacattatgtccaccttttaagttaatgaaataaaatttgaaactgaaaaaaaaaaaaa

SEQ ID NO: 141308 - DNA, 4136 bp, Homo sapiens
  misc_feature (1)...(4136): n = a,t,c or g
ttttttttttttttttttgacctcatgcagccccaaaggggcaaataagagactttaattagggtagtgatgttccacctgaatcagtaatgtgatagctatcgtgggatcatatgatccagaatcaggcaggaggagggcccggccaggaagctctggaggactcacctcgccaccttttggcacaagcactggcactgacggacaaggcgaaacagcggccccttctaacttgggagggcacccaatggcccctgtagccagaggtttgcccggcttttgggcccccaggtcctaggcatgactggtggtcaccaatttggcccttgtccccaaccagtgctggggggcccatctttaggcagaactcaggaagctggcagagagttcccaacactttatactggggccaaggaggcttgggaataaaagggcaagggagaaactggagtctgaaacctccctccctccccacctggggtggccatgggagagaaaaaaataaagtcgccttctggctcccaggcccgcccagaccccacagcaaccaataacgtataatcactgggaccagtcacagcccactggaggtggaggtttaaaaaaaaaaaaaaaaaaaaagacaaaaaggttacaatatcctaacaagcaacagagtttaaagttttcaagacgtttaaaaaaaatcttgtcccgggcccagggggacttgaacactcagaagccagcctgaccaggcacggtgtggccttggggcaggtccactgctgctttcttgcccagctagcaagcacaccacccacctcccgcatcaaatgcccaccccaacccaactcccttgccgcctgtcgcgctgctcggggagtgactccaggacgccttcgtggagacatgggtagtctgagggggaaggccacgagatccagccagatggtttaaaaattcttaaggaactcttcagcccacaaatgcgggcacgggcattgacttgacagctttcatcttcacttgattctccttgtcaatcttccttccatggaagtggattcacaaagttccaccaacttgtgttttgtacatctgctctgtgtggaagttggtgatcagaaagctgatatccatacccctccaaaaggcttccttcgaaggataaagaagttctctgctcgcattcatccatgaagcgcatgaacttgtggcaaaaaatctttctcgatctcatcagccctgtttcacagcaatgctgacccggacagagttgatggagccctcaatcagaaccttttccttctcattcctgctgatggtcacaggttgtaacaggagctctttgctactcctgacttccacttccggcttgttgtgtcgttccacacacctgggaggagaagttctccaggcagagggcagcctgcaatgtggcccgcacggcactcaggtaggggcggagagtggcagtcatcgcgggcgctggctgggccggaaagcggaagtacggaagtggccagccccgcgatgcctgccctttcgcgagaagcgcagctacggtctccgcccggacttccggacggtaccatctatgctccgagcggggtagagagcccttacgaacgcttgggccttccggaagttttccacctagggctgtctcggtatttttaaattcttgcactcgagtcactatttaagctcctccaggaatgggtgcagcttccctttgtgccttcggccttcttgtcacctttgccacagcctcccccaggtatgcaatggtacagcccagcttcagattgggcaccaaattaggacaagccgaagcggacgagcccttcgtttcttccggttctgtacccccatcctttctctcgcccctcctacccgcagctcctggcgctcggcggggctaactgcagcgcggagatctcggccgccaagctccgcctcccgccccgggctgtgccccggggctcgcctgaggccgaccacccgcaccccacctctagcggctttgctcgaggcccaccttcttcccacccccggcaaactccagtaggctcgccctcgctgactccccgcccccgcgtcaactgcaaggggcccgcccatagccagttccggggcggttgctcacatcgaccggaactccccgccccctcccgcggcccctggggccgtaggaggccgcagcgaggaggtagagggggcgggggtcgcacatagggtgtccctagagaacgaggactctgaaggcgggacatttgggcgacccccgggcggggccagccattaaacagtcccacttctgtgccagacactgaactgggctcttgacgggcatcatctcttaatcctcagaacatcccagggagctccacaggatccccatatcctgggccatgagtgagttgaaagactgccccttgcagttccacgacattcaagtctgtggatcacctgaaggtctgtccccgctacacggcagtgctggcacgctcatgaggatgatggcatcggcatcgaggagctggacaccctgcagctggagctggagaccctgctgtcttctgccagccggcgccatgcgtgtgcttgaggccgaaacccagatcctcaccgacctggcaggataaggaaaggtgacagacgattcctgaagcttgggtcgagaccattgaatttggagctccccccaaacatgggaagcccaagaaagcaaaaactggaaagggaaggcaggacatgggcccgggcccttgcccaggacggcccaaatccaaaaaccttcagcccaaagatccaggaatatgaattcactgatgaccctatcgacgtgccacggatccccaaaaatgatgcccccaacaggttctgggcttcagtggagccctactgtgctgacatcaccagcgaggaggtccgcacacttgaggagttactgaagcccccagaagatgaggctgagcattacaagatcccacccctggggaagcactactcccagcgctgggcccaggaggacctgctggaggagcagaaggatggggcccgggcagcggcttgtggctgacaagaagaaaggcctcatggggccactgaccgaactggacactaaagatgtggatgccctgctgaagaagtctgaggcccagcatgaacagccggaagatggatgcccctttggtgccctgacgcagcgcctcctgcaggccctggtggaggaaaatattatttcccctatggaggattctcctattcctgacatgtctgggaaagaatcaggggctgacggggcaagcacctcccctcgcaatcagaacaagcccttcagtgtgccgcatactaagtcccctggagagccgcatcaaggaggagctaattgcccagggcctttttggagtctgaggaccgccccgccagaggactccgaggatgaggtccttgctgagcttcgcaaacggcagggttgagctggaaggcacttagtgcccacaaccgcaccaagaaggcccgacctgctgaggctggcaaaggaggaggtgagccggcaggaagttgaggcagcggngtgcgcagggctgagagggagggcatggacgcctttcgcaagattcatgggcttgcccggcaaaaaggaagcggaactccccacccaagaaaagaaaaggaccaggcctggaaaaactcttgaaaggagcgtgaagagcatccttgaagcttgcttggatggggttagccccttaaccccctgccctcaggctgattaatcttggccctaaggggaggggaagggaggcccaacttcctttctttgggccacaggaaacaattgccctgtggctgtcccttcaaatggcggcagtctcctaagaagcccgtggcccttccccctgaggtcattttggcctagctctgtacaaccaggacacaggaagccctgctgggctagcctgaggcctagtctctgcttggtcccctgagatgggggttggaggggacttcgtttctgggtcttcctcttcccctctttaccatcccccactcccctaatcccctacccctgtctccccttcaaggacttctcccttgtggttttgtaaagtgcaaacttaagaataaagtgactgctgtggtttttc

SEQ ID NO: 141309 - DNA, 897 bp, Homo sapiens
ttttttttttggtggggaatgtgctggaaagaaacattgttttcattccctcattcctggagggagtgctccggcggggatggggaggagtgtttggggtcgaaggagcagccgcgtaaaggccttgagatcctgcagggaagggtcccggtgcacagagaccagcacaggctgcagcagccgggtctgtcccgcgcgtggagcctctggcgacgggtggagcggacggcaggttgccccctccaggtgactggcgggctgaggttgtgtgtgtatgtgtttgtgtctctgtgtggatctgggggtggacacattcgaatgtatatgtctgtgcgtctttattggctctgactgtgttttgtgcatatggtttatgagtcgttttaaaaacgtgtacttttactgctgcgttcaggttttcagccatagaatattctagaaaaaaatagtgataacatttatttcaccgctataaccctgaatgtgtagctgtgttttttaaaaaaacatttttttacaattgtagaatatgtaacatgcctccagaaacgtgccctaaacacaaatatataatttggcaaataattacatagcaagtcctatgttactgtcatctgatctagaaatcatcgtcctcccagaagcccctcatgtgctctggccatctcaaatccctccctgccccagggataaataacatcctgttttgtgataaactctgccttttctatacacgtgtatgcttattaacaaactatgaatttctccacacggtagatttgattatgtttgaatcttacatgaatgtaatcctattggtggattgtttttgctgtataaaagatgtcttccagaaaaaatacattaagaaaagaaaaggaaaaaaaaaaaaaaaaa

SEQ ID NO: 141310 - DNA, 552 bp, Homo sapiens
atgagtgaacttccattcacaattgctacaaagagaataaaacacctaggaatacaacttacaagggatgtgaaggacctcttcaagaagaactacaaaccactgttcaatgaaataaaagatgacacaaacaaatggaagaacattccatgcttatggataggaagaatcaatatcctgaaaatggccatactgcccaaggtaatttatagattcaatgccatccccatcaagctactaatgactttcttcacagaaatggaaaatactaccttcaagttcatgtggaaccaaaaaagagcccacattgccaagacaatcctaagccaaaagaacaaagctggaggcatcatgctacctgacttcaaactatactacaaggctacagtaaccaaaacagcatgggccatggatgaagctggaaaccatcattctgagcaaactatcacaaggacagaaaaccaaacaccgcatgttctcactcataggtgggaactgaacaatgagaacacttggacacagggtggggaacatcacacacaggggcctgtg

SEQ ID NO: 141311 - DNA, 2085 bp, Homo sapiens
atggagtgggtactgcttggatctccttctagaaaacctgttggagaagcatggttgactgcagatccaccatatttgtaccgaggccatctttctaccagtctagttacagccagcttccattgcaacttctacagaaagttcaggaaaataacgactttcaacattatagaatttcaagttagaagtgatcattttcaactgatgaatctcattgaggaagatgaggcatcaagaggtagaagactaactcagcaggtgactatggaaatggtgtcagacaaaaagcaaattcgagtgattttcttattcaatttaaaaatgggtcataaagcagcagagacaactcgcaatatcaacaacgcatttggccaaggaactgctaacaaatgtacagtgctcaagaagttttgcagaggagacgagagccttgaagatgaggagcatagtgaccagccatcagaagttaacaactgccaactgagagcaattattgaagctgatcctcttacaaccacacaagaagttgccaaagagcttgacgtcgaccattccagggtcgcttggcatttgaagcaaattggaaaggtgaaaaagctcaataactttctgaatcctggtgaaaccattatatctgaggactatgctcagcaaatctatgagatgcaccaaaaactgccacacctgcaactggcattggtcaatagaaagggcccaattcttctccatgacaacgcccaaccacacgtcgcacaaccaatgcttcaaaagttcaatgcattgggctaccaagttttggctcatccttcatattcacctgacctctcatcaacagactaccacttcttcaagcatctccacaactttttgcagagaataaaatacctaggaatccaacttacaatggatgtgaaggacctcttcaagaagaactacaaaccactgctcaatgaaataaaaggggacacaaacaaacggaagaacattccatgctcatggataggaataatcaatatcatgaaaatggccatactgccagaggtaatttatagattcaatgccatccccatcaagctaccaatgactttcttcacagaattggaaaaaactactttaaagttcatatggaaccaaaaaagagctcgcattgctgagtcaatcctaagccaaaagaacaaagctggaggcatcacactacctgacttcaaactatactacaagactacagtaaccaaaacagcatggtactggtaccaaaacagagatatcgaccaatggaacagaacagagccctcagaaataataccacacatctacaactatctgatctttgacaaacctgacaaaaacaagaaatggggaaaggataccctatttaacaaatggtgctgggaaaactggctagccatatgtagaaagctgaaactggatcccttccttacaccttatacaaaaattaattcaagatggattaaagacttaaatatgagacctaaaaccataaaaaccccagaagaagacctaggcattaccattcaggacataggcatgggcaaggacttcatgtctaaaacaccaaaagcaatggcaacaaaagccaaaattgacaaatgggatctaattaaactaaagagcttctgcacagcaaagggaactaccatcagagtgaacaggcaacctacagaatgggagaaaatttttgcagtctactcatctgataaagtgctaatatccagaatctacaaagaactcatacaaatttacaagaaaaaaacaaacaaccccagtaaaaagtgggtgaaggatatgaacagacacttctcaaaagaagacatttatgcagccaacagacacaggaaaaaatgctcaccatcactggccatcagagaaatgcaaatcaaaaccacaatgagatatcatctcacaccagttagaatagcgaccattaaaaagtcaggaaacaacagagacatggatgaagctggaaaccatcattctcagcaaactatcgcaaagacagaaaaccaaacaccgcatgttctcactcataggtgggaattgaacaatgagaacacttggacacag

SEQ ID NO: 141312 - DNA, 2433 bp, Homo sapiens; identical to SEQ ID NO: 140112

SEQ ID NO: 141313 - DNA, 1403 bp, Homo sapiens
tcttgactactgggatatctgagctgatctgtgtgttagaaatattggatgtcttaaaagatttgtaacaagatataagtacataaggaaagtaataaaacaggagagcttacatagaaagcatcttaaagagtaaataggagaaagggagttttctttggcattagacaagagtcatagccaggaaagttactcttgataaaatttttgttataatgacttcctcattaccttactttatttttaatccccctagtatgtttgtgctactgaaaggagccactaaggagcagtcttttaagattggtcaggaaattgccgaagctgtgactgctaccaatcctaaaccagtgaaattgaagtttgaaaaggtatatttgccctgtgttttacaaacaaaaaagaggtatgtgggttacatgtatgaaacactggatcagaaggacccagtatttgatgcaaaaggaatagaaacagtcagaagagattcctgccctgctgtttctaagatacttgagcgttctctaaagctgctatttgaaacgagagatataagtctaattaaacagtatgttcagcgacaatgtatgaagcttctggaaggaaaggccagcatacaagactttatctttgccaaggaatacagaggaagtttttcttataaaccaggagcttgtgtgccagcccttgaacttacaaggaaaatgctgacttatgaccggcgctctgagcctcaggttggggagcgagtgccatacgtcatcatttatgggacccccggagtaccacttatccagcttgtaaggcgcccagtggaagtcctgcaggacccaactctgagactgaatgctacttactatattaccaagcaaatccttccacccttggcaagaatcttctcacttattggtattgatgtcttcagctggtatcatgaattaccaaggggatttattgcggcactattcacaatagcaaagacttggaaccaacccaaatgtccatcaatgatagactggattaagaaaatgtggcacatatacaccatggaatactatgcagccataaaaaaggatgagttcatgtcctttgcagggacatggatgaagctggaaaccatcattctcagcaaactatcacaaggacagaaaaccaaacaccgcctgttctcactcataggtgggaattaaacaatgagaacatttggacacaggatggggaacatcacacaatcacacactggggcctgtcgtggggtagggggagaggggagggatagcattaggagatatacctaatgtaaaggacgagttaatgggtgcagcacaccaacatggcacatgtatacatatgtaacaaactggcacgttgtgcacatgtaccctagaacttcaagtataatt

SEQ ID NO: 141314 - DNA, 2033 bp, Homo sapiens
atggtgcacaaccagtatggcacctgctgtctcagttcaggtatgagagagtgtgggcacacctacacgagctggccacccaggtctctgtccctggaaagttcccaaattgccactaacagcattgctcagggtcaccaggggagaggggctccccaacagttggtggtcagcagattgtcagagggttttattaccaaagcagcaaacaacagtgcacaagttatagaggacatgaaggatacaaacgctagatgttgtttgctgatgcctcacatattcacccccaagtcacatccaaatcagcccacgtgggagaatggagccacactcaggtctcatggggagatctacatatcagccagaaatcctggaattcaagtagaaagcagtacctgggaattgggggttgcttctcttgaagagggtataaatgcattccacataaagaatatttatgtaaaggaagatgtgaacggatcctgggtggtccaagagcactatcacagtagcaaagacgtggaatcaacccaggtgcccatccacggtggattggataaagaaaatgtggtacctatgcacgacggaatactacgcagctgtaaaaatagaatgaaatcctgtcccctgttttttgcagcaacatggatgcagcagaaggccattatcctaagcaaattaatgcagaaacggaaaaccaaataccacatgttctttattacaccagatcagtcttctcagagaacttcctttgaagtcaatgggcattgtacctccctgagaggtgggtcaaaatatagatctggatctgttaaaaccctacgaaccatttacaacttttcctatcacacgaggtcagtgggcaggtacccatcctcatctgcagaggattgggggatgaagagagaaaagtcagccctgctaataactgacgacaccatttccaatgaggctgccctagttgatgatggttatatcattggagaaatgctgccaccttgtgggagatgtgaaaagaagtcccgagagcaaattgtgataccattcttcagtctcttaatcaaagatatttatttcctcaatgagggttgtgccaaccgccttcccaatggccatgtcaattttgagaaattttgggaactggccaaacaagtgagtgaatttatgacatggaaacaagtggagtgtccatttgagagggaccggaagatcttgcagtatctgctcacagtaccagtcttcagtgaagatgtaagtggcctgccagtgtgctggcgtatgtcggtgtgcccatctgccagcgtgctcccctcagtgtcctctcgacgaccagccgctcctcagactgcccctgccaaactccgcctcatcccgccagtctgtcctgcgtgctggcatctttcggtgtgccctgccggcgtgcccttctaccagtgtgctcccctcaatgtcctctcgacgactcgccacttgcgtcttcttcagcagatgtgttcctcaccacgtccagctacttgtgtgtctgtctgccggcggtctcgggtttttataggcccaagatgggggcgtgatcatggaggggctggcctttgttttctggcatctcgtaccacgaacactcatgaagaccctgcagtcattggagcacccgggtcagcaaagcacacaagctcactcaagaccagatggagaacttatttcctgcagctgacagatagactcagattttgtgagactgaaatgttcactgaagacacttgagaaagaatcctctaaaaatcccggctctgcacattattcatctcctggaatttccatgtgaatcacagctctgcacctggatggagttttcttttgtgtgtgtgtgttttttttaatttggttgaacatttgctgctaatgggacttgcccagctgagtgctggctctgaggaagcccacgtttcttttgttaacttaaatgaagaaaggagtggagggaggggatctaaaacccccccgtttagatcccaaaccttagctcaatcagtatt

SEQ ID NO: 141315 - DNA, 3433 bp, Homo sapiens
ggccaggcaagcctgaatcctgtccctgccatctcgccactgcagctcgggtccagaaaggcaccattttgtcgcggctgcccgctctcccagggggaggagggatcttttttgcattttggagcggctgccaaggaggggaacctgttgggcatctccccagacccgcttgtgagcgcctccggggcgggcgggcgggaccagacccctcggggcacggcgtatcttggcacccggaggcagcggaggcaggcgcagcatcctcgctgggaactggagctggagtgagcgcaccgcgcgggaggagccgccgcagcctcgcagaacccgagtggaggaggtgacagctccattgccgggtttttattttttttctctccgcctccccgtctcctcctcaggctcggaccatggtgcagtcccactggctcccctgcccccctctcctgtgagactggctgcggggagggatcatggatacttgtctgccggcttctggttcccacgcaagtaagcctgctgtcaatggaggaggacattgatacccgcaaaatcaacaacagtttcctgcgcgaccacagctatgcgaccgaagctgacattatctctacggtagaattcaaccacacgggagaattactagcgacaggggacaaggggggtcgggttgtaatatttcaacgagagcaggagagtaaaaatcaggttcatcgtaggggtgaatacaatgtttacagcacattccagagccatgaaccccgagttccgattacctgaagagtttagaaatagaagaaaaaatcaataaaataagatggctcccccagcagaatgcagctttactttcttctgtctacttaatgattaaaactgtgaagctgtggaaagtcagcgagcgtgataagaggccagaaggctacaatctgaaagatgaggagggccggctccgggattcctgccaccatcacaaccctgcgggtgcctgtcctgagacccatggacctgatggtggaggccaccccacgaagagtatttgccaacgcacacacatatcacatcaactccatatctgtcaacagcgactatgaaacctacatgtccgctgatgacctgaggattaacctatggaactttgaaataaccaatcaaagttttaatattgtggacattaagccagccaacatggaggagctcacggaggtgatcacagcagccgagttccacccccatcattgcaacaccttcgtgtacagcagcagcaaagggacaatccggctgtgtgacatgcgggcatctgccctgtgtgacaggcacaccaaattttttgaagagccggaagatccaagcaacagatcatttttctctgaaattatctcttcgatttcggatgtgaagttcagccacagtgggaggtatatcatgaccagggactacttgaccgtcaaagtctgggatctcaacatggaaaaccgccccatcgagacttaccaggttcatgactacctccgcagcaagctgtgttccctctatgaaaatgactgcatttttgataaatttgagtgtgtgtggaatgggtcagacagtgtcatcatgacaggctcctacaacaacttcttcaggatgttcgacagaaacaccaagcgtgatgtgacccttgaggcttcgagggaaaacagcaagccccgggctatcctcaaaccccgaaaagtgtgtgtggggggcaagcggagaaaagacgagatcagtgtcgacagtctggactttagcaaaaagatcttgcatacagcttggcatccttcagaaaatattatagcagtggcggctacaaataacctatatatattccaggacaaggttaactaggtggacaagttattacttaataatctcacatactgaatactagtcaaacaagtttttaaatgtttctttgggtcttcatttgatgcattgactttaatttccctatacaggaaatgattggaatagaattaaaaggagtccaacattcccagctccccagttctaagaaacttttgtcaaacccaataggtttgggacacttctgtttagaattgaaagctgccagctaacagtaattcttccatagttgacttgaacttctgatgcttttattgcccagttttctctggtgggtccagtgttttgttcctaggtgtctgctgcgataaaatgaggttgtctgtagtatttaaggagaaaagagataagttttttttaattaagcaattccatttgattgaaaaaaatcaacaaaaaataaacaccgtttactcttagacaaattcttcttgttttgtgaaaaaccagaactagtcagtatctcctgcccctccaccatttttttttccattttccattttcctttgaacaatttcatttaagccagagatttattgcatgaagctgagaagaggatgcagaatgacaaggaaagggcacatcaaccctgctatgctctttttttgtaagctccatagaaacagcctgagaatttggctagggaacttgaatgcttcaggggacagaaagagagcactttcgacacagtgcttcccagagtgagcttggcagggccaggcggggccaaattccatctgctgccttgttactcttgctttttgtgctcttaaatggctccatataatcttctacttacatgttccttggcttttttctcttcaaccttttccagcttatttattccattgacttctaaaggccgagtcctgggtgcttattatctggtgttctaaatgaagcagtaagttggaagcagtgccaccacccctgagtccctgagaaaggctggtctgttctttttgggtgtttctcctaagcagcaccctcccctcctcctggttttggtaaccaaaagtaacaatccatcaacctccattgtacctagaacaaaaatagccaataaaaacgctgagttgtgaagtccaatcaggcacttctaactcaccccaagctcgccatctggaaaaacagaccagaaggcttctcttctacagaaatgaactgtggggaaatcaagcagctgtgacatgaagtgaatgaagtccacttgaagctgtggaagatggttcatccttttccccagttgaggatccagatttataacttctagaaagccatttccagaaggttctatgtggcacacccctaggaaaggcactaaatgcatgcaaaggatttataaacttaggaaagtagatgggtggagtccagaaaactggttctgggttaatatctctacatctgtcttgatgactcatttctcctaactcccatttagtgcagggtaaatggtttgagatgagagtttttcaatgaaagggaaattttctttcagtttacagatgtattagaagtcctgactttcaagtgtaatttgctttggaggagg

SEQ ID NO: 141316 - DNA, 1374 bp, Homo sapiens
aaaattaatctatacacccaagaagctcaaagaaacccaagcaggataaatacaaatagatccacacttgaacacatcattgtcaaactgttgtatgccaaatccaaagagaaaatcttgaaagcagcaagaagaatagcacgcaccatagaaagaatgctcactctctccccactactcttcatgtgtatacctcccactcattcttcagatgttacctcagaaaatctcctcattcaggaagtggccactgattcctcagatgataaggtcactctctttagggagccctataaaagcaattactcacaagtctaccatggcaatttcataaccaacctggaaaggatcagacaacgacatcaattttcctctgatggatatgggaaaccctcagggaaaggtgccgattcgcggctgcatgcgccccactgcagcaaagagcagccgcagcctctgcctcggccaccactgctgctgggaaagagtcgtggggctgctgacgcggttgggaggagcctcgcctttaatgcaccagccgcctccagcctcctgcagcagcagcagcagcagcagcagcagcagctgcgagtgcgcgcgtgtgggtgtgagggtgagtgcgctggcgccggctgcagcgccctgcccagctccccgccagcttccctacccccgcctgccggagccgccctcccctcgggtccagaaaggcaccattttgtcgcggctgcccgctctcccagggggaggagggatcttttttgcattttggagcggctgccaaggaggggaacctgttgggcatctccccagacccgcttgctcggaccatggtgcagtcccactggctcccctgcccccctctcctgtgagactggctgcggggagggatcatggatacttgtctgccggcttctggttcccacgcaagtaagcctgctgtcaatggaggaggacattgatacccgcaaaatcaacaacagtttcctgcgcgaccacagctatgcgaccgaagaagagtaccgggaacctaatagaggtccaaacagtattaatcgtctaagtgagtggctgcaggcatcatttgtagatgagtatatggaacctggtgacccagaaatgttaattttcttcaaactgaagtcaagaccttctggtcacttaataggatatagagggaaagttttgggtgcagttccatttgtgaacaagatgtatttttctgtaggttctctgaccccttctggggtcagagatcagaaacttggtaatcctactgctgctgatgatgatcaggagcaacactttgagaccgtggctctctgtctgtcttctcaagtgagtaggcagtccacttcaggtcgacggggctga

SEQ ID NO: 141317 - DNA, 411 bp, Homo sapiens
ccggtgattttctcgatgtcgctgttctggcaggtcttgtgcatggcctcctgcttgctgctttcaccattgctggtggatggcatctcatcactggcccatttagagaactcaggtgtgatgcgcgtgctgggagggccgccatttaggactgcgccccgaagtgcctctctctccttggcttcaccaggctcctcgcctgtgtattgtggcttcccatactccagagtgtcatccccatccacatccaagtcagcatcactgtccgggttctctttgccgctgcacatgatgaagccagagcctcggaagccaccttccaggagagtggtggcccgtatccgcttctgtccacaccactcatactcctcaaagcggttgttgttctcatgctcgatgcccacgcgtccg

SEQ ID NO: 141318 - DNA, 555 bp, Homo sapiens; identical to SEQ ID NO: 114818

SEQ ID NO: 141319 - DNA, 2574 bp, Homo sapiens
  misc_feature (1)...(2574): n = a,t,c or g
tttttttttatgttttttttaactgtttatactggttttaatccatgtcaaatgtagtttacaaaagggaaaggacaagtacctttgtatagaatatacagacacagcatcacaccacagggcccacgggagggtcggggagacgacactttttccctgggaaaggcagctctaatcccaggaatggttctcagcagaggctggggtggccagggagcactgtcctctagcccccttaactcagcctctgcttcagcttcggttccccatttcctgccttctaccccccaaattccttataaagagcccccatgagcttaagactaagggagaggatcatggtccgcttgggggcgttgttgccnatggtctgggggaggaaggaaattattacaccacttgaacaccgaggcacatgggggagaggggaagggggacaccacagggaggagagagaggcagggttnccccaagaggttgggttggggccgaagcttcccaagccaaccccttaaaggaagccctgcttcccagggtttcttaaaaaagaagaaaatcataccaacccaaaagggggaggggaccaggtagagggcgaggagttgtcccatttatacacaacattgtaaacatacaccggtctattattacatgtgctttcagtctggtgttttgcatgtctgtctgtccggcctngtcagtattgggggctggatcttaggagccgtgccccactactcccccaacccccaccttccctgccccaccctgggaacagagctggaacaggtatggcccccaatccataggtgggagccagcaggtaagtgcctgggccacagcctctactctggctccagagtacctgcgtgtgtaaatgtgtgtgtgtgtacgcatgtttgagtatgtgcatgtatgtacatggggaacctgtgtgccaaatatgttacaaagggaagacggtcactgtcacagaggctgggggcaggtggggcttgcttggaggcgaggcctgcctggggcaagatagctcaacaagtagatcctcccgcaggtctccgggcgctgtgaatcgtgttgcactgaagggcagagcttcttggcaaccccagggtccgcagccagcaactcctcgcagtgcacgtgccaaacactggatggacgttaggggcatcggagtacggagtccatgcaagatgaggcatttgtaacggtccccacgagattagctgccgttcaagttctctgacccgagccttcagagcctcaaacgtggtcacagctgaaatcttcggtgattttctcgatgtcgctgttcttgcaaggtcttctgcatggccctccctgcttgctgctttccaccattgctggtggaatggcatctcaatcaactggccccatttaagagaactcaggtgtgaatgcgcgtgctgggagggccgcccattttaggactgcgccccgaagtgcctctctctccttggcttcacaaggctcctcgcctgtgcaggggatgaacatcagcctctgtgtattgtggcttccccatactccagagtgtcatccccatccacatccaagtcagcatcactgtccgggttctcttttgccgctgcacatgatgaagccagagcctcggaagccaccttcccaggagagtggtggcccgtatccgctttctgtccaacaccactcatactccctcaaaagcggttgttgttctcatgctcgatgtccacagcatcatcctcagccatgcaggagccttccctctgtgaagagcagagcaggatcatgctgggcccaggccatccccacctgctccccacagtctgcaacgaaggcacagctctagccccagctgtggtgtgccaagtgggccctcagctctagggctcctttgaagcaaaccaatttagaggtcaaagacctgggcctcttcccaatagttttccgctggagcccaaggagggaatgagtgagagtgaaagcaaaaggagagagcagtggtcagaagggaagaagctgctgagaccacatggagaccccaagagcccacagattcaggggcagtcagcagctagtgtcgggggaagggagcggggaaggaaggtgggtggtgatggcccctctaccttagaaaggcaatgctccacatgcctactcatctcctgctccgaatcctgccagggggcggttgcaccaggggacatacctgcccttcatcttgctttcctccgtttcaattttcccaatccgagctgcacggggaaaccgaaaacaaagcacagaacaagcagacggtcacttgcagcccccagggtcccagtggagctgacacatcctgacctcttgccagccattggcctttttattcagtgcctgatctggccctcatcttgaaatacctcctgctcctttggggactgggctttgccaagagcacctggggaggagactggtgctaactaagccagtgagtaagtccactctttggctgcagctggtgcaaggtctacccatacctttctatttgcagtgtttaataaaaatccagtgagcaaagacaaaaaa

SEQ ID NO: 141320 - DNA, 1026 bp, Homo sapiens
tcaagttccttttgggtgtgggttccctgttacattttggtttggattcccagttaggaaagcagctggatttagagaattgtcagtggctagtgtcaggtcatctctctctaacaggatagtttcatattttaaaactcttgagttggtgaggcacttttctgccttttgactgaggatagttctgacttggtgaggtgtgctaacaatgaggttttccccaaaggttaattttctgctttcctccacgagcaaagctgttgatgctacagactggacacattcaggccatccacgggttactgggtccagaatttttgacaagaaggctacgggctgctggtagtccccatgtccttgggtgagtacccctaaagccactctctggtttacagtcatgaaaaaatgaaatggctgttcagaatgagaccaaaaggttcctccactagagatgtattttggaattgaagttaagtctttaaagcagttaagatctatttctgcttgatcattgttttcatccagggccttgaaggaagacagtggtttactcaaactgaagcagcctcgttcatctggggtgatacccagaagattcattgtctcatggccatggaaaatggtaagacagcctgtccttttctctgtaggttgatggtggcatgctaaagatgtgagtaaagcaatcaggatttttgtgccctcccactgcttagaggtagcaagggcaggtatcacagtaggggtagtggcagaggggctgtcagttgccacagggaactccacttgagggaaatgcagactctctgccaatgagatgatcagctgggcataaggtaaccatgctgagggtccaagcttgggggctctgcctggcaaggggcagtggggccagggcctgcagtctatctgctccccagcttcatgattcagtccctttcctagggatgtgtgaaagagcctggctttccttttttgtggagctacggcagctggtgctggggtgctcagggatccaagacccat

SEQ ID NO: 141321 - DNA, 858 bp, Homo sapiens
atggagatgcttgatgagcttccattgttcaactccgaggatcttaccattgtctttttccatggccatgagacaatgaatcttctgggtatcaccccagatgaacgaggctgcttcagtttgagtaaaccactgtcttccttcaaggccctggatgaaaacaatgatcaagcagaaatagatcttaactgctttaaagacttaacttcaattccaaaatacatctctagtggaggaaccttttggtctcattctgtactggaagtcctagccagagaaatcagagaagagaaagaaataaatggcatccaaatcagtaaagagaaaatgaaactatcattgtttgctgacgatatggtcgtttaccttgaaaacccaaaggactcctccagaaagctcctagaactgataaaagaattccacatgtctggagggtcctcaggaaacttacaatcatggtggaaggcacctcttcacagggcagcaggagagagaatgagtgtggcagggagaatgccaggccacactgatgcaatgagtgggctctcaatgccttgggcatctctgcccctatggctctgcatggtacagccccctaagctgctttcatcagctggcattgagtgcctgtggcttttccatgtatacagtgaaagctctccactaggcagtgccccagtggggaccctgtgtggggacttcaaccccatatttcctctcttcactgccctaacagagattctccatgagggctccacccttgcagcagacttctgcctggacatccaggtaccattggaactgcccgagacattaaatggtaatgatgtggttacagttatttgccaattgaagtga

SEQ ID NO: 141322 - DNA, 2491 bp, Homo sapiens
atgaggagacatatggtaacttatgcctggcagctcctgaagaaggaactgggactgtaccagctcgccatggatatcatcataatgatccgagtgtgtaaaatgttccgccaaggcctcaggggattccgggaatatcaaatcattgagactgctcactggaagcaccctatcttctccttctgggataaaaagatgcaaagccgagtcacatttgataccatggacttcattgcagaggagggtcactttcctccaaaggccattcagatcatgcagaagaagccttcctggagaacagaggatgagatccaggccgtctgtaacatcttgcaggttctggatagctatcggaactacgcagagcccctgcagctgctcctggccaaagtcatgcgctttgaacggtcatgtgaagagtgccagtgctggcagcatggggtctgcatgggattactggaagaaaatgtgcccgagaaatacacctgttatgtttgccaagaccctccaggtcagaggcctggcttcaagtactggtatgacaaggagtggctgagcaggggacatatgcatggcctggcatttctagaagagaactactcccatcagaatgccaagaagatcgtggccacccaccagcttcttggtgatgtgcagagagtgattgaggttctgcatggcctgcagctcaagatgagcatcttgcaaagccgggagcatcctgatctgccgctgtggtgccagccttggaaacagccatcaggggaggggagatctcatttcagaaacatccctgtcactgacaccaggagcaaggaggaagctccaagctatagaactttgaacggggcagtggagaagcccaggcccctggccctgcccctgccgcgttctgtggaggaatcctatatcaccagtgagcattgctaccagaagccccgcgcctattaccctgccgtggagcagaagctggtggtggagacgaggggctctgccctcgacgatgcggtcaaccccctccatgagaacggcgatgattccctttccccgcgcctgggctggcctctagaccaagacaggagcaagggggacagtgaccccaaacccggctccccaaaggtgaaggaatatgtctccaaaaaggccctaccagaagaagcccctgctcggaagctgctggacagaggtggagaggggctgctgagctcccagcaccagtggcagtttaacctgctgacccatagtggaatctcttcaggatgaagttacgcaacaggatggactccattgagaaggagttggatgtgttggagagctggctggactacactggggaactggagccccctgagccgctggccagggctttccgcagcttcaagcattgtattcaagcagctgctgatgggacctggggcaaggttgcagcagattcgccctctgcttgttcaacatgaaactggggcacccaaaactcatgggggcacaatcctggggcacctgcaggaggagcttcgcatatttaaataaataaacctagcatgctgaatgcacgtgacaccgactgacttcagggatctgggccaggagtgtggtggacattggacaaagaggccattttggctgcgggaggacactctgatctcgaagcctgccataaaggtagcaaatagactcttgggattcccctcttctgtgcacatcgttgaatgaagagagtctttttgcacaaacttcacttgaaattgtgccactgatgataaacggaatgagagccaaaaaagtttagttggagacagttgtaaattcaatttgggagtttatttaattgacttttctattcacgttggggcacatgccaactccctgggtttcttcctgggctggtgttttggggcagcaggcatcattttccttttctagcttcataggaatattgtgagctcaccatgctgtggagggtgggaaaagagcagagacttggctgccctgctttctccttaggactcttcacttttctcaccacatctcttgcatgacttcatggtactggggacaagtttgtatgccttcaccccagagctggctgggttatggcttttgtagcagagcccatacagcctatggaagaactagaatctcactcacagtaataagaatctaggaggaattccaaaccgaagcaggcagggtcttgaacccaaaggacagcattttctacccacttcttaatattgacagcttccccgttctatttaatgtccaaaaatgtttcccaaaatttcaaactctttcactgtaaagatttgttacaaagaatgtggtttggggaattaccttattttatattgctgtaaacaaacttcaaattctacatgtgcgacttttctccttcctgaagggtgtttagtagtcagcgttttcagaattgttttgttactatactttaacattttacatttcctgtttgtattattttgtgagagcaagg

SEQ ID NO: 141323 - DNA, 439 bp, Homo sapiens
  misc_feature (1)...(439): n = a,t,c or g
cttaaaagagtattgtctaagttggcaccagagttggggagttttaagaggtttagaagcctggccgtcaatacccacaacagttatggaggcaagggaaacaggcccttgaaaagaaggcggcttccgaggcgatcgggcagtgtcagtcttcagccgctaagccgagaagatctgggaaggagtcagtcagagagccttgggccggagttccaggggctctgggagtggctgccaggagcggcgagattctgcatcttagcttgcctaggtggnnnnnnnnnnnnnnnnnnnnnnnnnnnnnnnnnnnnnnnnnnnnnnnnnnnnnnnnnnnnnnnnnnnnnnnnnnnnnnnnnnnnnnnnnnnnnnnnnnnnnnnnnnnnnnnnnnnnnnnnnnnnnnnnnnnnnnnnnnnnnnnnnnnnnnnnnnnnnnnnncag

SEQ ID NO: 141324 - DNA, 350 bp, Homo sapiens
ggccactaggccaagggatgcccacagaactgggactcctcctaagccgtgtcccatctgtgtgggaccccactggaaactggactgtctaactggcccaaggctctgactgactccttcccagatcttctcggctcagtggctgaagactgacgttgcctgatcacctcggaagcctcctggaccatcacagacgctttgggtaactcttacagtggagggtaagtccgtccccttcttaatcaatacgaaggctacccacttcacattaccttcttttcaagggcctgtttcccttgcctccataaccgttgtgggtattgatggccaggctgctaaacctcttaaaa

SEQ ID NO: 141325 - DNA, 840 bp, Homo sapiens
accatctcggatgccaagcttcgggtaactctcacagtggaaggaaaggtagaatggactcgtggtcttttaaaaacacacctcaccaagctcagccaccaacttaaacaggattggataatacttttaccactttcgcttctcagaattcagacctgtcctcagaatgctacaagaagccccctaaaccatcagggacgccgagcttcgggtaactctcacaatggaagcccacaagtttcggatacctctactccttccttggcgactgatcatgcaccccttaccatctcattaaaacctaatcacccttaccccactcaatggcaatatcccatcccacaggacgctttaaaaggattaagatctcagcttggcactctcaggctgcacactgtagctctggtgcaagctcaggctttatgttccttccctagcttgggggcagcaagggaagagattttagcagtggttgtggcagagggcctttcacttatctcttggggctccaatccagagagatgtggagctgctatcaatcacagcaatcagactgggatggggcagctgaactgtgggcccaagacaggagggcccttcctggtagtgaacaaagagggaggagagatgcacagctgtttggctcccaatttcactggcatttgttgcagtggcattttgccacacagtccaagctactgtttctggatgcgtatcttcattgagttaaagatcatcttcccaagtgaattttatgtcattctcctagcttcagtaccctcaaagctcaggggggacgtggacttcaaatgccctctaccttcattttccacaatttga

SEQ ID NO: 141326 - DNA, 823 bp, Homo sapiens
cttgctacatgtgctggaaatctggccactggcacaaggaatgccggcagcccgggattcctcttaagccgcgtcccatctgtgtgggaccccactgaaaatcggactgttcaactcacctggcagccactcccagagcccctggaactatggcccaaggctctctgactgactccttcccagatcttctcggcttagcagcctgaagactgacactgcccgatcgcctcggaagacccctagaccattcacggacgccgagcttcgcgtaactctcgacagtggaaggtaagcccgtccccttcttaatcaatacggaggctacccacgccacattacctttttttcaaagggcctgtttcccttgcctccataacctgttgtgggtattgacgggccaggcttctaaacctctttaaaactccccaacgtctggtgccaacattagacaatactcttttaagcactcctttttagttatccccatctgcccagttcccttattaggcttaagacactttaactaaattgtctgcttccctgactattcctggagtacagctatatctcattgccacccttcttcccaatccaaagcctcctttgcgtcctcctcttgtatccccccaccttaacccacaagtataagatacctctactccctccttgggcgaccgatcatgcaccccttaccatctcattaaaacctaatcacccttaccccacttcaacgccaatatcccgtcctgcagcatgctttataaagattaaagcctgttatcattccgcctgttacagcatggccttttaaaccctataaact

SEQ ID NO: 141327 - DNA, 478 bp, Homo sapiens; identical to SEQ ID NO: 123661

SEQ ID NO: 141328 - DNA, 702 bp, Homo sapiens
atggacctcaggaaattaagagggatgagctggagtgcctacgtggagttcgcacttcggaaagaagacgcatggattcctctgaagtctaagtctgagtctcctaaagagcctgaacagctgaggaagctcttcattggagagttaagctttgaaacagctgatgagagcctgaggagccattttgagcagtggggaatgctcatggactgtgtggtcatgagagatccaaacaccaagtgctccaggggctttgggtttgtcacatatgccactgtggaggaggtagatgcagccatgaacgcaaggccacacaaggtggatggaagagttgtggaaccaaagagcgatctcaagagaagattctcaaagaacagccaaagaggtcgaagttgttccggaaactttggtggtggtcatggaggtcttttcagtgggaatgacaactttggtcatggaggaaacttcaatggttgtggtggctttggtggcagccatagtggtagtggatacggtggcagtggggatggctataatggatttggtaatgatggaagcaattttggaggtggtggaagctacaatgattttggcaattgcaacaatcactcttcaaattttggacccatgaagggaggaaactttggatgcagaagctctggcccttatggtggtggaggccaatactttgccaaaccatga

SEQ ID NO: 141329 - DNA, 4389 bp, Homo sapiens
atgactggaatctgctacacagaagatgaaagatcatataagaaaaatgctcaaccaacggcagcaagtaaaaagcaaaaagaaacacagaaattctgtctaagagtagacgggcaacaaaaagtgaagctctcggtgctccaggagaaaagcgcgcagctcacagtacaacttaagagccagaagttcctgggccaccccacagcgggccggggtcgcagcgagctctgcctggacctccccgatcccccagaggacccagtggcactggagacccggagtgtgggcacctgggttcgagaacgggacttgggcatgcctgatggggaggctgccctcgccgccaaggtcgctgtgctggagacccagctcaagaaggcgctgcaggagctgcaggcagctcaggcccggcaggctgacccccagccccaggcctggccaccgccggacagcccggtccgcgtggatacagtccgggtggtagaagggccacgggaggtggaggtggtggccagcacagccgctggcgcccccgcacagcgggcccagagcctggagccttacggcacagggctgagggccctggcaatgcctggtaggcctgagagcccacctgtgttccgcagccaggaggtggtggagacaatgtgcccagtgcccgctgcagctaccagcaacgtccatatggtgaagaagattagcatcacagagcgaagctgcgatggagcagcagaaatgaaatgggaggaccagaacattggagatcagtgccaaaatgccaagagaaatctaaggatggcattaacatcctctctgggctgtggatttctccaggttgtgctgagactccagaatttacagcaggtgatagtcagctatttcggccagtgcaagtttggatgcctgcaaggtcaatcatgcgagcatcaggaatatggagagaagccatatacacataagcaacgtgggaaagccatcagtcatcagcactccttccagacacatgaaaggccccccaccggaaagaaacccttctattgtaaagaatgtgcaaaaacctttagttctcttggaaacctccgaagacacatggcggcacaccatggagatggaccttataaatgtaagttgtgtgggaaagcctttgtttggcccagtttatttcatttgcacgaaagaacacacactggagagaaaccgtatgaatgtaagcagtgttctaaagcctttcctttttacagttcctatctaagacatgaaagaatccacacgggagagaaagcgtatgaatgtaagcagtgttccaaagcctttcctgattacagtacctatctaagacatgagagaactcacaccggagagaaaccctataaatgtacacaatgtgggaaagccttcagctgttactattacactcgactacatgaaaggactcacacgggagaacaaccctatgcatgtaagcaatgtgggaaaacgttttatcatcacacaagctttcgaagacacatgataaggcacactggagacggaccacataaatgtaagatatgtgggaaaggctttgattgtcctagttcagttcgaaatcatgaaactactcacactggagagaaaccctatgaatgtaagcagtgtgggaaagtgttatctcatagctcgagctttcgaagtcacatgataacacacacaggagatggaccccagaaatgcaagatatgtgggaaagcctttggttgtcccagtttatttcaaagacatgaaaggactcacactggagagaaaccctatcaatgtaaacaatgtggtaaagccttcagtcttgccggttcccttcgaagacatgaagcaactcacactggagtgaaaccctataaatgtcagtgtgggaaagcctttagtgatctctcttcctttcaaaatcatgagacaactcacactggagagaagccatatgagtgtaaggaatgtgggaaagcattcagttgtttcaaatacctttctcaacataaaaggacccacacagtacaaaaaccttatgagtgtaaaacatgtagaaaagccttcagtcatttcagtaacttaaaagtccatgaaaggattcactctggagagaagccatatgaatgtaaggaatgtggaaaagcattctcttggctcacttgccttctacgacatgaaagaattcacactggagagaaaccctatgaatgtctacaatgtggtaaagccttcactcgttcccgtttccttcgaggacatgaaaaaactcacactggagagaagctgtatgaatgtgtctgcaaggtggacaaacagaaccgtgctggctacagccctattatgctcaccgccctggccaccctgaagacccaggacgacatcgagactgtccttcagctcttccggcttggcaacatcaatgccaaagccagccagccatatgtggcccagggggacctgagtggattccaagacattggtggctacacaaaaaggaaactggacttttattccacgctgttggctggcagtccaggacctcagcatccaggaagtcacctttgtcctcagaccaacctggaaaaatctcgcttttctgcccgtggacaccgccgaagaagcatcgttaaagtctctcttcaccctgccgtcatgtctaagtcagagtctcctaaagagcccgaacagctgaggaagctcttcattggagggttgagctttgaaacaacatgatgagagcctgaggagccattttcgaggcaatggggaacgctcacggacttgtgtggtaatgagagatccaaacaccaagcgctccaggggctttgggtttgtcacataatgccactgtggaggaggtggatgcagctatgaatgcaaggccacacaaggtggattggaagagttgtgggaaccaaagagagcttgtctccagagaaagattctcaaaagaccagggtgcccacttaacttgtgaaaaaagatattttgttggtggcattaaaagaagacacttgaaagaacatcacctaagagattatttttgaacagtattggaaaaatttgaagtggattgaaatccatgacttgacccgaggcagttggcaagaaaaaggggctttgcctttgtaacctttggacggaccatggactccgtgggataagattgtccatttcaggaattaccatactgtgaatggccacaactgtgaagttagaaaagccctgtcaaagcaagagatggctagtgcttcatctcagccaaagaggtcgaagtggttctggaaactttggtggtggtcgtggaggtggtttcggtgggaatgacaacttcggtccgtggaggaaacttcagttggtccgtggtggctttggtggcaccccgtggtggtggtggatatggtggcagtgggggatggctataatggatttggtaatgatggaagcaattttggaggtggtggaagctacaatgattttgggaattacaacaatcagtcttcaaattttggacccatgaaagggaggaaattttggaggcagaagctctggcccctaatggcggtggaggccaatactttgcaaaaccaccgaaacccaaggtggctatggcgtttccagcagcagcaagtaactattggcagtggcaggaggttctaattacagccaggaaacaaagcttatcaggagaggagagccagagaagttgacagggaagctacaggttacaacagatttgttgaacttcagccaagcacagtggttggcagggcttagcttgctacaaagaagacatgttttagacaaatactccatggtgtaatgggcaaaaaactccgaggactgtattttgtgactaattgtattacaaggtatttttagtttctggttctgtgggaaagttgtaaagcattccaacaaaagggttttaatgtagattttttttttttgcaccccatgctgtttgattgctaaatgtaacagtctgatcgtgacgccgaataaatgtcttttttttaatgtgctgtgtaaagttagtccactccttaagccatcttggtaaatttccccaacagtgtgaagttagaattccttcagggtgatgccaggttctatttggaatttatatacaacctgcttgggtggagaagccattgtcttcggaaaccttggtgtagttgaactgatagttactgttgtgacctgaagttcaccattaaaagggattacccaagcaaaatcatggaatggttataaaagtgattgttggcacatcctatgcaatatatctaaattgaataatggtaccagataaaattatagatgggaatgaagcttgtgtatccattatcatgtgtaatcaataaacgatttaattctcttgaa

SEQ ID NO: 141330 - DNA, 1368 bp, Homo sapiens
atgggtatggactgcctcacagggcaccctttcccataccggcaaggctcagccaccagggtatctatcaaagcgacaatctcacaacccagtcacaaagaagccgcgggtatcggcccacaagtcacacaggacgtggaaggcacacggggtgacagcctcgcactgaacggtaccaacctccactcgctccggagtcactcagatggcctgcgacgagcttccggagacccacacgacgctcatcagcccactccagacctgcagaacagaattggtgaaagctctccttcctgccccgaaggctcggggaatttgcactcgggtctcaccgctacccttagttggatggaacccagcccttacgggcccggaaagaagcgcctcagtgcctccgcccccggaggacacaaaggggccgccggcccaactcccgcgggtcctcccacactggcctctccccggccttccagagagccgaaagtccggattccctgcagctccgagcctggcccggtcacagggacgggcccagcgtcacactacacgggctggtgtggaagtgcgcaggcacaaggctctgcgcgcctcccttagcaaccagggcggggagttgagaatcgcagttggccgcagggaaaaggtcagaatcaaacagccacgagaatataaaacgcgaccatggtcacacaaaaggtcgcatattcgcacgacctcagatgtcactggacagggtctctcgccctggaaaccccactccaaattccatggccgaagtttcacacatacagtcacactacgtcactcctccctcttctagccgctgtcaggaccttaaggctccagctgacccggccttcactggccctggagctctcaccaccttcaccccgctgtattctagcttcaggtagagacccaaaaagacggaactaaacacactgagccgggcttccttcacggacttgcgaacctgcagctccagccgactccccgccggctctgccactttggcagcgttaagtgtggaatcggggcctgtgccgcgggcttggtgaacttcccttattgtgcacatgacaggccatacaggtgaaaaaccctatgaatgcaataaatgtggaaaagccttctcccaaagctcatgccttactatacatatacgaggacatacagatactacgtgctcagagaaagaaaatcagggtaggggatgtcatggatactgatgaaattgagctaggaatcattaacaagttaacatttaagcaaagatttgaagaaatgaaaaagtcagtcagtcattcaagtctctggggaaaaagcattcagggagaggcagcagctggttcaaaggcccaaaactag

SEQ ID NO: 141331 - DNA, 4953 bp, Homo sapiens; identical to SEQ ID NO: 120570

SEQ ID NO: 141332 - DNA, 1367 bp, Homo sapiens
tttctgccaggttgagcagggccccttcctccttgtctggatcctcctgctccgagtcaccttgttttccttttagctgagggcatttgttcttccaatgtcctatttctttacaataagcacactgattacgctgcaagctctgacaaccaggctgaatttctttcccggggccccccttcccttgcctctttggggggacccctgtgattgctgcagctaacaggtcggcatttcgccggacctgatgttcattctctctgcggttttccttagggcttactgcatccctgtttacaaacacctggttagctatttctaataactgtgatgtgttcatccctgcaaacccagcctgtttctgcagttttcttctaatgtcttctgcactttgactaactaaagccatgttaatcatgcgctgattttcaggactattgggatcaaagggagtatacatacaataggcctcacacagcctctcgtagaattgtgctggactttcttcttttccctgaatggccacgtttgtggccttctgggctcccctctttaatccttccaagagagcttccctgtatcggtttagcctttgcatatcctctctttcatttgggtcccactgggggtcggttcccggtaactgggtccttacatactcttgggggttttggtaatcagccggtgcatgttcctctagccacttagttgctgcttggagcactctccgcctttcatctgtgttaaagaggaacatgagcaactggtggcaatcagcccaagtggggttatgggtctggataatagtttggagcaaatcaattagagcttgcggcttttcagtataggatggggtattgtttttccagttgaggaggtcggcagagaagaagggctggtacacaaaaacacgcctctccaccatgtgcccatcctcatctattccagtataccactgctctctcaggggcatttgtatccccgttttgggtcttaaaccagctgccaagggaggggtttctcccgaggcttcacctcctctcttgcctactctgggtggcctagggatgtttgtcttgtggaggtgcaagccccgtggactcaaaagtggtgagcctctctcccaagtttcaaatgtccagactccaagtgccagttccttcccggtgttcagccactgcgttgatcctccacgggggcctgccacacactgctctcttatttcagccatctttgcagtaaccagttccccagggactttgacaaacttaatgtaggtgatacctgacagcatctcaccatgagcctgtgctaaatgcctcttgcttcctgccttgtgcttctctgaaaccacagcacaggccatg

SEQ ID NO: 141333 - DNA, 1329 bp, Homo sapiens; identical to SEQ ID NO: 119219

SEQ ID NO: 141334 - DNA, 3576 bp, Homo sapiens
atgcaagtattgagaagctttgcctcttatgtacctctttttggaaagccattagagaatgtgattcaccaaaataagttagtaaaccaagaaagtaaaaggtatcagtttttggaagaagcttttcaaaatcagaagggtgcaattgagaatctactggcgaaacttcttgagaagaagaattatgttcattttgcagctactcaggtgcagaataggataaaagaagtaaatgagactaacaaacgagtagaacaggaaattaaagtggccattttcacccttatcaatgaaattaataagaaaggaaaatctctcttacaacagctagagaatgttacaaaggaaagacagatgaagttactacagcagcagaatgacatcacaggcctttcccggcaggtgaagcatgttatgaacttcacaaattgggcaattgcaagtggcagcagcacagcactactatacagcaagcgactgattactttccagttgcgtcatattttgaaagcacggtgtgatcctgtccctgctgctaatggagcaatacgtttccattgtgatcccaccttctgggcaaagaatgtagtcaatttaggtaatctagtaatagagagtaaaccagctcctggttatactcctaatgttgtagttgggcaagttcctccagggacaaaccacattagtaaaacccctggacagattaacttagcacagcttcgactccagcacatgcaacaacaagtatatgcacagaaacatcagcagttgcaacagatgaggatgcagcaaccaccagcacctgtaccaactacaacaacaacaacacaacagcatcctagacaagcagcccctcagatgttacaacaacagcctcctcgattgatcagtgtgcaaacaatgcaaagaggcaacatgaactgtggagcttttcaagcccatcagatgagactggctcagaatgctgccagaataccagggatacccaggcacagcggccctcaatattccatgatgcagccacacctccaaagacaacactcaaacccagggcatgctggaccctttcccgtagtatcggtacacaacaccacaatcaacccaacgagccctactacagcaactatggcaaatgcaaaccgaggtcccaccagcccatctgttacagcaatagagctaatcccctcagttaccaatccagaaaaccttccatcgctgccagatattccacccatacagttggaagatgctggctcaagtagtttagataatctactaagtagatacatctcaggcagtcacctacccccacagcctacaagcaccatgaatccttctccaggtccctctgccctttctccgggatcatcaggtttatccaattctcacacacctgtgagacccccaagtacttctagtactggcagtcgaggcagctgtgggtcatcaggaagaactgctgagaagacaagtcttagtttcaaatctgatcaggtgaaggtcaagcaagaacctgggactgaagatgaaatatgtagcttttcaggaggtgtaaaacaagaaaaaacagaggatggcaggaggagtgcttgcatgttgagcagtcctgagagtagcttgacaccacctctctcaaccaacctgcatctagaaagtgaattggatgcattggcaagcctggaaaaccatgtgaaaattgaacctgcagatatgaatgaaagctgcaaacagtcagggctcagcagccttgttaatggaaagtccccaattcgaagcctcatgcacaggtcggcaaggattggaggagatggcaacaataaagatgatgacccaaatgaagactgtggggactggatatgcacattttgtagagatattggaaagccagaagttgaatatgattgtgataatttgcaacatagtaagaaggggaaaactgcgcaggggttaagccccgtggaccaaaggaaatgtgaacgtcttctgctttacctctattgccatgaattaagtattgaattccaggagcctgttcctgcttcgataccaaactactataaaattataaagaaaccaatggatttatccaccgtgaaaaagaagcttcagaaaaaacattcccaacactaccaaatcccggatgactttgtggccgatgtccgtttgatcttcaagaactgtgaaaggtttaatgaaatgatgaaagttgttcaagtttatgcagacacacaagagattaatttgaaggctgattcagaagtagctcaggcagggaaagcagttgcattgtactttgaagataaactcacagagatctactcagacaggaccttcgcacctttgccagagtttgagcaggaagaggatgatggtgaggcaattgccctggtggaatgccttgccagagcagtgcacggtaggcccccatggaggatcaacgcagtggctgaacacccagaaggaattggcgcttggactccagacatctggaacacgggaggaaacttagcattccttggagacctgaaaggatgcagtgaacttaagaactttcaagagctcaccaataagtcagcccttgttcatccccgagcggatgtgtggtggtattgtggtggacatttactggacactctgccgaataactggagtggcacttgtgctttagtccaattggctatccctttcaccctggcatttcatcaaccagagggagggcaggtgatagaaaaagggtggatctggttatcggatggaagaatagcaatgccacaactgctaggagccgcagtcgtactagctgtgcatgagaccacccatctaggccaagagtctcttaaaaagttgttaggccggtacttctacatctcacatctgtcagcccttgccaaaacagtggcttatggagcagccccctttgaagatccccaagtagacttcactgagatgcccaactgtggagatctcatccctaggtttggactgcccttacaaatcggcttggacaacaggtcagcatttgtggctgacctggtacagaagacagcaaaggtgattggttattataaatgtgctggaactctaaaagggacttgtttgtataatgtcacccagtacaaggtatgtagcccaaaaagtgaccagcctgatgtgtgttgtaacccatctgagccctctatggtaacagtttttgaaataagattaagaacggtcacctggtggggtctaaaccatactaagaagcatccatttagtaagtttcctaagttgcaaactgtttgggcccatccagagtctcactgggactggccagctccagctggactatactggatatgcaggcatagagcctacaccaagctacctgaccaatgggcaggtcgttgtgtcattagcaccattaagccatcctttttcctactgcttgtaaaaacaggtgagctcctaggcttccctgtctatgcttcccgagaaaagagaagcatagccataggtgattggaaaaatgatgagtggccccctgaaagaatcatacagtactatgggcctgccacatgggcacaagacagctcgtag

SEQ ID NO: 141335 - DNA, 824 bp, Homo sapiens
tttaaattttaacgtgacttgtttgggcacctctttttcttctgttttggttaacactttactcatatcgtttgtgagcccccaccagtcttcattcttaatcttattttaaaaactgtggtcatgggaggctcaggtgggtcataacgcacatcaggttggtcatttcctgggctacataccttgtacagaataacattatacaaacaaggcttttttagagttctagtacacttataataactgtaaaataataggaccatagcaaccttttgtcctacctcagtgacttgatgtatatactgggaacagtcctcagtctgaggaaggtcagttgaagtccttactgtaaaattccaaattttaaggcaaatgagtcctgcgatgagtttcctcatgctttgaccatgcaaggaccagtcagcttccaggtgtgactggggcagggcttgtcatcttcttcagagtcactttgcaggggttggcgaagctgctcccatgcacgtacagctcccagtctactgatgtttaaggatggtcttggaggttgggcctgctagaataaactgagtccaacacctctacacagttaagtttaactgggctctctgataccaggagcaaggtggcggggtttagggtgttgcaaacttcaatggttatgtggggatttttcacagagcaagctttggtatctagctagtctagcattcattagctaatggtgtcctttggtatttattaaaatcaccacagcacagggggactttatgtttaggttttgtctaagagttagcttatctgcttcttgtgctaacagggct

SEQ ID NO: 141336 - DNA, 1449 bp, Homo sapiens
  misc_feature (1)...(1449): n = a,t,c or g
atgagacaagatggcaaggtggcaagacagctattggtgattggtgagatggtgagacagcgatcagcagctggcaataaggaaggagacaagacgccccagcctatacctctcactgcccaaggaagtaagccctaccagtaccaccaggagggtacccctatatcagcccctaaaatcaaacctgtgtccattgtgggagataagaaacagatggatctgagtactgtccaaaaatatgcagatggagtggccacacataacctagaccatgctagttatcatgtggaaggagatacagttccagatatggaccctcagtggaattaccagagggcttcccaagatctcaaatgcaaaaatcacatgacggagaaagtcagaaatttcaagtgtgagagggagctggcccaaggaaattctactggctttgagatggagggatcacgtggcaaggatggtctctatgagctaagtggcccacagctgacagcaaggaaagaggtacctcattcctgcaactgcaacaaactaaatatggctgatgatctgaatcagcttctgattaaagccactcccttcactatctcggtgtctcctgtccgcggctcgtcctgctacatttcttggttccctgaccggcaagcgagagccgtgtgtggcaggcccccgtggaggatcaacgcagtggctgaacaccgggaaggaactggcacttggcacttggagtccggacgtctcaaactcgtgtgcgtgtggtgtgagcgtggtgttttgtctcgaggagacacgggtcaggtacaaactaagcccaccccactaggaactatgttgaaaaatttcaagaaagaatttaagggagattacggtgttactatgataccaggaaaacttagaactttgtgtgaaatagactggccagcatttgagggaggaaacttagcattccttggagacctgaagggatgcgatgagcttaagaattttcaagagcttatcaatcagtcagccattgttcatccgcaagcagatgtgtggtggtattgtggtggacctttactgggcactctgccggaataactggagtggcacttatactttagtccaattggctatccctttcaccctggcatttcatcaaccagaaggaaaaaaaataagacattgtaaagtgagagaagccccttataggtctttcgactctcctgtccatttagacgcagttgggagtcccacgaaggaatacagatcaatttaaagcttgaaatcaaatagctacaggatttaattcaatattttagtaggtgacagttaataaaaatataaattagataaactacatctattacaaccaacagcagcaagcttttcatgagttaaaagaaaaactcaggtncgcccancctggggccacctgacctgacaaaactttttacactctatgtgtca

SEQ ID NO: 141337 - DNA, 1108 bp, Homo sapiens
atgaccattcgatttagcaataaggagatcaataacgacctcagggagggcagtatcagcaggaggatcgtagaagttaaagacttaaaacaaactttggcaattaagacaggataccaagattcaaatgcctggttggaatggatcaaatattccatccacacgttaaacaaaagcaattgttatgcttgtgcacatggcaggccagaggccctgattgtccctcttcccactaaggtggtcctccagttgaccaggcatgggctgcagggtagctattttccaggattctacggcctggagtaacaagttgtgccaagctctctctctgctatatctcaaagtccagcaccctgcgggtcagcccctgagggccgtccagcttccgtctcccaacactaagttcacttcctgtctctcacggcagggaggaaacttagcattccttggagacctaaagggatgcggtgagcttaagaattttcaagagcttatcaatgagtcagcccttgttcatccctgtgcagatgtgtgatggtattgtgggggacctttactgggcactctgccaaataactagagtggcacttgtgctttagtccatttgactatccctttcaccctgtcatttcatctaccagaggaaggaaaaataataataataagacattgtaaagtgagagaagccccttatgggcctttcaactctcacatctatttagatgcaattggaatccaaaagggaataccagatcaatttaaagcccaaaatcaaatagctgcaggatttgagtcaatattttggtgggtgacagttaataaaaatgtagattggataaactacatctattacaaccaacagcaacgagcttttcatgagttaaaagaaaaactcatgtcggccctagccctggggctacctgaccagacaaaaccttttacactatatgtgtcagacagagaaaaaaaaatggcggttagagttttgacccagaccatggggccctggctggggccagtggcctacctctctaaacaactagatggcgtttctaagagttggcccccatgtttgagggctttggcagcaacagccctgctagcataa

SEQ ID NO: 141338 - DNA, 4563 bp, Homo sapiens
atgcccaggccagaaaaactgggaaaaacacaggttcccccacttgctgaatgtttgacaaaagattcttttttgggccaaaaacaggcatcactgggaccattgacatttagagatgtgaccatagaattctctctggaggagtggcaatgcctggacacggttcagcagaatttatatagggatgtgatgttagagaactacagaaacctggtcttcctgggtatggctgtctttaagccagacttgataacttgtctgaagcaagggaaagagccttggaatatgaagagacatgagatggtaactaaacccccagttatgcgttctcattttacacaagacctttggccagatcagagcacaaaagattctttccaagaagtaatactgagaacatatgcaagatgtggacataagaatttacgattaagaaaagattgtaaaagtgccaatgagggtaagatgcacaaagaaggttataataaacttaaccaatgcaggacagctacccagagaaaaatatttcagtgtaacaaacatatgaaagtctttcataaatattcaaatagaaataaggttagacacactaaaaagaaaactttcaaatgtataaaatgtagcaaatcatttttcatgctttcatgcttaattcgacataagagaattcatattagacagaatatctacaaatgtgaagaacgtggcaaagcctttaaatcgttctcaacccttactaaacataagataattcatactgaagacaaaccttacaaatataagaaatgtggcaatgcctttaaattttcttcaacgttcactaaacataagagaattcatactggagagacacctttcagatgtgaagaatgtggcaaagcttttaaccagtcctcaaatcttactgaccataagagaattcatactggagagaaaacctacaaatgtgaagaatgtggcaaagcttttaaggggtcctcaaattttaatgcacataaggtaattcatactgcagagaaaccctacaaatgtgaagattgtggcaaaacttttaaccatttctcagcccttagaaaacataagataattcatactggaaagaaaccctacaagcgtgaagaatgtggcaaagcttttagccagtcctcaacccttagaaaacatgagataattcatactggagagaaaccctacaaatgtgaagaatgtggtaaagcttttaagtggtcttcaaaacttactgtacataaggtagttcatactggaaagaaaccctacaaatgtgaagagtgtgagaaaccctacaaatgtgaagaatgtggcaaagcctttaaccagtcctcacaccttactcaacataaaacaattcatactggagggaaaacctacaaatgtgaagaatgtggcaaagcttttaaccatctttcagcccttactaaacataagataattcatactggggagaaaccatacaaatgtgaagaatgtggcaaagcttttaggcaatcctcacaccttactagacataaagcaattcatactggagagaaaccctacaaatgtgaagaatgtggcaaagcttttaaccatttctcagaccttagaagacataagataattcatactggaaagaaaccctacaaatgtgaagaatgtgggaaagcttttagccagtcctcaacccttagaaaccatcagataattcatactggagagaaaccctacaaatgtgaagaatgtggtaaagcttttaagtggtcatcaaaacttactgtacataaggtaattcatactggagagaaaccctgcaaatgtgaagaatgtggcaaagcttttaagcatttctcagccctcagaaaacataaggtaattcatactagggagaaattgtacaaatgtgaagaatgtggcaaagcttttaacaattcctcaatccttgctaaacataagataattcatactgggaagaaaccgtacaaatgtgaagaatgtggcaaagcttttaggcaatcctcacaccttactagacataaagcaattcatactggagagaaaccttacaaatgtgaagaatgtggcaaagcttttagccatttctcagcccttagaagacataagataattcatactggaaagaaaccgtacaaatgtgaagaatgtggcaaagcttttagccatttctcagcccttagaagacataagataattcatactggagagaaaccctacaaatgtgaagaatgtggtaaagcttttaagtggtcatcaaaacttactgtacataaggtaattcatactgcagagaaaccctgcaaatgtgaagaatgtggcaaatcttttaagcatttctcagcccttagaaaacataaggtaattcatactagggagaaattgtacaaatgtgaagaatgtgtcaaagcttttaacagtttctcagcccttatgaaacataaggtaattcatactggagagaaaccctacaagtgtgaagaatgtggtaaagcttttaagtggtcctcaaagcttactgtacataaggtaattcatactggagagaaaccctgcaaatgtgaagaatgtggcaaagcttttaagcatttctcagcccttagaaaacataaggtaattcatactggaaagaaaccctacaaatgtgaagaatgtggcaaagcttttagccaatcctcatcccttagaaaacatgagataattcatagtggagagaaaccatacaaatgtgaagaatgtggtaaagcttttaagtggttgtcaaaacttactgtacataaggtaattcatactgcagagaaaccctgtaaatgtgaagaatgtggcaaagcttttaagcatttctcagcccttagaaaacataagataattcatactggaaagaaaccctacaaatgtgaagaatgtggcaaagcttttaatgattcctcaacccttatgaagcataagataattcatactgggaagaaaccatacaaatgtgcagaatgtggcaaagcttttaagcaatcctcacatcttactagacataaagcaattcatactggggagaaaccctacaaatgcgaagaatgtggcaaagattttaacaattcctcaacccttaagaaacataagctaattcatactagggagaaattgtacaaatgtgaagaatgtgtcaaagcttttaacaatttctcagcccttatgaaacataagataattcatactggggagaaaccctacaaatgtgaagaatgtggtaaagcttttaagtggtcctcaaaacttactgaacataaggtaattcatactggagagaaaccctgcaaatgtgaagaatgtgacaaagcttttaagcatttctcagcccttagaaaacataaggtaattcatactggaaagaaaccctaccaatgtgacgaatgtggcaaagcttttaacaattcctcaacccttacgaaacataagataattcatactggggagaaaccctacaaatgtgaagaatgtggcaaagcctttagtcagtcctcaatccttactaaacataagataattcattctgtagagaaaccctacaaatgtgaagaatgtggcaaagcctttaaccagtcctcacaccttactagacacaaaacaattcatactggagagaaaccctacaaatgtgaagaatgtggcaaagcttttattcagtgctcataccttattagacataaaacaattcataccagagagaaacctacaaatgtgaagaaagtaccaaagcttttaagcaatcctcacaccttactagacaaaacaattcatactggagagaaaccctacaaatgtgaagaatcttttgaccggtcctcaaatcttactgaacataagataattcatgctagagacaaacactacaaatgtgaagaatgggcaaagcttttaaccagttctcaaaccttactcaaaataatttatagtggagaggaacgctacaaattcaaaggatttggcaaaacttttaagtgtttctcaaaacttactgaacacaagataattcatattagagagatactttacaaatgtgaagaatgtggcaaagcttctaacgggttctcaaatcttactgaatgtgagataatttatattagagagaaaccctacaaatgtgaagaatgtggcaaagcttctaacgggttctcaaatcttactgaatgtgagataatttatattagagagaaaccctacaaatgtgaagaatgtggcaaagcttttaactggtccttaaaccttactgaacataagataattaatactaaaggaaaccctaaacatataaaaaatgtgacaaagcttttaactgaccttactcaaaataagatagtttatactgaagacaaactctataaatgtgaagaatgtgacaatgcttttaatcaattctcagactttactagacgtaagaaaattcgtactggagaaaaaccctacaaatgtgaagaaagtgggaacacttttagccagtcctcaactcttactaaacaagataattcaatgggagagaaaccctacaaatgtgaataa

SEQ ID NO: 141339 - DNA, 411 bp, Homo sapiens
gcacagctccctgccgcagaggcgtctcctccttgcctatgtagattttacgttctacccagacacttggtccgtgccttttctgacttctcttctttcagctagggggtgacgccttttccttcaaattcagctcaggtgttaacttccagaaattctttgatctgccaagcctggggtaagagagtgttctctgcccttttgtgcataattctatcagaatacacatcacctttgtaaaattctgcatttacatgtttcttgccctctctggaatgtaaactctgagggcttaaggccttgtctttgtgttacattccccaaccctgtgcgcctgaacttgacaggtgctccgtgaaagttggaagtgttgattgccttcaggaagagattgatgttaattggaataca

SEQ ID NO: 141340 - DNA, 246 bp, Homo sapiens
atgagtcttcggaagcaaacccctagtgacttcttaaagcaaatcatcggacgaccagttgtggtaaaattaaattctggagtggattatcgagtgaactcaggtatgaacaacacaactgaagaacatcttggtgcagcagcatttgtttttgcaggagtattcaagattggcaagcagctgttgagtatcattttacaacctgaatgtcccactcatataacgtataatgtgtgtggcaacagg

SEQ ID NO: 141341 - DNA, 429 bp, Homo sapiens
  misc_feature (1)...(429): n = a,t,c or g
ctgggatcatccgcggcggccgggctcgtggggcgcctggagtgagggttctggttcccgccggcgaggattgttaaaatgagtcttcggaagcaaacccctagtgacttcttaaagcaaatcatcggacgaccagttgtggtaaaattaaattctggagtggannnnnnnnnnnnnnnnnnnnnnnnnnnnnnnnnnnnnnnnnnnnnnnnnnnnnnnnnnnnnnnnnnnnnnnnnnnnnnnnnactgggggtcctggcttgcctggatggctacatgaatatagccctggagcagacagaagaatatgtaaatggacaactgatgaataagtatggggatgcatttatccgaggaaacaatgtgttgtacatcagtacacagaatagacggatgtgaagacaccaatagagcaacgcttttcatagt

SEQ ID NO: 141342 - DNA, 555 bp, Homo sapiens
atggcactaacatctggcaaggacctttgtgctgcatcatcctatgacagaaagcaaaaggataatcttcacattgagtatgctgatgaagaaaaggaagaggaggggttggccttgcttggggtggtagaggtggaagaggtggaggagatggaaggggaggcaagagagctagggggtgacgccttttccttcaaattcagctcaggtgttaacttccagaaattctttgatctgccaagcctggggattgttaaaatgagtcttcggaagcaaacccctagtgacttcttaaagcaaatcatcggacgaccagttgtggtaaaattaaattctggagtggattatcgaggaattttccccactgacaaacttgcacaaataaatatggcaaacactgatgtccaatacccaacagcgattgtccgcttattccctgctagcagaacagatggttctgctaacagaacccagatgttacattcatgtggaagtggagaccacctgtcttcggggaagttaggcctctccttttccccaggggatgaactgtga

SEQ ID NO: 141343 - DNA, 659 bp, Homo sapiens
aggcagaaaagtgcccctgcctcggcgctttcggttttggctgggatcatccgcggcggccgggctcgtggggcgcctggagtgagggttctggttccccgccggcgaggattgttaaaatgagtcttcggaagcaaaccccctagtgacttcttaaagcaaatcatcggacgaccagttgtggtaaaattaaattctggagtggattatccgaggggtcctggcttgccttggatggctacatgaatatagccctggagcagacagaagaatatgtaaatggacaacttgaagaataagtatggggatgcatttatcccgaggaaacaatgtgttgtacatccagtacacagaagagaccggatgtgaggacccccaagagagcaacgcttttcatagttggatatatttttttatgaattttttctaatttttgcttcttttgtgatacaatttgtcctccttttataataagttgggtgatttttcacctgacatgtgaagtaagataaatgtatacaattgtggatttaattgtgaaatgttctttcacttgtagagtttcagtcattttcttttacctcgttggtcagtgtacagaatgctaaaataattaaaaaaagaccaaatatacctcttcctacaagattatttaactt

SEQ ID NO: 141344 - DNA, 450 bp, Homo sapiens
ggaggggtccaaggctttggtgtgagcaatcaccatcctcccacgagtacaggtaggcggggtgttcgtgcatcaggtacggccaccagaggttggcacccagcaccttcagctggccctgggtcccagcctggttgtccacgactttgttttctgcattcaaaagacacacttccaacttgaactggttactgcacttgatggagatctggtaattcaccagccccagtgttttgtgacttctttccacagctgttctttgagtttgttcaaacattgcttccaagtcaaatgtgtgagcttttttaccgaaccccgaaccccgtgaagcccatggtgaccacaagctgcgggtccggtcccgatgcgtctgagcctgtcacttcgctgggcccagagcgctccatggctggccgcacaccgcagaaccagccacagcgacaccccctt

SEQ ID NO: 141345 - DNA, 642 bp, Homo sapiens
tttcgtagttattggcaagttcccctgcagttgtttgggctgtccctgtggctggttctggggtgtgcggccagccatggagctgttctgttcccagcgaagtgacaggctcaaacgcgtcgggaccggacgccgcagcttgcgctcacccatgggccttcacggggttcggtaaaaaaagctcgcacatttgacttggaagcaatgtttgaacaaactcgaaggacagctgtggaaagaagtcgcaaaacactggaagcaagagaaaaagatggaagaaatgaacagagatgaaagaattaagaagacaaaattgaagatattgagccaacatcctcaagatcaaatgtggtcagagattgctcccaaatcatcttccaggggatacgagcagcaagtgaaagtgaacagagttttgaattcttttcgagaagaggtacaatggccctcctttaccccctaaaatgggtaggaaaaccagttaattttatggaggaagatatcctcggtcctttacctccacctcttaatgaagaagaagaagaagcagaggaagaagaagaggaagaggaggaagaggaaaatcctgttcacaagattcctgactcgcatgagataacgctgaagcatggcactaaaaca

SEQ ID NO: 141346 - DNA, 393 bp, Homo sapiens; identical to SEQ ID NO: 128184

SEQ ID NO: 141347 - DNA, 896 bp, Homo sapiens
  misc_feature (1)...(896): n = a,t,c or g
gtattcggccttggttccgtggcccatatgcttctaaataaaacatttgggagctaccttggtgtcaacttgggttttggcttcggagtcaccatgggagtgcacatggcaggccgcacctctggagcccacatgaacgcagctgtgagcctcactaactgtgcactgggccgtgtgccctggaggaagtttccagtctatgtgctggggcagttcctgggctccttcctggcagctgccaccatctacagtctcttctacacggccattctccacttttcgggtggacagctgatggtgaccggtcccgtcgctacagctggcatttttgccacctaccttcctgatcacatgacattgtggcggggcttcctgaatgaggcgtggctgaccgggatgctccagctgtgtctcttcgccatcacggaccaggagaacaacccagcactgccaggaacagaggcgctggtgataggcatcctcgtggtcatcatcggggtgtcccttggcatgaacacaggatatgccatcaacccgtcccgggacctgccccccccgnatcttcaccttcattgctggttggggcaaacaggtcttcaggtggcatcatctacctggtcttcattggctccaccatcccacgggagcccctgaaattggaggattctgtggcgtatgaagaccacgggataaccgtattgcccaagatgggatctcatgaacccacgatctctcccctcacccccgtctctgtgagccctgccaacagatcttcagtccaccctgccccacccttacatgaatccatggccctagagcacttctaagcagagattatttgtgatcccatccattccccaataaagcaaggcttgtccgacaaaaaaaaaaaaaaa

SEQ ID NO: 141348 - DNA, 1696 bp, Homo sapiens
gatcaatgggaggatggaaggtatgggggagacggaggcctctgcagagggagaggatagcacaggagccagggctgaagggaacagtggctctagactgagggtaatgggcctgaaggtattcggccttggttctgtggcccatatggttctaaataaaacatatgggagctaccttggtgtcaacttgggttttggcttcggggtcaccatgggagtccacgtggcaggccgcatctctggagcccacatgaatgcagctgtgaccttcactaactgtgcgctgggccgcgtgccctggaggaagtttccagtccatgtgctggggcagttcctgggctccttcctggcagctgccaccatctacagtctcttctacagcaactgggagaaaaaagccttggagctcccccaccctctaacctataacctcatttctgggaccccagtggggcttagttgggggcaggttcgcatgatagtctgtgtctccgcagcggccattctccacttttcgggtggagagctgatggtgaccggtccctttgctacagctggcatttttgccacctaccttcctgatcacatgacattgtggcggggcttcctgaatgaggagtggctgaccaggatgctccagctgtgtctcttcaccatcacggaccaggagaacaacccagcactgccaggaacacacgcgctggtgataagcatcctcgtggtcatcatcagggtgtcccatggcataaacacaggatatgccatcaatccatcccgggacccgccccccagcatcttcaccttcattgctggctggggcaaacaggtcttcagcctggggatgactcctctgctcaaccagtcttcgcccaaggtggatgagggtgctgtcctgggcatcagccccctcagcaggcctctgcctcttgcctgcagcgatggggagaactggtggtgggtgccagtggtggcaccacttctgggtgcctctctaggtggcatcatctacctggtcttcattggctccaccatcccacgggagcccctgaaattggaggactctgtggcgtatgaagaccacgggataaccgtattgcccaagatgggatctcatgaacccatgatctctcccctcaccctcatctcctcagacccctcttccttagggctgccgcagtttgctgggggtccactccagaccctattcacttggtccctcccctacctggaggtgtcaccagtggaggctgcagaacagcaaggatggctgcctgctccttcctctagagagtgcactgcggtggagggaatctcccttgtccagaatgtccagacccttcagagccagcaggcaagaaagactaagtctgctgaaccacagagactgtggctgcccctccccacaggagttctgcccaggaagatcacagttctgtccataaacctctggctggagttggcgaaattcccacaagggggccccacccacaccaccagggtaaaacagccaactgaagccacagtgatagcaaccaccccttcccctgggaactcagtcatcttagacagtctccagtctgctgtcactggccacagcctgagcggtgatgagagtctgcacaattctgtgcttggcacccaaggccctggtggtgtgggctcacaaggggatctcttgatctgggataaaggatga

SEQ ID NO: 141349 - DNA, 1201 bp, Homo sapiens
ggcatttttgtcacctaccttcctgatcacatgacattgtggcggggcttcctgaatgaggcgtggctgaccgggatgctccagctgtgtctcttcgccatcacggaccaggagaacaacccagcactgccaggaacagaggcgctggtgataggcatcctcgtggtcatcatcggggtgtcccttggcatgaacacaggatatgccatcaacccgtcccgggacctgccccccccgcatcttcaccttcattgctggttggggcaaacaggtcttcaggtacttcccctgcccagggcccattcctttgagtttttctgtgggtcccctgtgtgttgaggggtggggggtgatgtgaggggcagttacagggagggtcctgctgaagcccccaggtaagcttggggaagcaggagtgagtcccaacattttccccagggcagtacagatacagatcctgcacctgcactgagtgtcaacgctgtccctgaatcgggctgaggctgaccagggccctgggttgggggtgtttcctggggtagcctggggatgactcctctgctcaacctgtcttggcccgaggtggatgagggtgctgtcctgggcatcagccccctcagcaggcctctgcctcttgcctgcagcaatggggagaactggtggtgggtgccagtggtggcacccacttctgggtgcctatctaggtggcatcatctacctggtcttcattggctccaccatcccacgggagcccctgaaattggaggattctgtggcgtatgaagaccacgggataaccgtattgcccaagatgggatctcatgaacccacgatctctcccctcacccccgtctctgtgagccctgccaacagatcttcagtccaccctgccccacccttacatgaatccatggccctagagcacttctaagcagagattatttgtgatcccatccatttccccataaaggtaggctttgtccgacagcagtacccccacttcctgggggcctcctgtggttgggcttccctcctgggttcttacaggagctccagggctatgtcttagcccaaggtgtagaggtgaggcacctcaagtctttcatgccctgggaactggggtgccccagggggagaatggggaagagatgacctgcgccctcagtaggaacaggggtgagatgaaagaacgactgaatgg

SEQ ID NO: 141350 - DNA, 601 bp, Homo sapiens
atgagtaaagctgtaagaaaaacagtggagccgaaacgactccccaacttaactccccataagctcattgaggacacagactttgttctcttcaccactgtttccccagcacttcgaacactacctggcacttgtatcagttctccctttccaacttggacgcggcagaacggctcctgcaaagaagggtggcgagaagcaaagggtcattctgccatcaatgaggtggtgatccaagaatacaccatcaacattcacaagcgcatccatggagtgcgcttcaagaagcgtgcccctcgggcactcagagagattccgaaatttgccatcaaagaggtggaaactctaagtgtgcgcattgatagcaggttcaacaaagctctctgcgccaaaggaataaggaatgtcccgtaccgaatccgtgtgcagttgtccagaaaacgtaatgaggatgaagattcaccaaataagcgctatactttggttacctatgtacctgttagcactttcaaaaatgtgcagacagtccatgtgcatgagaactaattgctgatcctcaaatacatcaaataaaggtataaaactgcaaaaaaaaaagtct

SEQ ID NO: 141351 - DNA, 743 bp, Homo sapiens
  misc_feature (1)...(743): n = a,t,c or g
tgtggcttcccagtggaggatgatcagaatggtccccgggggtaatgctggntcgcagttttctcacgtgctgactgaagggttttttgccgtggctcaacagctttcgaggcacatcttcagtaggataatatctaggcattttgcgaagtttaaccacccgggtaccgccgttcttgtcaccaccaactggttttgtaacagttgcgagaaccttctccttctttttctttccaacttggacgctgcagaatggctcccgcaaagaatgtgtggcgagaagaaaaaggggccgttctgctcatcaacgaaggggtaactccgagaatacaccatcaacattcacacagcgcatcccatggagtgggcttccaagaagcgtgcacctcgggcactcaaagagattcggaaatttgccatgaaggagatgggaactccagatgtgcgcattgacaccaggctcaacaaagctgtctgggccaaaggaataaggaatgtgccataccgaatccgtgtgcggctgtccagaaaaccgtaatgaggatgaagattcaccaaataagctatatactttggttacctatgtacctgtttaccactttcaaaagtaagttctccatcccataaagccatttaaattcattagaaaaatgtccttacctcttagaatgtgaattcatctgttaagctaggggtgacacacgtcattgtaccctttttaaattggtggtgtgggaagatgg

SEQ ID NO: 141352 - DNA, 429 bp, Homo sapiens
ttatcggatatttcgggaatgtgtgttctttttctcgcagctgatagaggccttttccctggacacatcccaaatggatataaccggcagaaaacccttggagcagccagtgtcccaggtcccccacggccgccacacagccctgagctccatacccgacaaggagacattgccctgtgtatgtgttgggggctgggggggagttgggctgtcagcggagatgcccttgggtggcacccgtccatatgggcttttcttttcagaagtctgcagagctgggtcagagaccatgtcagctctgggtgaaagtagtgcagaagaagcattgctgaacttcctggaacttgtggacagaacatctgccagggcagctgggagctgaaggaccaagaaaattaaaacccagtgacaagatgaatgaggatccct

SEQ ID NO: 141353 - DNA, 1314 bp, Homo sapiens
atgacccacctccgggctgggaagggaccccccaaggcccaggctaggtccaatcacggcaatcacctgaagccggacaggggcgccctgccttcccggggtatgcggaaggaaaaccccagtgacggggacccggcgacgcctaaggtgacccagaagggacaatatggcggcgcggccgcatggagggcctctcatcccgccccaagcaggttgacgccacggtacctgcaagccctgccatggcgccgccgccactgtcgccgtctgccgcagcctgcctccacctcagctcgccaccgacgccgcaggaagccggggagacgcccccttagtcttctagtcgagccggccgaggacccatcctgggatcgggctgtctaccgcaaacgcctgatcacaaggtccgaagtgggggctcatcctcgccccatttcccgtaaatatcagccacagaccacctttgaggactttgtatgcacttttacaaaactctgggagccccgagatcttcaagcccgaataatttttatcaggcgcagtgtggacagccccgaagcgcggccgggtcccctcatgcatatgcagcagattgtgatccttactccaattattccaggatttatatgtcagggtggtgacttcacatgccataatggcactggtggcaagtccatctgtggggagaaatctgatgatgagaacttcatcctaaagcatacaggtcctggcatcttgtccgtggtaaatgctggacccaacacaaacggttcccagtttgtcatctgcactgccaagactgagtggttggatggcaagcatgtagtctttggcaagcaggtcctgtctcttcctcaaggagattattactctttagaactcaattcatttggtcaccttgttgtcatagtaaagcctgagggtgagaccctcatgttttgtgcccttgtacctccctgctacaccctagtcctggacctggtggaagatgcagctaccaaggaagatattaatttgcctcctgggaagtggctgggggaagcaccaagagaaactggcaagcaaaacaggacccagaggctgaagtccttgcaccgagcacttgccaaggtggaggtgaaggcgctaaggttcagagagtttaagcagtttgcccaaggtcacacagcttgcacatggcctggaacttctgtggctgccacagatacagaaaacattgcccccaagtcctttgttataactgaacaccacttaacaacagaaaactatggctacccaaaaggatcagacgaaacctctcaaaggaccaaataa

SEQ ID NO: 141354 - DNA, 3129 bp, Homo sapiens
tcacccatgatcaaccccaccatgttcttcgacatcgccgtcgatggtgagcccttgaggtgtgtctcctttgagccttttgcagacaagtttccaaagacagcagaaaactttcatgctctgagcattggagagaaaggatttggttataagggttcctgctttcagataattattccagggtttatgtgtcagggtggtgacttcacacgccataatggcactggtagcaagtccatctacagggagaaatttgatgatgagaacttcatcctaatgcatacaggtcctggcatcttgtccatggcaaaggctggatccaacacaaacagttcccagtttttcatctgcactgccaagactgagtggttggatggcaagcatatggtctttggcaaggtgaaagaaggcattaatggccaggcgtggtggcttacacctgtaatcccagcactttgggaggataaggtgggtggatcacaagacaacaagatgtgcgaactcgatattttacacgactctctttaccaattctgccccgaattacacttaaaacgactcaacagcttaacgttggcttgccacgcattacttgactgtaaaactctcactcttaccgaacttggccgtaacctgccaaccaaagcgagaacaaaacataacatcaaacgaatcgaccgattgttaggtaatcgtcacctccacaaagagcgactcgctgtataccgttggcatgctagctttatctgttcgggcaatacgatgcccattgtacttgttgactggtctgatattcgtgagcaaaaacgacttatggtattgcgagcttcagtcgcactacacggtcgttctgttactctttatgagaaagcgttcccgctttcagagcaatgttcaaagaaagctcatgaccaatttctagccgaccttgcgagcattctaccgagtaacaccacaccgctcattgtcagtgatgctggctttaaagtgccatggtataaatccgttgagaagctggcgtcggcaaaggagccatgggttctagcaactaacttacctgttgaaattcgaacacccaaacaacttgttaatatctattcgaagcgaatgcagattgaagaaaccttccgagacttgaaaagtcctgcctacggactaggcctacgccatagccgaacgagcagctcagagcgttttgatatcatgctgctaatcgccctgatgcttcaactaacatgttggcttgcgggcgttcatgaacagaaacaagggcttaatgagtgtttgagcctccttttttatgggcctggttggccacattggatgttgccttatggctgtttagcaacaggagatcgctctggcctcattgaagttgtgagcacctctgaaacaattgctgacattcagctgaacagtagcaatgtggctgctgcagcagccttcaacaaagatgcccttctgaactggcttaaagaatacaactctggagacacacataggctcaaaataaaaggatggaggaagatctaccaagcaaatggaaaacacaaaaaggcaggggttgcaatcctagtctctgataaaacagactttaaaccaacaaagatcaaaagagacaaagaaggctatttcataatggtaaaaggatcaattcaacaagaagaactaactatcctaaatatatatgcacccaatacaggagcacccagattcataaagcaagtcctgagtgacctacaaagagacttagactcccacacattaataatgggagactttaacaccccactgtcaacattagacagatcaacgagacagaaagtcaacaaggatacccaggaattaaaatcagctctgcaccaagcagacctaatagacatctacagaactctccaccccaaatcaacagaatatacatttttttcagcaccacaccacacctattccaaaattgaccacatacttggaagtaaagctctcctcagcaaatgtaaaagaacagaaattataacaaactatctctcagaccacagggcaatcaaactagaactcagggttaagaaactcactcaaaaccgctcaactacatggaaactgaacaacctgctcctgaatgactactgggtacataacgaaatgaaggcagaaataaagatgttctttgaaaccaacgagaacaaagacacaacataccagaatctctgggatgcattcaaagcagtgtgtagagggaaatttatagcactaaatgcccacaagagaaagcaggaaagatccaaaattgacaccctaacatcacagttaaaagaactagaaaagcaagagcaaacacattcaaaagctagcagaaggcaagaaataactaaaatcagagcagaaatggaggaaatagagacacaaaaaaaccttcaaaaaattaatgaatccaggagctggttttttgaaaggatcaagaaaattgataaaccgctagcaagactaataaagaaaaaaagagagaagaatctaatagacgtaataaaaaattataaaggggatatcaccaccgatcccacagaaatacaaactaccatcagagaatactacaaacaccactacacaaataaactagaaaatctagaagaaatggataaattcctcgacacatacaccctcccaagactaaaccaggaagaagttgaatctctgaatagaccaataacaggatctgaaattgtggcaataatcaatagcttaccaaccaaaaagagtccaggaccagatggatttacagccgaattctaccagagtcaggcaccgtgtatgaaatctaacaatgcgctcatcgtcatcctcggcaccgtcaccctggatgctgtaggcataggcttggttatgccggtactgccgggcctcttgcgggatatcgtccattccgacagcatcgccagtcactatggcgtgctgctagcgctatatgcgttgatgcaatttctatgcgcacccgttctcggagcactgtccgaccgctttggccgccgcccagtcctgctcgcttcgctacttggagccactatcgactacgcgatcatggcgaccacacccgtcctgtggatctacccactagtcaattcaccatcttgttga

SEQ ID NO: 141355 - DNA, 856 bp, Homo sapiens
aaaccgtgtactattagccatggtcaaccccaccgtgttcttcgacattgccgtcgacggcgagcccttgggccgcgtctcctttgaggtaaggggcctggataccaagaagtgactgctcatctaatccataaagctatgttaacagattggagctgtttgcagacaagggtccgagaggcacagcatagttttcgttgctctgagccactggagagaaaggatttgggttataaggggttccctgctttcacagaattattccagggtttatgctgtcaggggtggtgacttcacacgccataaatggcacctggtggcaagtcccatctatggggaagaaatttgaaggatgagaacttcatccctaaagcatacgggtcctggcatcttgtcccatggcaaaatgctggaccccaacacaaatggttcccagtttttcatctgcactgcccaagactgcagtggttggatggcaaagcatgtggtgtttggcaaagtgaaagaaaggcatgaaatattgtgggaggccatgggagcgcttttgggtcccaggaatggcaagacccagcaagaagaatcaccaattgtgcctggtggacaactccgaataaagtttgaccttgtgttttattctttaaccaccaagatcattcccttctgtagcttcaaggagagcacccctccaccccatttgctcgcaagtatcctagaatctttgtgctctcgcttgcagttcccttttgggttccatgttttccttgttccctgccatgcctaggtggattaaaaagttcccctttatgattattgaaataaaaactaaataacaattgtcaaaaaaaaaaaaaaaaaa

SEQ ID NO: 141356 - DNA, 390 bp, Homo sapiens
agctgaggtggaggcaggctgcggtttacggcgactgtggcggcggcgccatggcagggcttgcaggatccctgctgccttggggatcccgggctgacagccagagagcacagcggctcacctcctggagagtgagggatgaagaaagcggagggcagccgactgcgcccgctggttcccattaggtcggctcctgcagcggagcccggcagccttggtgaaggccctgcccggcagagatcatgtattgcctccagtggctgctgcccgtcctcctcatccccaagcccctcaaccccgccctgtggatcagccactccatgttcatgggcttctacctgctcagcttcctcctggaacggaagccttgcacaatttgtgccttggttt

SEQ ID NO: 141357 - DNA, 1517 bp, Homo sapiens
cccaaaaaagcaactaaagcaacgcaactaaactgatggggacagaatgacaggcctctcacaaagctgggcaccctgccgtggaacccggggctgcagagatggtggtcgcgctcccagccccgtgcccccggctctgcctgtctcatcctgcaagggcgctgtccttggacaaggccagagccagcacccaggagtactatgacccacctccgggctgggaagggaccccccaaggcccaggctaggtccaatcacggcaatcacctgaagccggacaggggcgccctgccttcccggggtatgcggaaggattacaaacagtaacaagggacccggcgacgcctaaggtgacccagaagggacaatatggcggcgcggccgcatggagggcctctcatcccgccccaagcaggttgacgccacggtacctgcaagccctgccatggcgccgccgccactgtcgccgtctgccgcagcctgcctccacctcagctcgccaccgacgccgcaggaagccggggagacgcccccttagtcttctagtcgagccggccgaggacccatcctgggatcgggctgtctaccgcaaacgcctgatcacaaggtccgaagtgggggctcatcctcgccccatttcccgtaaatatcagccacagaccacctttgaggactttgtatgcacttttacaaaactctgggagccccgagatcttcaagcccgaataatttttatcaggcgcagtgtggacagccccgaagcgcggccgggtcccctcatgcatatgcagcagattgtgatccttactccaattattccaggatttatatgtcagggtggtgacttcacatgccataatggcactggtggcaagtccatctgtggggagaaatctgatgatgagaacttcatcctaaagcatacaggtcctggcatcttgtccgtggtaaatgctggacccaacacaaacggttcccagtttgtcatctgcactgccaagactgagtggttggatggcaagcatgtagtctttggcaagcaggtcctgtctcttcctcaaggagattattactctttagaactcaattcatttggtcaccttgttgtcatagtaaagcctgagggtgagaccctcatgttttgtgcccttgtacctccctgctacaccctagtcctggacctggtggaagatgcagctaccaaggaagatattaatttgcctcctgggaagtggctgggggaagcaccaagagaaactggcaagcaaaacaggacccagaggctgaagtccttgcaccgagcacttgccaaggtggaggtgaaggcgctaaggttcagagagtttaagcagtttgcccaaggtcacacagcttgcacatggcctggaacttctgtggctgccacagatacagaaaacattgcccccaagtcctttgttataactgaacaccacttaacaacagaaaactatggctacccaaaaggatcagacgaaacctctcaaaggaccaaataa

SEQ ID NO: 141358 - DNA, 875 bp, Homo sapiens
aaaccgtgtactattagccatggtcaaccccaccgtgttcttcgacattgccgtcgacggcgagcccttgggccgcgtctcctttgaggtaaggggcctggataccaagaagtgactgctcatctaatccataaagctatgttaacagattggagctgtttgcagacaagggtccgagaggcacagcatagttttcgtgcctctgaagcattgaagagaaaggatttgggttataaggggttccctgctttcacagaattattccagggtttatgctgtcaggggtggtgacttcacacgccataaatggcacctggtggcaagtcccatccaatggggaagaaatttgaaggatgagaacttcatccctaaagcataccgggtcctggcgatcttgtcccatggcaaatgcctggacccaaacacaaatggttcccagtttttcatctgcactgcccaagactgaagtggttggaatggcaaagcatgtggtgttttggcaaaagtgaaagaaaggcatgaaatattgtgggaggccatgggagcgctttggggtccagggaatggcaagacccagcaaagaaagatcaccatttgctgacttgttggacaacttcggaataaagttttgacttggtggttttaatctttaaccaaccaggattcattccttcctggaagccccagggagagcaccccctccaccccatttggctcggagtaatcctagaatctatgtggctctgcgctgcaagttcccttttgggttccatgttttccttgttccctcccatgcctaggtggattaaaaagttcccctttatgattattgaaataaaaactaaataacaattgtcaaaaaaaaaaaaaaaaaa

SEQ ID NO: 141359 - DNA, 387 bp, Homo sapiens
ctgtgcgtactgccacacgcagctcagcttgagcttacagccagaagcgagatgcttctctgctgagctgagtctgcctgcagcatggaccttggtcttccctgaagcatgtccagggctggagggacgactgccatgggctgagtctgggcccccggacccacgtgcaggcagggaccctccccaagcccacactctgggctgagccaggctctgtgatcacccaggggagtgcacgtgaccctctggtgtcaggggatcctgcagacccaggagtaccgtctgtatagagaaaagaaaacagcaccctggattacacggatcccacaggagattgtgaagaagggccatgatcccatcccatccatcacctgggaacacacaggg

SEQ ID NO: 141360 - DNA, 322 bp, Homo sapiens
atgacccccatcctcacggtcctgatctgtctcgggcacctccccaagcccaccctctgggctgaaccaggctctgtgatcacccaggggagtcctgtgaccctcaggtgtcaggggggccaggagacccaggagtaccgtctatatagagaaaagaaaacagcactctggattacacggatcccacaggagcttgtgaagaagggccagttccccatcccatccatcacctgggaacatgcagggcggtatcgctgttactatggtagcgacactgcaggccgctcagagagcagtgaccccctggagctggtggtgacag

SEQ ID NO: 141361 - DNA, 1317 bp, Homo sapiens
atgacccccatcctcacggtcctgatctgtctcgggctgagcctggaccccaggacccacgtgcaggcagggcccctccccaagcccaccctctgggctgagccaggctctgtgatcacccaagggagtcctgtgaccctcaggtgtcaggggagcctggagacgcaggagtaccatctatatagagaaaagaaaacagcactctggattacacggatcccacaggagcttgtgaagaagggccagttccccatcctatccatcacctgggaacatgcagggcggtattgctgtatctatggcagccacactgcaggcctctcagagagcagtgaccccctggagctggtggtgacaggagcctacagcaaacccaccctctcagctctgcccagccctgtggtgacctcaggagggaatgtgaccatccagtgtgactcacaggtggcatttgatggcttcattctgtgtgtttctaagaagccatcactctcagtgcagccgggtcctgtcgtggcccctggggagaagctgaccttccagtgtggctctgatgccggctacgacagatttgttctgtacaaggagtggggacgtgacttcctccagcgccctggccggcagccccaggctgggctctcccaggccaacttcaccctgggccctgtgagccgctcctacgggggccagtacacatgctccggtgcatacaacctctcctccgagtggtcggcccccagcgaccccctggacatcctgatcacaggacagatccgtgccagacccttcctctccgtgcggccgggccccacagtggcctcaggagagaacgtgaccctgctgtgtcagtcacagggagggatgcacactttccttttgaccaaggagggggcagctgattccccgctgcgtctaaaatcaaagcgccaatctcataagtaccaggctgaattccccatgagtcctgtgacctcggcccacgcggggacctacaggtgctacggctcactcagctccaacccctacctgctgactcaccccagtgaccccctggagctcgtggtctcaggagcagctgagaccctcagcccaccacaaaacaagtccgactccaaggctggtgagtgaggagatgcttgccgtgatgacgctgggcacagagggtcaggtcctgtcaagaggagctgggtgtcctgggtggacatttgaagaattatattcattccaacttgaagaattattcaacacctttaacaatgtatatgtgaagtactttattctttcatattttaaaaataaaagataattatccatgag

SEQ ID NO: 141362 - DNA, 1422 bp, Homo sapiens
atgacccccatcctcacggtcctgatctgtctcgggctgagcctggaccccaggacccacgtgcaggcagggcccctccccaagcccaccctctgggctgagccaggctctgtgatcacccaagggagtcctgtgaccctcaggtgtcaggggagcctggagacgcaggagtaccatctatatagagaaaagaaaacagcactctggattacacggatcccacaggagcttgtgaagaagggccagttccccatcctatccatcacctgggaacatgcagggcggtattgctgtatctatggcagccacactgcaggcctctcagagagcagtgaccccctggagctggtggtgacaggagcctacagcaaacccaccctctcagctctgcccagccctgtggtgacctcaggagggaatgtgaccatccagtgtgactcacaggtggcatttgatggcttcattctgtgtaaggaaggagaagatgaacacccacaatgcctgaactcccattcccatgcccgtgggtcatcccgggccatcttctccgtgggccccgtgagcccaagtcgcaggtggtcgtacaggtgctatggttatgactcgcgcgctccctatgtgtggtctctacccagtgatctcctggggctcctggtcccagccgggtcctgtcgtggccctggggagaagctgaccttccagtgtggctctgatgccggctacgacagatttgttctgtacaaggagtggggacgtgacttcctccagcgccctggccggcagccccaggctgggctctcccaggccaacttcaccctgggccctgtgagccgctcctacgggggccagtacacatgctccggtgcatacaacctctcctccgagtggtcggcccccagcgaccccctggacatcctgatcacaggacagatccgtgccagacccttcctctccgtgcggccgggccccacagtggcctcaggagagaacgtgaccctgctgtgtcagtcacagggagggatgcacactttccttttgaccaaggagggggcagctgattccccgctgcgtctaaaatcaaagcgccaatctcataagtaccaggctgaattccccatgagtcctgtgacctcggcccacgcggggacctacaggtgctacggctcactcagctccaacccctacctgctgactcaccccagtgaccccctggagctcgtggtctcagacgcagtagcgaacagcagctgggtgtcctctaagtcagctctggtgctgtctacccagagacagtcccggatcccacagattgaaggcccattccccaaaactgcccccaacaccattcccaagtccagacctccagaacttctgactgactggcttcaagttggggatcccatgccccactcttcggtttga

SEQ ID NO: 141363 - DNA, 1830 bp, Homo sapiens
cactgccacacacagctcagcctgggctgcacagccaggtgtcaggtgcgtctctgctgatctgagtccaccctgcagcatggacctgcatcttccctgaaggatctccagggctggagggacgactgccatgccctacaggaaagacagccaggctcctgggagggcagttccacttcctgtgtggctgcagatgacaaaaccccatgagaagaaggaccgagcctccaagtgtccacaccctgtgtgtcctctgtcctgccagcaccgagggctcatccatccacaaagaactgtgcaggagccgctacgacatgacaccgagagtcataggactgatctgtctcgggctgagcctggaccccaggacccacgtgcaggcagggcccctccccaagcccaccctctgggctgagccaggctctgtgatcacccaagggagtcctgtgaccctcaggtgtcaggggagcctggagacgcaggagtaccatctatatagagaaaagaaaacagcactctggattacacggatcccacaggagcttgtgaagaagggccagttccccatcctatccatcacctgggaacatgcagggcggtattgctgtatctatggcagccacactgcaggcctctcagagagcagtgaccccctggagctggtggtgacaggagcctacagcaaacccaccctctcagctctgcccagccctgtggtgacctcaggagggaatgtgaccatccagtgtgactcacaggtggcatttgatggcttcattctgtgtaaggaaggagaagatgaacacccacaatgcctgaactcccattcccatgcccgtgggtcatcccgggccatcttctccgtgggccccgtgagcccaagtcgcaggtggtcgtacaggtgctatggttatgactcgcgcgctccctatgtgtggtctctacccagtgatctcctggggctcctggtcccaggtgttcctaagaagccatcactctcagtgcagccgggtcctgtcgtggcccctggggagaagctgaccttccagtgtggctctgatgccggctacgacagatttgttctgtacaaggagtggggacgtgacttcctccagcgccctggccggcagccccaggctgggctctcccaggccaacttcaccctgggccctgtgagccgctcctacgggggccagtacacatgctccggtgcatacaacctctcctccgagtggtcggcccccagcgaccccctggacatcctgatcacaggacagatccgtgccagacccttcctctccgtgcggccgggccccacagtggcctcaggagagaacgtgaccctgctgtgtcagtcacagggagggatgcacactttccttttgaccaaggagggggcagctgattccccgctgcgtctaaaattaaagcgccaatctcataagtaccaggctgaattccccatgagtcctgtgacctcggcccacgcggggacctacaggtgctacggctcactcagctccaacccctacctgctgactcaccccagtgaccccctggagctcgtggtctcaggagcagctgagaccctcagcccaccacaaaacaagtccgactccaaggctggtgagtgaggagatgcttgccgtgatgacgctgggcacagagggtcaggtcctgtcaagaggagctgggtgtcctgggtggacatttgaagaattatattcattccaacttgaagaattattcaacacctttaacaatgtatatgtgaagtactttattctttcatattttaaaaataaaagataattatccatgagaaagcta

SEQ ID NO: 141364 - DNA, 216 bp, Homo sapiens
atcttgatccttctcatgcagctgcctctctggcgctgtctcctctgcctctttgccacttacaaggatgcttgtgattacactgggtctacctggaaatggctggtgacagaaaagtcctcagggccacagcactctctgcggtgggaattcaggtgccttgcctgatggtgacaaggctggttttgcataaacagctctctgcggacgcgtggg

SEQ ID NO: 141365 - DNA, 492 bp, Homo sapiens
atgtcgttggagagcaagcaattcctgacggagctgaccagactctaccagaagtgccggacgttgggcagcgtctatatcaccttgaagaagtatgatggtcgaaccaaacccattccaaagaaaggttctgtggagggctttgagccctcagacaacaagtgtctgttaagagctatcgatgggaaaaagaagatgagcactgtggtgaactccaaggaagtgagtggcctctcaaagccttgctgggaaggaggctttaaggtggtgggggcagcagtgctggtggtggtcatcgaagaaagtgggagtcggggaggaagcaatggggagcaggggacaaagagggccagacaaactcagagcttcagtgaacacatttaccacaacctggaaatggctggtgacagaaaagtcctcaggggccacaacactctctgcggtgggaattcaggtgccttgcctgatggtgacaaagctggttttgcataa

SEQ ID NO: 141366 - DNA, 544 bp, Homo sapiens
cactgctaggggcttaagcggagggagtcgagccagggtcgccgcgagtggtgttgttggagagcgagcagttcctgacggagctgaccagacttttccagaagtgccggacgtcgggcagcgtctatatcaccttgaagaagtatgacggtcgaaccaaacccattccaaagaaaggtactgtggagggctttgagcccgcaagacaacaagtgtctgttaagagctaccgatgggaagaagaagatcagcactgtggtgagctccaaggaagtgaattaagttttcagatggcttatttcaaaccttcctttaggagctaacatggatgggttgaagaagagagacaaaaagaacaaaactaagaagaccaaagcagcagcagcagcagcagcagctggtcctgccgcagcagcaacagcagcaacaacagcagcaacaacagcagcaacagcagcacagtaaagggcatacatttcctgctttcaccaattaaccactgaattgctattttttcttttgccagataactaagtttgttccc

SEQ ID NO: 141367 - DNA, 1245 bp, Homo sapiens
atgcgatatgcccagattatagaaatacttccattaacttacggaagtaatgatctgaaggacacagtgtatagaaagaaggctagagaggttttacaagatgaattagaaaaccgttctaatcaggtgcgatgtgcagagaaaaaattacaacacaaagaattggagtcacaggaacaggtcaagaagtgtgtgcagccagaaccaacttcaagatggctgcagcagtgccaggcattctgcccagatctgcactattcggaggcagaaaagggctgccagtttctagggcctaatgaaggagcaaatgccattgactttccatgggcagagaaaagcaacgagcaaaggaaacacaagcacagcacacttgcccatcgtgtgccaagtcaaagagatgaaaatgcctcctcggatgggagcatggatttgttcatgtcaaatcagcagatctgcaccctccctgacatcaccacagagcaggggcccccaacatccagatgtccagatggacacagtggcaaaaccccacacaacaagaaagaagaattagagaaaaaacaagaaccatcctgttgtgagaaaaagcacagggcattggtgaatgaattggaagaaagcaaacatgtctggtattccagaggccagagactgttcatggtgctgtggctcaagggagtcaccttcaatgtcaccatcattgacaccaagaggcagaccaagatagtgcaaaagctgtgcccaggagggcagctcccattcctgctgtatggcatggaagaacacaaggacaccaacaagattgaggaatttctgtaccccaagctggcagctctgaaccctgaatccaacacagctgagcaggacatatttgccaaattttctgcttacatcaagaattcaaacccagtagtcaatgacaatctggagaagggactcctgaaagccctgaaggttttagacaatcacttgatatcctgccactcagaagaagtggatgaaaccagtgctgaagatgaaggcatctctcagaggaagtttctggatggcaatgagctcaccctggctgactgcaacctgttgctaacgctccacatagtacaagtgggattcaccatccctgaggccttccagggcgtgcagcagtacttgagcaatgcctatgctcaggaagaatctgcctccacctgtccagatgatgagatcaagctcacctatgagcaaggatccaaggccctccaataa

SEQ ID NO: 141368 - DNA, 1221 bp, Homo sapiens
  misc_feature (1)...(1221): n = a,t,c or g
ccgggagaggaccgagctggaggagctgggtgtggggtgcgttgggctggtggggaggcctagtttgggtgcaagtaggtctgattgagcttgtgttgtgctgaagggacagccctgggtctaggggagagagtccctgagtgtgagacccgccttccccggtcccagcccctcccagttcccccagggacggccacttcctggtccccgacgcaaccatggctgaagaacaaccgcaggtcgaattgttcgtgaaggctggcagtgatggggccaagattgggaactgcccattctcccagagactgttcatggtactgtggctcaagggagtcaccttcaatgttaccaccgttgacaccaaaaggcggaccgagacagtgcagaagctgtgcccagggggggagctcccattcctgctgtatggcactgaagtgcacacagacaccaacaagattgaggaatttctggaggcagtgctgtgccctcccaggtaccccaagctggcagctctgaaccctgagtccaacacagctgggctggacatatttgccaaattttctgcctacatcaagaattcaaacccaggcactcaattgacaatctggaagaagggactcctggaaagccctgaaggtttttagacaattacttaacatcccccctcccagaagaagtggatgaaaccacgtgctgaagatgaacggtgtctctcagacggaacgtttttggatggcaacgagctcaccctggctgactgcaacctgttgccaaaagttacacatagtacaggtggtgtgtaagaagtaccggggatttcaccatcccccgaggcctttccggggagttgcattcggttacttgaggcaatgccttacgcccgggaagantttcggtttccacctgttccagatgatgaggagatcgagctcgcctatgagcaagtggcaaaggccctcaaataagcccctcctgggactccctcaaccccctccattttctccacaaaggccctggtggtttccacattgctacccaatggacacactccaaaatggccagtgggcagggaatcctggagcacttgttccgggatggtgtggtggaagaggggatgagggaaagaaatggggggcctgggtcagatttttattgtggggtgggatgagtaggacaacatatttcagtaataaaatacagaataaaaatcaagtgttttta

SEQ ID NO: 141369 - DNA, 936 bp, Homo sapiens
atggagctgacggtgccgctgaagcaggaggccgagggcctggcgctgggctcctcgtggcaccgcttccgccgcttccacctgggcgaggcgccgggcccgcacgaggcgctggggctgctacgcgccctgtgccgggaccggctgcggcccgaggtgcacaccaaggagcagatgctggagctgctggtgctggagcagtttctgagcgcgctgccagccgacacgcaggcctgggtgtgcagccgtcagccgctaagctgggaggaggcggtggccctgctggaagagttctggggagtgttgccagccagggaccctcctcagatcttggtgtcccgggttcttactggggactcctccccgatctgtgtggctgacctcagcctccagccccggaagctcaaggataccacctggcccaaactccaccccaaatccatcttgctgtcgggctggcctgagggccccaggcagtcagaccctcctcatgcgcgagacaccaagggctcagagatgacttcccgagggcggagggcaaaagccaggcctctctctgggcagcacctctgtgctgactctggcttctctatcctcaccctccttccgggtcagtgttccctaaagtgggttgtaacaaatcaccacaaacccagcagcttacaaataacgcacatctgttatcgttctggagttaagggcaagattcttgccaagagaattaatgtgtgtattgagcacattaagcactctaagagccgagatagcttcctgaaacatgtgaaggaaaatgatcagaaaaagaaagaagccaaagagaaagctacctgggttcaactgaagcagcagcctctacccagagaagcacactttgtgagaaccaatgggaaggagtctgagctgctggaacctcttccctacaaattcatagcataa

SEQ ID NO: 141370 - DNA, 641 bp, Homo sapiens
atccttaattaaattaatcccccccccccgccctttcggccggaaccgccatcttccagtaattcgccaaaatgacggaccacaaaggggaaagaggagaggcaacccgatatatgttctctaggccttttaagaaaacaatgggagttgttccttgtggccacaataattagcgattctataagcaaaggtgatattgtagacactcaagggaatggggtactgtgtccaaaacggaatgcccccacaagtgttacccatggccaaaactggaaggagtcttacaattgttaccccagcatgcttgttgccattgttgtaaaccaaccagttttagggcaaagttttttcccaagagaattaatgtgcgtattgagcacattaagcacttctaagagccgagatagcttcctgaaacgtgtgaaggaaaatgatcagaaaaagaaagaagcccaagaagaaggtaccttgggttcaactaaagcgccagcctgctccacccagagaagcacactttgtgaagaaccaatgggaaggagcctgagcttgctggaacctattccctatgaatttcatggcattaataggtgcccaaaaaaaaaaataaaggacctttgggctacaaaaaaaaaaaaaaaaaa

SEQ ID NO: 141371 - DNA, 393 bp, Homo sapiens
atggcatccagagtgaagaatatagaggaaataggagactatcgacatgaccccaatatgatgaaactgacaccagacaagtgcattgtccaggcagtggaatttctgattccaggaccccccttcagacagctcaacaacccaccttcagacacagggctgcagaccgtcattcctgagcagcaacccttggcattgcacctcaaagggaacagagagggagtggatgccagtaagaacaaaggcatcacgtggggagaggataccctgatggagtatttggagactcccaagaagtacatccctggaacaaaagtgatctttgccggcattaagaagaagacagaaagggcagacttgatagcttatctcaaaaaagctactattgagtaa

SEQ ID NO: 141372 - DNA, 1300 bp, Homo sapiens
ggcgggggaattcggcacgagccggcttcggagcggtagtgttcgttgagccagcgacttaaaaagagaattaaatatggggtgatgttgagaaaggcaagaagaatttttataatggagtgttcccagtgccacaccgttgaaaagggaggcaagcacaagactgggccaaatctccatggtctctttgggcggaagacaggtcaggccccctgggatactccttacacagccgccaataagaacaaaggcatcatctggggagaggatacactgatggagtatttggagaatcccaagaaagtacatcccttggaacaaaaatgatctttgtccggcattaagaagaaggaagaaagggcagacttaatagcttatctcaaaaaaagctactaatggagtaataatttggccactggccttattttattacaaaacagaaatgtctccatgactttttttatgtgttaccatccttttaattagatctccatacaccaggatttcaggttcatggaatggactggacaggatattttgttggggcagtcctggattttaaaacttaaggactgggcttggtggggttaaaatggaatatggttccagtttttgaattttaatagtaactccaattcagtaaatggtatcactcgtttaccccttttaaagatatgattagacttcgttagtaatgttcaacttttcacaaagatgggtgagtgccatcttaaaacttactggagattggttttatatttagatttatataactggttatgtgaatatatttaaatactggggaaattgcttcactgtcttagaaccaagcaagattcacctgtgttttgtgttcatgttcatttgcctcttaaaggcaagggttgaagataaataaggtagcaatgtctatagttttggccttaactatgccaatctaattataattccctgtatttaaaatggtttcttttacttattgaaaggcattttagtgtggtttatgtgtaatattaaagattattcaacacctctcacatcttacagatctataaggtcacatgcttttaaaatagtagcaagttaaacttcactcttgaattctttacaatctaagtcaaactaagcttataatttaggattgtctttaaacaggattcagaaacaaaactgtagaactgtgtatttgattgggaatggtgcttttgccaacttaaaaggattaaagctaacggagatatacacaaattttaaaattatgtgtgatcacaagactaaagataattaaaaagaaaaccac

SEQ ID NO: 141373 - DNA, 529 bp, Homo sapiens
tgagcggcagacccggcacgcaggtggggtccggcggggtccgaggccaaagctgcagagagacaaggcggcggcggctgctgtgctgggtgcagtgaggaagaggccctcggtggtgcccatggctggccaggatcctgcgctgagcacgagtcacccgttctacgacgtggccagacatggcattctgcaggtggcaggggatgaccgctttggaagacgtgttgtcacgttcagctgctgccggatgccgccctcccacgagctggaccaccagcggtctgctggagtatttgaagtacacactggaccaatacgttgagaacgattataccatcgtctatttccactacgggctgaaacagccggaacaagccttccctgggctggctccagagcgcatacaaggagttcgataggaagtacaagaagaacttgaaggccctctacgtggtgcaccccaccagcttcatcaaggtcctgtggaacatcttgaagcccctcatcagtcacaagtttgggaagaaag

SEQ ID NO: 141374 - DNA, 1455 bp, Homo sapiens
ctcccaaagttcttggattgcaagcatgagctactgcgcccggccggtggagcgtgtccgggctggactttgaggagctggccggcatagctaatgtatgttctccctccagcctcggcttaagacaacaggtcactgtctcagttctggaggccaccagtccaaagtcaaggtgtctgcagagctgcactttcccgaactggctcagaatttggagctggaggttcaaggttaagtccacaccttgctgccagttagcaagtcactctccctctctgagccttagttgccacccctgcccatggctggccaggatcctgcgctgagcacgagtcacccgttctacgacgtggccagacatggcattctgcaggtggcaggtagggccccagctgggcagtctgcaggaccatgggcagagcagccttcctctcggcaactttgaggcggcaacagcttttctgcagaggtggggtttagtgggaaggggtgtagagtcagcaaggaggcgggagagcattccaggtggaagctcaggtccgtgtgtgggggccgcctctccccgcagctgtccgtgtgtggggggcgcctctccccgcagctgtccgtgtgtgggggccgcctctccccgcagctgtccgtgtgtgggggccgcctctccccgcagctgtccgtgtgtgggggccgcctctccccgcagctgtccgtgtgtgggggccgcctctccccgcagctgtccgtgtgtgggggccgcctctccccgcagctgtgtgggggcacctctccccgcagctgtccatgtgtgaggggcacctctccccgcagctgtccatgtggtgatggatgctcactcagcaggtgtcgcctccgaggaacgctgctgcctgtgcctcccagctcgggcgaccaccagcggctgctggagtaagtgttctgccccctctctttctgtccctgtctctccatgttgcttgtccccatcccttcaccccttgagcgcctactgtatgtgagactttggatagatagtcactgtatcagggcccacctgtgaactgaggaaatcacccctgtggtaccagtgctgctgctgcacggcgagacctgcaggattcatggggcgagcttggatcctggtgctgattaccccagacagtgaggctggctttccccaggaggtgctcaccccagtgaggagccgatgccagcctgcagcccactcttgaacagccggaacaagccttccctgggctggctccagagcgcatacaaggagttcgataggaagtacgtgcccgcaagccttcagggacgtgggtgtgggctgcttgtggcaggaggaggcattgtggccacaaggggtcgcagagtgtgcagtgggagccaggtaagatgtgccagtggtcgatggatgaaatctagccggggagttggaatctgtgttgccagcagtga

SEQ ID NO: 141375 - DNA, 362 bp, Homo sapiens
cggccgcgtcgacttcacccaggccctggaccgccaaacagctactcagctgcttaagctggcccacaagtacagaccacctgtccttcgagcaggagttaacaccgtcaccaccttggtggagaacaagaaagctcagctggtggtgattgcacacgacgtggatcccatcgagctggttgtcttcttgcctgccctgtgtcgtaaaatgggggtcccttactgcattatcaagggaaaggcaagactgggacgtctagtccacaggaagacctgcaccactgtcgccttcacacaggtgaactcggaagacaaaggcgctttggctaagctggtggaagctatcaggaccaattacaatg

SEQ ID NO: 141376 - DNA, 365 bp, Homo sapiens; identical to SEQ ID NO: 118339

SEQ ID NO: 141377 - DNA, 432 bp, Homo sapiens; identical to SEQ ID NO: 118340

SEQ ID NO: 141378 - DNA, 376 bp, Homo sapiens; identical to SEQ ID NO: 118341
  misc_feature (1)...(376): n = a,t,c or g

SEQ ID NO: 141379 - DNA, 1548 bp, Homo sapiens
atgactgcccccagagagtcctcggactcacctggccagctcctcggctggctgctgtcacgtctactgcgctatctctccatcagaaatgccctggagaatggaggtgagaacctcagcgggattctctccacctcccagcatctgagcaacatggctggaaaccatggctggattccccctaaatccagtccgtcacgatcagcagaaatctccaaaacattcaacttggtacccaatgcctcctggcggttcctccatgaatggagcaaagggcccaggaagcaatggcctagaatccagcgtccagagctgtgtgcagcctctccgacaaccaagacagaaaggaaaacctcaggagaaaaatcagccgggaggtggagcaccgtggagaggcgaccaagaccggccacccacgtgacagatgaacgggtgactcctcagctgggaggcccgccagaggaagtggagccggagggcaaaccactccatcaaggtgaggaggtgggtgcagcccctgggtctgtacgcattcaccctgcaagctacgcttccctctcccaggaggccctggtaagcgtgatcagcagcttacatggtaccgagcgctgctcactgccactctccaatccttccagaatccgctctctgtccttgttactctgcttgtttcgggggcagaacctgagctcagggagggtcactgactgctcccgacatgatcgggttccaagtgtgattcacgggttccaccatggcctgccatggaagcttcctttgcttcctggggtccccttagaccagctgagaaaaacttcagatgaaagtgggtgctcagacgcggctgcctgcacagcactgtggccacctccacactctatggaaacttctgggcaccagtacgtcagagttctgggctctgtgttaaggaggaaggcccttttccggcgtcttctgcagctgagcccaggggcagtgtcctgggccatgtggccagcagggaaacaagccgccaatactctatgccccagtttctccatctacaaatgcaatcaaatatggggctatttccagcaacaggaccagggttgtgtggggctgtcgcatgatgggctggccgcaggagttaacagtgtcaccacctcggtggagaacaagaaagctcagctggtgctgattgcacacgacgtggagcccattgagccagttgtcttcctgcctgccttgtgtcgtaaaatgggagtcccttactgcattatcaaggggaaggcaagactgggccgtctagtccacagggagatctgtacgactgtcgccttcacacaggtgaactcggaagacaaaggtgctttggctaagctggtagcagctatcaggaccgattataatgacagatatgatgagatccgccgtcaccggggcagcaatgtcctgggtcccaagtctgtggctcacattgccaaacgcaaaaaggcaaaggctaaagaacttgccactaaactgggttatatgtacactgttgagttttccgtacataaaaataattaa

SEQ ID NO: 141380 - DNA, 1060 bp, Homo sapiens
  misc_feature (1)...(1060): n = a,t,c or g
gccgaaaggaaagaaggccaagggaaagaaggtggctccggccccagctgtcgtgaagaagcaggaggctaagaaagtggtgaatcccctgtttgagaaaaggcctaagaattttggcattggacaggacatccagcccaaaagagacctcacccgctttgtgaaatggccccgctatatcaggttgcagcggcagagagccatcctctataagcggctgaaagtgcctcctgcgattaaccagttcacccaggccctggaccgccaaacagctactcagctgcttaagctggcccacaagtacagaccagagacaaagcaagagaagaagcagagactgttggcccgggccgagaagaaggctgctggcaaaggggacgtcccaacgaagagaccacctgtccttcgagcaggagttaacaccgtcaccaccttggtggagaacaagaaagctcagctggtggtgattgcacacgacgtggatcccatcgagctggttgtcttcttgcctgccctggtgtcgtaaaatgggggtcccttactgcattatcaagggaaaggcaagactgggacgtctagtccacaggaagacctgcaccactgtcgccttcacacaggtgaactcggaagacaaaggcgctttggctaagctggtggaagctatcaggaccaattacaatgacagatacgatgagatccgccgtcactggggtggcaatgtcctgggtcctaagtctgtggctcgtatcgccaagctcgaaaaggcaaaggctaaagaacttgccactaaactgggttaaatgtacactgttgagttttctgtacataaaaataattgaaataatacaaattttccttcnnnnnnnnnnnnnggggggcccctttaaaaagaaaaaattttaatacccgggggtgggaaaggaaaacttttttttagggggccccaaaataaatttccggggccgggttttaaaaacgggggagggggaaaaacccgggggtacccaaattaaaaccccttggaaaaaaaanngnnnnggcccaccgaggatggagaacc

SEQ ID NO: 141381 - DNA, 1134 bp, Homo sapiens; identical to SEQ ID NO: 125989

SEQ ID NO: 141382 - DNA, 1896 bp, Homo sapiens; identical to SEQ ID NO: 125985

SEQ ID NO: 141383 - DNA, 1137 bp, Homo sapiens
atgaaggtgaggaaaaaccagcacagaaacgctgaaaattccaaataccagaatgcttcttctcctccaaatgatcgcaactcctctccagcaagggcacaaaactggatggagaatgagactgacaaattgacagaagtaggtttcggaagccaatgcaaggaagctaagaaccttgataaaaggttacaggaagtgctaactagagtaacgagtttagagagaaacataaatgacgttatggagctgaaaaacacagcacgagaactttgtgaaccatacacaagtatcaatagccaagctgataaagtggaagaacggatatctgagattaaagatcaacttactgaaataaggattccctctggggaatacaagttgaaacatttaccaggagcattgacacagaaggagcttctggtgatctattcactctatatatacacgacttgttcagctgaagtacgaggctgtacaaaactacttcaggaatataccaggaaagccaagagaatccatagacatcctgaggaaagtggattgctcctacaggacctgggagacaaccaaaacactgtgctggtattcacagctaagagacgtgaagacgcctaccaaatgagaaagaaccagaaaagcaattctagtcatatgaagaaacaaggttccttaacatgccccaagaattacactagctcaccagcaatagatccaaaccaagaagaaatctttgatttacctgaaaaagaattcagaaggtcaattattaagctaatcatggaggcaccagaaagaggcatgaggaaaggtccaggtggatataatcttcaaacatcatcattcattagcctcatagtctctagcataggcagttaccacaagagtcaggacattctaggcaatttaaaaacaaagaaagaagtaaaagcagaagaaggaagaggaggaggaggaggaggaggaggaggaggaaaaggaggaggaggaagaggagggggaaaaggaaggaaggaagaagaagaagaggaagaagaagaagaagaagaagaagaagaagaagaagaagaagaagaagaagaagaagaagaagaaagaggaggaggaggaggtggaaagaaaaaatcagctcatgaatga

SEQ ID NO: 141384 - DNA, 531 bp, Homo sapiens
gacattcaccccatttccccacatttccttcttccctgtttctcaccctgaccacacttagtttattgatggcagttccaccaggcctaatcgccacacaccagcaaaagcaggctatgctatagtacaagccactagcccgcctctcagaacctctcgtttcctttccatcggggaaatctatcctcaaggaaataacttctcagtggtccatcagctattctactactcctcagggattcttcaggccccctcccttccctacacatcaagctcagggatttgcccccacccaggactggcaaattagctttactcaacgtgccctgagtgagataactaaaatacctcttagtctaggtaggtactttcactggataggtagaggcctttcctacagggtctgagaaggccaccgcagtcatttcttcccttctgtcagacataattcctcagtttagccttcagcacctcaatagagtctgataacagatgagcctttattagtcaaatcaggcaagcagtttttca

SEQ ID NO: 141385 - DNA, 578 bp, Homo sapiens
atggattcagagggtgcaagccccaaaccttggcatcttccacattgtgttgggcctgtggatgcacagaagtcaggaactgaggtttggaaacctctgcctagttcagaggatgtatggaaatgcctgaatatcaaggcagacatttgctgcagggagacaaaggagacacgttttatccgtggacccaaaactctggcaccggtcacggactgggaaggcagccttcccttggtgtttaatcattgcagggatgcctctctgattattcacccacgtttcaaaggtgtcagaccacacagggacgcctgccttggtccttcacccttagtggcaagtcccgcttttctggggaaggggcaagtaccccaaccccttctctccgtgtctataccccttctctgctcttctggggcaggagcaagaacccctcaaccccttctccttcacccttagaggcaagtcccgcttttgtagggggcaagaacccccaatcccttatttccatgcccccaccctttctctgcttttgtgaagggcaagaaaaaaaaaccccttctccgtgtctatactctttt

SEQ ID NO: 141386 - DNA, 997 bp, Homo sapiens
atgggggctgtctgtgaagccttgcagcagtacagcccaggtaatttgctgagcctaactggtgtcaggggggcttccgaggcgatcaggcagtgtcagtcttcagccgctaagctgagaagatctgggaaggagtcagtcagagagccttgggccagagttccaggggctctgggagtggctgccagccttggctgtgatgagaggaaagagcatgagcacatgaatctggccatcagagcctgcctgcaaccaggtgaaataaacagccatgttgctcacacaaagcctgtttggtggtctcttcacatggacgtgcatgaaatttggtgccaagacccgggacttggatcaggggacttcccttgggagatcactcccctgtcctcctactctttgctccatgagaaagatccacctacgacctcaggtcctcagaccgaccagcccaagaaacatctcaccaatttcaaatccgggagagacaaaggagacacgttttatccgtggacccaaaactccggcgccggtcacggactgggaaggcagccttcccttggtgtttaatcattgcagggacgcctctctgattatacacccacgtttcaagggtgtcagaccacgcagggatgcctgccttggtccttcacccttagcggcaagtcccacttttctggggaaggggcaacacgctttaaaaggattaaagcctgttatcactcgcctgctacagcatgggcttctaaaacctataaactctcctttcccttcccccattttacctgtcctaaaaccagacaaggcttacaagttagttcagaatctgcgccttatcaaccaaattgttttgcctatccaccctgtggtgccaaacccatacactctcctatcctcaatacctccttctactacccattattctgttctggatctcaaacatgctttctttactattcctttgcacccttcatcccagcctctctttgccttcacttag

SEQ ID NO: 141387 - DNA, 1863 bp, Homo sapiens
atgaaggtgaggaaaaaccagcacagaaacgctgaaaattccaaataccagaatgcttcttctcctccaaatgatcgcaactcctctccagcaagggcacaaaactggatggagaatgagactgacaaattgacagaagtaggtttcggaagccaatgcaaggaagctaagaaccttgataaaaggttacaggaagtgctaactagagtaacgagtttagagagaaacataaatgacgttatggagctgaaaaacacagcacgagaactttgtgaaccatacacaagtatcaatagccaagctgataaagtggaagaacggatatctgagattaaagatcaacttactgaaataaggattccctctggggaatacaagttgaaacatttaccaggagcattgacacagaaggagcttctggtgatctattcactctatatatacacgacttgttcagctgaagtacgaggctgtacaaaactacttcaggaatatactaggaaagccaagagaatccatagacaccctgaagaaagtggattgctcctacaggacctgggagacaaccaaaacactgtgctggtattcacagctgagagacctgaagatgaactacttcaggaatataccaggaaagccaagagaatccatagacatcctgaggaaagtggattgctcctacaggacctgggagacaaccaaaacattgtgctggtattcacagctaagagacgtgaagacgcctaccaaatgagaaagaaccagaaaagcaattctagtcatatgaagaaacaaggttccttaacatgccccaagaattacactagctcaccagcaatagatccaaaccaagaagaaatctttgatttacctgaaaaagaattcagaaggtcaattattaagctaatcatggaggcaccagaaagaggcatgaggaaaggtccaggtggatataatcttcaaacatcatcattcattagcctcatagtctctagcataggcagttaccacaagagtcaggacattctaggcaatttaaaaacaaagaaagaagtaaaagcagaagaaggaagaggaggaggaggaggaggaaaaggaggaggaggaagaggagggggaaaaggaaggaaggaagaagaagaagaggaagaagaagaagaagaagaagaagaagaagaagaagaagaaagaggaggaggaggagagtgtactcctactttggaaaagaaattagttgtagaagagtctcaggcatgtccttcaggaggtgtttcagaagacggcattgttatcataagagatgacagcttcatgcatactattgcctctgaagatcttccaagacaaaggagacacgttttatccatggacccaaaactccagcgctggtcacggactagggaaggcagcctttccttggtgtttaatcattgcagggacgcctctctgattattcacctatgtttcaaaggtgtcagaagacacagggatgcctgccttggtccttcacccttagcggcaagtcccgcttttctggggaaggggcaaggattattcaggccccctcccttccctacacatcaagctcgaggatttgctcccacccaggactggcaaattagctttactcaacatgtccggagtcagataactaaaatacctcttagtctaggtagacactttcactggacagcaatgcaagaatggactcacgcagaaaattggtacaaggagtgggacattgtaacaaagatacctgaaaatgttgaagcagctttggaatttggtaacaggcagaggttggaagactgtggagggctcagcagaagaaaggaagatgagggaaaatttggaaattcctag

SEQ ID NO: 141388 - DNA, 960 bp, Homo sapiens
atgacaaggatgtcaattctcaccactcctactcaacattgtcctggaggtcctagccaatgcaataagctgtttagaaatcccaatttagaggaaggcaaagcaagatggcagactagaaacctcaaccgatcattcctcccacaagaacgccaagttaacaactgcctacacagaaaaagcaccttcactaaaaacaaaaatcagagccccagggccataagtgaatataggcagttgtcatggagtggctacagcaggccttgggtgagacctagtcctgtgctggcttcaggtctgacccagtgtagtcatagtattggtggccacaggggtgcttgtgtcacttcacctccacctttagctagctcagaacagaaagagagaccctatggaattaatcttctaaaaacagattacgctctaagatgttttacagctaaaagctccatcaagactttttcacaacttgttaatggaacaaaaagcaaccaggaaagtctgaaagaattggaaaatgaggtggaagaggagaagcgcatcctccagcagtcagtggtgacaacatataaagatagggctttgaaagagctggaagatcatgaagatgagtttaatgaggaggacgaacgtgctattgaaatgtacacacggcagagactagttgagtggaaagcatctaaactgaagaatacatttggagaagttttggagatctcagggaaggattatgttcaagaagctaccaaagccggagatatcaaggctcagtttatcggtcctctggtgtctggtggcatgcacctgacaagagataagttggagcggaaactgtctgaatctggagcaattaagatggacctggaggaaaaccctaagaagccgattgaacacatgttgctgtcctcagtgcggcgctctgtccccatggggagggactgcaattctgagggtgactga

SEQ ID NO: 141389 - DNA, 1003 bp, Homo sapiens
cccgggtcgacccacgcgtccgggcggcgctgtgcgcgtgcacaaaagatagctgaggggcgggggcgctgcggcacagctggtttgagcaactgaactggaaacaagatgcaggaccccaacgcagacactgaatggaatgacatcttacgcaaaaagggtatcttaccccccaaggaaagtctgaaagaattggaagaggaggcagaagaggagcagcgcatcctccagcagtcagtggtgaaaacatatgaagatatgactttggaagagctggaggatcatgaagacgagtttaatgaggaggatgaacgtgctattgaaatgtacagacggcggagactggctgagtggaaagcaactaaactgaagaataaattcggagaagttttggagatctcagggaaggattatgttcaagacgttaccaaagctggcgagggcttgtgggtcatcttgcacctttacaaacaaggaattcccctctgtgccctgataaatcagcacctcagtggacttgccaggaagtttcctgatgtcaaatttatcaaagccatttcaacaacctgcatacccaattatcctgataggaatctgcccacgatatttgtttacctggaaggagatatcaaggctcagtttattggtcctctggtgtttggcggcatgaacctgacaagagatgagttggaatggaaactgtctgaatctggagcaattatgacagacctggaggaaaaccctaagaagccgattgaagacgtgttgctgtcctcagtgcggcgctctgtcctcatgaagagggacagcgattccgagggtgactgaggctacagcttctatcacatgccgaactttcttgtgacaaattgtctggattttttaaaaaaggaaaaagcaagaatgaatccttgtggtttttagttttgtataaattatgtttcaaatctttacattttggaaataatcattgctggagattctgttaaatattttggaactc

SEQ ID NO: 141390 - DNA, 433 bp, Homo sapiens
atcttgacgaggctgcggtgtctgctgctattctccgagcttcgcaatggtaagcttcaggggtgtgaagtcgccggcgttcttgggtttgaggactcagtggggagagccttcggcgggagcgctccttggcctgccggcctcggttgcagggcgggcgcggttattgcttggcccatgtgctctggtggtggagtttgcgggggctgggggcgcagtattaggggactttggcgctatttgaggacctggttgcattcccgctgccctcctacagccgcctaaggacgacaagaagaagaaggacgctggaaagtcggccaagaaagacaaagacccagtgaacaaatccgggggcaaggccaaaaagaaggtagaaataagacctctctgaaagagactaggggtaactctctcgtaaccctctagtaat

SEQ ID NO: 141391 - DNA, 1345 bp, Homo sapiens
aatgaaattttttttttttttttttttttttttgatttaataaagttttatttttccaaatgtacagctggttggacctattcatgcattcttcacccagcagctggaagcatcttccacccttggtaatttctggtgtaaattacttgaagctctgtgctttgaaaccaagtttgaataagtcctttactaaggagctcctgaagggcttgccctggcccagggagcctcgaatttttagttctttcagaaaccacagctgggggttataagtttatagttggggaactttccttacagagtttatcatagggtaggctttgtcaaacaagactaaagttattgaagcttgtccccgaacttttgcctttgggacccacttccctagtctctttcagagaggtcttatttctaccttctttttggccttgcccccggatttgttcactgggtctttggcttttttgtccgacatcttgacgaggctgcggtgtctgctgctattctccgagcttcgcaatgccgcctaaggacgacaagaagaagaaggacgctggaaagtcggccaagaaagacaaagacccagtgaacaaatccgggggcaaggccaaaaagaaggtagaaataagacctctctgaaagagactaggggtaactctctcgtaatcctctagtaataggtaacttgtatagtaagtggtttttcaggtgtagatttctagagtcaaaatgtgagagtttatcttcccgtcaccactcgttctttttcccattaggatcatgaaaatgggtctgttgtgcgaagtgtctgccgctgtgcctgctgtgttatttttaactgatctagtggggctcggcccctgtttgaaggccaaaaacgtgtcggtgtttttttttgttttagtaatgtgtaatttatccttgataacggtggaacagatttctctgacgcagattactcgagagggaaagggtgcttctgccagaaatactaacttgtttctgttttgttttggtgagcagaagtggtccaaaggcaaagttcgggacaagctcaataacttagtcttgtttgacaaagctacctatgataaactctgtaaggaagttcccaactataaacttataaccccagctgtggtctctgagagactgaagattcgaggctccctggccagggcagcccttcaggagctccttagtaaaggacttatcaaactggtttcaaagcacagagctcaagtaatttacaccagaaataccaagggtggagatgctccagctgctggtgaagatgcatgaataggtccaaccagctgtacatttggaaaaataaaactttatt

SEQ ID NO: 141392 - DNA, 891 bp, Homo sapiens
tcaaatgacacggcggtgaggaccatccagcaggtctccggagagggctgatgtgcggattcggctaggagagcacagccttagaggacagccatttataatgccttgctttatgggtggtttaattgtcaagcatcccctctgcatgtgggcattcacgtgccccagtgccacactcagccacatcctcttcctcctaaaagggtcagaaatccacatttccgacttaaccacaatatttagctttcttagcatttccgcttccacctccccgtcacccgctgcccctgccccacctgcagattcctcctcaggcctagccaatttccacccagttcttccttgaaaagcctcagcgagtggtgattgggcaaaacgctggctgtaaccatagttttcccaggtttgcactgtggtggcagccatcagtgagtgagacatggcaacagcgtgtgccccccacactcggaatctgaccgggcttgtagggttgtggataatcatttggcatcctgggtcaacgtgctgcatggacgtcatttctgccctcccacctggggaaccagcctccaaaatattagcaacttgaggcaaggccagggcccatgctggggagggagtcaccttcccagtctccctacccagaatctccctccagacatcttcttcccctgtagcagctatcaacttgttgcctgagtttgtaaccgtcgtggccttcagcagagagaggcagagaagcccaagggaaaccacacactcaggacctgctgcccttcttccaaagactgttcctactgctgttggatccctcctccagccatcaaatgaaaagccgaaatgcccagaactaccaccatttccatcatgtttgtctacggtccacttcat

SEQ ID NO: 141393 - DNA, 2783 bp, Homo sapiens
ggtcgcgttccagaatccaagatggcgggatccaggcaaaggggtctccgggccagagttcggccgctgttctgcgccttgctgctgtcactcggtcgcttcgtccggggcgacggcgtgggaggagaccccgcggtcgcgttgccacatcgccgtttcgagtacaaatacagcttcaaggggccgcacctggtgcagagcgacgggaccgtgcccttctgggcccacgcggggaatgctattccaagttcagatcaaattcgagtagcaccatctttaaaaagccaaagaggctcagtgtggacaaagacaaaagcggcctttgagaactgggaagttgaggtgacatttcgagtgactggaagaggtcgaattggagctgatggcctagcaatttggtatgcagaaaatcaaggcttggagggccctgtgtttggatcagctgatctgtggaatggtgttggaatattttttgatacttttgacaatgatggaaagaaaaataatcctgctatagtaattataggcaacaatggacaaatccattatgaccatcaaaatgacggggctagtcaagctttggcaagttgccagagggacttccgcaacaaaccctatcctgtccgagcaaagattacctattaccagaacacactgacagtaatgatcaataatggctttacaccagataaaaatgattatgaattttgtgccaaagtggaaaatatgattatccctgcacaagggcattttggaatatctgctgcaactggaggtcttgcagatgaccatgatgtcctttcttttctgactttccagttgactgaacctggaaaagagccgcccacaccagataaagaaatttcggaaaaggaaaaagaaaagtatcaggaggaatttgagcactttcaacaagaattggatatataaaaaagagcatcccagaagggccacccccgaccttccaatggcagcctgcggaggaaatatttgagagtgttagagatccgagagctaagacaagtctttgaaggacagaatcgtattcatcttgaaatcaagcagctgaaccggcagttagatatgattcttgatgaacagagaagatatgtctcttccttaacagaggaaatctctaaaagaggagcaggaatgcctgggcagcatgggcagattactcaacaagaactggatactgttgtgaaaactcagcatgagattctgagacaagtaaatgaaatgaaaaattccatgagtgcaacccgtaagactggtcagtggaatgcagcaccctggctctggctggaggcgtctatggggacaacacagcacttcattgacatccaaagagcacctgcacattagtaaaagagggaacatagataacttagtgcagcgaaatatgcccatcaaatgaaaagccgaaatgcccagaactaccaccatttccatcatgtttgtctacggtccacttcattatatttgttgtggtgcaaactgtattattcattggttatatcatgtataggtctcagcaagaagcagctgccaaaaaaattcttttgactaccattttcctgtgtacttcatctatttgtgtacaaaatgatgtcgttttgagggaatttaagtatttaaattgcttcatagtctaaattattaattttcttaataaaataactgtttaaacattgatttgcagttaagaataaaccttaaagcaaagacaaccacattttaatttgttcacagtatgtaaatctgtctaaatttcagtgaatttctggtcagtatgatgcagcctctgagcagaatattgaccagtaagagggtaaataaagtgggggcaacccctggatatgaatgttaccccctaagtctccaatattgcaggtttccctgtataacgtaaacacacttgccctcatgcctcccagaatatgaggtctaattaagaagtcccatcaggtttattttgtaaccaaagtcttttttagaggtcagacttcctaatcaaaggcctgggcctgcagtccctttcatcttaatgcaacttcctttgaaatcaaagaatattttgtctgagagctttaaggatctggtaatagacttcaaaatgttaagtgaaatttttttttcctctatttatcaatgatatatttcacttttaaaggaaattttagaggaaaattaatagctgctttttgcactaaaaaaccttgtgggtggaaatattcctctgagaatggcttttataggtattttgcctggtaatgtattcattcatgattgcccatattcttgaatgtttcttcattccaatggggtcaggtcaatattatgaaaataatttttatatttatatttgtaactaagaatttatttctccctttactacacgatgtaaattcacgtcaaattcgatgatctgaggatttaaattcacaaaacctgccactacattctggtttacattagttacttcatgctggctggggttagtgaccatttgcatactcttttaaatcaaggaggctgtagtagaggcagttttaagattcttgaaggcaaaatttgaaaaacagtgaatacttctaattgtttccttttagtgccagaactaagacattgtgaagcacttgttagtaaacttaaccttgaaatgtcagactggaaggagtttttatgtctttgtgcatacttctgggtattacagaaacagtctgtaaataacattttaagatgcaaatttaattctgttcacagctgatttatactgattt

SEQ ID NO: 141394 - DNA, 1131 bp, Homo sapiens
  misc_feature (1)...(1131): n = a,t,c or g
tcaaatcattatagctgattcaaacacatctttattaatccaaataggaacaattacaatcagcacatttttggccaatgagatattagtttgtttattccctgtgccgaaaaatccatgtttccgggattcgacaaactctggggaagcttttttctttatcctgctggttgtggaagtttctccntcagtgtgggaagaagtgtatacatcctttttaatcttaaatattgaaggggtggcctgcccctccacacctgtgagtatttctagttgggtggggtgaaagactaaaacccgataaccttctgtaagaaatgtggcaagcatcaacctcacaaagtgacgcagtataagaagggcaaggattccttgtatgcccagggaaagaggcgctttctggtcacctgctggattcactgtgcccgtcttttgctgtggatttttggctccctcttcctcctggctctcggcctgcccctctccttttgttttcttctttcggtgctcgtgttttcctttgtcccctttccaggttttcgtcacttcttttacccttccccctctttcttggcctcgatagaatcccccctcctcgcctttttgcatatcctcaccggggataagtccccctctcttttttgcgccctgcgagctgcgcttttcatgctcccagatgtggttatttcttcgcttggcgcttctccttcctcccccctgtccacctattattggactcttatcgcaagagcagcgggacagtgtgacagctttctgtatcctgagaacttgcccagtgccctgaataaattggatcacgcgagggctcgaaggatgagtgaaaggtgttattgagtggtggatgtggctctcagtgagattgatggagatcgggaagaggggatggagtgggaagtggtcttcctctggagtcgggctgccccgtggtcggactcttgtctgaccgcccaagttaactgagctccccttggcgtctagacatccctcctcttctttctttctctgccgtgtcattccaccgtcgctcctctgctggtctgctggtctactggtcggccctggagctgttaagggttccggtgggtttcgctccttgtgtcgccttgccat

SEQ ID NO: 141395 - DNA, 548 bp, Homo sapiens
agattttggcttggtttggatccattgctgaggctccctcggcagcttggctctgtggctcctctcaggggcgttactgttcctctttcaaccgggtagtccgacagaacagctctgatgcaaaggtggtcaatgtacctaaaacccgaataaccttctgtaagaagtagtggcaagcatcagcctcacaaagtgacacagtataagaagggcaaggattctttgtatgcccagggaaggaggcgctatgatcggaagcagagtggctatggtgggcagacaaagccaattttccggaagaaggctaagaccacaaagaagattgtgctaaggctggaatgtgttgagcctaactgcagatccaagaggatgctggctattaagagatgcaagcattttgaactgggaggagataagaagagaaagggccaagtgatccagttctaaactttgggatatttttctttcaaatttgaagagaaaatggtgaagccatagaaaagttacccgagggaaaataaatacagtgatattcttaaaaaaaaaaa

SEQ ID NO: 141396 - DNA, 715 bp, Homo sapiens
atgggccgggcacggtgggtcacatctgtaatcccagcactttgggaggccaagtgtgggcctcattctaagtctgacttccctaatgctcagaagatggctatgttgagtccacaaacttttgaattcagaaacaagattgagttgatttcagaagctctcccagaagatcaagaaagaactttccaggatctccaggaacctgaattgagtcatacgccaaacgtgagtatgagtgcccagacttccccagcagagaagggcctgaatccggggctgatgtgccaggaaagttacgcttgcagcgggactgatgaagctatctttgagtgtgatgagtgctgcagtctgcagtgtctccgctgcgaggaggagctccatcggcaggagcgcctgagaaaccatgagcggataagactcaaacctggccatgtcccttactgtgacctctgcaagggtctcagtgggcatttaccaggtgttaggcagagggcaatagtgaggtgccagacctgcaaaattaacttgtgcctggagtgccagaagaggactcattctggggggtaacaaaaggagacaccctgttactgtgtacaatgtcagtaatctccaggagtcactggaggcagaagagatggatgaggagaccaagaggaagaagatgactgagaaggttgtgagtttcctcctagtagacgaaaatgaagaaattcag

SEQ ID NO: 141397 - DNA, 1053 bp, Homo sapiens
atgctggtgtctaaaaccctcaaaggagagtacaattgcaggataaacgaagagtgtccaggaagagaactagacaagaaaggaaacagatggtctctgggctcggtgagcttggaagctgtcgaaagcaaactcgactggaccctccaaactcctatttcagatcaatacataagaaggttaacgttaagggagcccgggggagctctctgcgaccccgccaggtgctccccgaacccccggccccatcagaggaatgaggcgaccaccgagcggcgttgggcggccaggtcctccccggcacccccgccccggctcctggaggagggcagggactgccggcctggggcagccagggaccgacgggacccccgcagagccaggcccgaggccccgggcgcccccacgacccggcggccgcccagggcgcccgcgtggggcctcaccccaaccggggacagggccgccgagggccgggccaaggccgcccggattgtccccgaggccgccggggagagtaggccgccgccatccccggcctgccgtgcgcccgcagcccgcggcattaccgcctccacggcgtgctgcaggatggaggtgaacttggagaacatcctgtcccgggactgcagcagcctctcccgggacgacctggagagctcctcgatccgccgccgccgcccctgctgcggctgccggggccgctccagagtgaaggccggtgtgcgcgggcggctcggcggctccggagggcgccgggacgcggcgggcggcgaggagggcgttcggcgaggactcggggcccggagaagctccggcggcggcaccgcattcagaggttcttcctgtaaggaccgatttggaagactcgttaagaaaacagtgttctttaagcaaacattggcaatggatttaaatgctcagattttgaagaaatcaacgactgcagataaatacgaccttaattttctacgtactacccccagaatgctggaggcatcctctgttgttttgtgccccttaccaaattctggccgtgtctgcttcaactga

SEQ ID NO: 141398 - DNA, 2109 bp, Homo sapiens
atgacttatgataaagccccagtgaccgatacaaatattccatcgcatctggaacagatgttagatatactggttcaagaagaaaatgaacgggaatctggagagacagggccatgtatggaatatttgcttcatcacaagatcttggaaacattatataccttggggaaagctgattgtcctccgggaatgaaacagcaggttttggttttctatacgaaacttctgggaagaatccggcagccactacttccacacattaacgtgcacaggccagtgcagaaattaattagactctgtggtgaagtcctagcaacaccaacagaaaatgaagagattcagtttctttgcattgtgtgtgcgaagctgaaacaggacccctacctggttaactttttcctagagaataagatgaaatcattggcttccaaaggagtaccaaatgtaatttcagaagatacattaaaaggtcaggattccttgtcaacagatacaggacagtcccgtcaaccagaggaactatctggtgctactggaatggagcaaacagaattggaagatgagcctcctcatcagatggatcacctgtccacaagcttggataacctcagtgtcacctcactgccagaggcctcggttgtttgtccaaatcaggattacaatttagtgaattctttgttaaatcttactagaagtcctgatggcagaatagctgtgaaggcatgtgaaggcttgatgctgttagtaagtttgccagagcctgcggctgcaaagtgccttacacagagcacttgcttgtgtgaactactgacagacagacttgcctccctgtacaaggccctacctcagtcagtggatccgttagatattgaaaccgtggaagcaattaactggggcttggactcatatagtcataaagaagatgcttcagcatttccaggaaaacgagccttaatttcatttctttcctggtttgattattgtgatcagctcattaaggaagcccaaaagactgctgctgttgctcttgccaaagctgttcatgaaagatttttcattggtgttatggaacctcaattaatgcaaacttctgagatgggtattctcacatccactgctctgcttcatcgcatcgttcggcaagtgacctctgatgttttgcttcaagaaatggtgttttttatccttggagaacagagggaaccagaaactctggcagaaatcagcagacatcctttaaggcataggttaattgaacattgtgatcacatatctgatgagataagcataatgacattacgaatgtttgaacatcttttacaaaaacccaatgagcacattctttacaacttggtcttgagaaatcttgaagaaagaaattatacagaatataaacctttgtgcccagaagataaagatgtggtagaaaatggattgatagcaggagcagtagatctggaagaagatccattatttactgacatttcaccagaaaacactttgccaaaccaagagtggcttagttcttcacctcctgctactccagaccaccccaaaaatgatggaaaaactgaagttcataaaattgtaaatagttttctctgtctggtaccggatgacgcaaaatcctcctaccatgttgagggcacaggatatgacacttacctccgagacgctcataggcagttccgagactactgtgctatctgcttaagatgggagtggcctgggtctccaaaagcattggaaaagtgcaatttagaagctgctttctttgaaggtcattttttgaaagtgctgttcgacagaatgggaagaattcttgatcaggttgttggagaccttatgcttcgaatccagcgtattcaagactttactcccaagcttctgttagtcagaaagcggttacttggtttggaacctgaaggccctattattgaccacatcacactgctagagggtgtgattgtgttagaagagttctttcaggggtcccccaacccccgggccacagaccagtaccagtccgtggccggttgggaactgggctgcatagcaggagatcagcagcaacattcaattctcgtaggagcaccaaccctactgtga

SEQ ID NO: 141399 - DNA, 4454 bp, Homo sapiens
ttaagcaaatattccaaagacagaaaagtgaagtgggccatccaggccatgaagatccccaaatgctgagattgaggaatctggaggcagctccacagaccacggggacatggaagctttctgcttaatttgatgaatcaacaggccaggtttaaatattactttgaagcccgaaataacggattgggctgttattagcaggttaaagttcctaattctcccttcactgagtactgtttgactagtgcacagtttctcagcagtaacagtaccggtgttttggcctgggtaattctgttcagggggctgcctatgagcgtctcggaggtaagtgtcatatcctgtgccctcaacatggtaggaggattttgcgtcaatccggtaccagacagaaaaaaactatttacaattttatgaacttcagtttttccatcatttttggggtggtctggagtagcaggaggtgaagaactaagccactcttggtttggcaaagtgttttctggtgaaatgtcagtaaataatggatcttcttccagatctactgctcctgctatcaatccattttctaccacatctttatcttctgggcacaaaggtttatattctgtataatttctttcttcaagatttctcaagaccaagttgtaaagaatgtgctcattgggtttttgtaaaagatgttcaaacattcgtaatgtcattatgcttatctcatcagatatgtgatcacaatgttcaattaacctatgccttaaaggatgtctgctgatttctgccagagtttctggttccctctgttctccaaggataaaaaacaccatttcttgaagcaaaacatcagaggtcacttgccgaacgatgcgatgaagcagagcagtggatgtgagaatacccatctcagaagtttgcattaattgaggttccataacaccaatgaaaaatctttcatgaacagctttggcaagagcaacagcagcagtcttttgggcttccttaatgagctgatcacaataatcaaaccaggaaagaaatgaaattaaggctcgttttcctggaaatgctgaagcatcttctttatgactatatgagtccaagccccagttaattgcttccacggtttcaatatctaacggatccactgactgaggtagggccttgtacagggaggcaagtctgtctgtcagtagttcacacaagcaagtgctctgtgtaaggcactttgcagccgcaggctctggcaaacttactaacagcatcaagccttcacatgccttcacagctattctgccatcaggacttctagtaagatttaacaaagaattcactaaattgtaatcctgatttggacaaacaaccgaggcctctggcagtgaggtgacactgaggttatccaagcttgtggacaggtgatccatctgatgaggaggctcatcttccaattctgtttgctccattccagtagcaccagatagttcctctggttgacgggactgtcctgtatctgttgacaaggaatcctgaccttttaatgtatcttctgaaattacatttggtactcctttggaagccaatgatttcatcttattctttttggcaccagggactggtttcgtggaagacagtttttccatgcataattgaatgaatttggaaactcgtgcttgacctgaaccctcgggcggcgccgttcccagtggggaaagagactgtttggagacatcgccctccagtgacagcactcgggaactgttgagaggcctgggtacacctttgcttcccattgattgttcctctaagaacaggggtgctctgagcccgttccagcctgtgaaagctcccttgagttcgttgtacgtttgtccttgcccggatgtgtcggcaacacgcttggaggcataaacagaacaaaacttcagacgtgttcttaaaacaaccctctgtggtagttggtaccatccccattttacagataaggaaactgaggctcggggaggtgatgtggggtgcctaaagcaccagagctgagcagtgatggagtctggactgcagtaccctgttgcgggcgatgagggggagctgtcacaggaacaagccaaatcctgcattaggaggctcagtgccaaaggtcggagcaggaccagagatgacgtggacctgcatgcctggtccacagcgctccttggggaccttctgttctccttctccaccatccttgcttcttctttcttcacttcccctttcttagaaaaggggttttctcctccctcacagatccaaggcatgccctcactcctcacaggatggcaaggagaaacgatcaatcgatcagctttccccaaggtatataatgtttccaagatcttgtgatgaagcaaatattccatacatggccctgtctctccagattcccgttcattttcttcttgaaccagtatatctaacatctgttccagatgcgatggaatatttgtatcggtcactggggctttatcatctctggcggacatggtgcatgcagcggggagccggagctggaaggcgttggacagccccgcagggcgcggggaagaaggcagccccggagcgcccgcccggccccagacccttccgtactttgggcggggacccttttcggggacgcctggccgtccgctccgtgcagtatggccctccctgcccattcgatcgtctctcgagtggcctgctatctcttttttcttcccgaaggatggatttttttcttcctgtgccgtgcggctggtttcctcagttacactcatggttgcctccaattgtgttctttttattgttccctctgagtattcgtgattgatcccccgactaagccacaggtcttcctgatggtaagatcctgtgacagtcttaatggagaggatactgccatatcctaggagatgttttggaaatttgtggaggactataggattcaggagacagtattcgacatctgggttggtgaagattccacatacaaattttctgaggttatcctcattgatccattccataaagccatcggaagaaatcctgacacccagtggatcaccaaaccaatccacaagcacagggagatgtgtgggctgacatctgcaggccaaaagagccgtggccttggaaagggccataagttccaccacactgttggtggttctcgccgtgcagcgtggagaagacacaatactctccagctccaccgttactgctgatataagtaaagtttgtaaaattccttccttcatgatgtgggtatcctgcaggagaacccggtgctctttgtcacagagataaacacacatctggagacctttccccagcctctgagcacaaaaaacaatactcttgatatagttgctcctccactctgtcctccaaatctcacacaagtacatctcttgtggcacacccttaactcctgctatgcagcccagttcccaaccggccacggactggtactggtctgtggcccgggggttgggggacccctgaaagaactcttctaacacaatcacaccctctagcagtgtgatgtggtcaataatagggccttcaggttccaaaccaagtaaccgctttctgactaacagaagcttgggagtaaagtcttgaatacgctggattcgaagcataaggtctccaacaacctgatcaagaattcttcccattctgtcgaacagcactttcaaaaaatgaccttcaaagaaagcagcttctaaattgcacttttccaatgcttttggagacccaggccactcccatcttaagcagatagcacagtagtctcggaacttataaccccaaggcaagaaagaaaacacaaaggaccacaaaagattagagacaatgccatgagcatgaagacgagtagttacctttacttgaatgaccaggaggatggatatgccactgaccacagcaggaaacaaaggagcagatgcagttttaaaggcatcaatcataagttctgcagtcgttgatttcttcaaaatctgagcatttaaatccattgccaatgtttgcttaaagaacactgttttcttaacgagtcttccaaatcggtccttacaggaagaacctctgaatgcggtgccgccgccggagcttctccgggccccgagtcctcgccgaacgccctcctcgccgcccgccgcgtcccggcgccctccggagccgccgagccgcccgcgcacacctttccccattactaggtgtgtaatctcatgaaacttctttacttctctgatcctgagccttcttcttatgtattgatctgaaataggagtttggagggtccagtcgagtttgctttcgacagcttccaagctcaccgagcccagagaccatctgtttcctttcttgtctagttctcttcctggacactcttcgtttatcctgcaattgtactctcctttgagggttttagacaccagcat

SEQ ID NO: 141400 - DNA, 845 bp, Homo sapiens
  misc_feature (1)...(845): n = a,t,c or g
gagcgggaatattggcagccatcagggaagccaatatgggagcatacaagtacatccaggagctatggaaaagaagccgtctgatgttcatgccttttttttaagggtcccgctgcggccagacccgcagcttctttgttttcacaggggttccccgccccacccggcctgataaagcgcgccgactgggctacaaggccaagcaaggttacgttatatataggattcgtgttcgccgtggtggccgaaaacgcccagttcctaagggtgcaacttacggcaagcctgtccatcatggtgtttaacccagcctaaaagtttgcctcgaaagcccttcaagtcccgttgccagaaggaancgaagctggacgcccactgtgggggctcctgagagtccctgaattcttactgggttggtgaagattcccacatacaaattttttgaggttatcctcattgatcccattcccataaagctatcagaagaaatcctgacacccaggtggatcacccaaaccagtccacaagcacagggagatgcgtgggctgacatctgcaggccgaaagagccgtggccttggaaagggccacaagttccaccacactattggtggctctcgccgggcagcttggagaaggcgcaatactctccagctccaccgttaccgctaatataagttaaagtttgtaaaattcatacttaataaacaatttaggacagacatgtctgcttacaggtgttatttgtctgttaaaactagtctgcagatgtttcttgaatgctttgtcaaattaagaaagttaaagtgcaataatgtttgaagacaataagtggtggggtatct

SEQ ID NO: 141401 - DNA, 1766 bp, Homo sapiens
aaacttcagcagagaaaaacatttgcttcacatctcatcaaatcttctgcatcaagccacatcatgttaaacaaccttctgctgttctcccttcagataagtctcataggaaccactcttggtgggaatgttttgatttggccaatggaaggtagtcattggctaaatgttaagataattatagatgagctcattaaaaaggagcataatgtgactgtcctagttgcctctggtgcacttttcatcacaccaacctctaacccatctctgacatttgaaatatataaggtgccctttggcaaagaaagaatagaaggagtaattaaggacttcgtttcgacatggctggaaaatagaccatctccttcaaccatttggagattctatcaggagatggccaaagtaatcaaggacttccacatggtgtctcaggagatctgtgatggcgttcttaaaaaccaacagctgatggcaaagctaaagaaaagcaagtttgaagtcctggtgtctgatccagtatttccttgtggcgatatagtagctttaaaacttggaattccatttatgtactccttgaggttttctccagcctcaacagtggaaaagcactgtgggaaggtaccataccctccttcctatgttcctgctgttttatcagaactcaccgaccaaatgtctttcactgacagaataagaaatttcatctcctaccacctacaggactacatgtttgaaactctttggaaatcatgggattcatactatagtaaagctttaggaagacccactacgttatgtgagactatggggaaagctgaaatttggttaatccgaacatattgggattttgaatttcctcgtccatacttacctaattttgagtttgttggaggattgcactgcaaacctgccaaacctttacctaaggaaatggaagaatttatccagagctcaggtaaaaatggtgttgtggtgttttctctgggatcaatggtcaaaaaccttacagaagaaaaggccaatcttattgcctcagcccttgcccagattccacagaaggttttatggagatacaaaggaaagaaaccagccacattaggaaacaatactcagctctttgattggataccccagaatgatcttcttggacatcccaaaaccaaagcttttatcactcatggtggaactaatgggatctacgaagctatttaccacggagtccctatggtgggagttcccatgtttgctgatcagcctgataacattgctcacatgaaggccaaaggagcagctgtggaagtgaacctaaacacaatgacaagtgtggatttgcttagcgctttgagaacagtcattaatgaaccttcttataaagagaatgctatgaggttatcaagaattcaccatgatcaacctgtaaagcccctggatcgagcagtcttctggatcgagtttgtcatgcgccacaaaggagccaagcaccttcgggttgcagcccatgacctcacctggttccagtaccactctttggatgtaattgggttcttgctggtctgtgtgacaacggctatatttttggtcatacaatgttgtttgttttcctgtcaaaaatttggtaagataggaaagaagaaaaaaagagaataggtcaagaaaaagaggaaatatatatattcttaagtttggcaaaatcctgagtagtggaagtcctattaattccagacaaaagggagtttaacaaaaacacgtcttccatcctggttcca

SEQ ID NO: 141402 - DNA, 2602 bp, Homo sapiens; identical to SEQ ID NO: 131065

SEQ ID NO: 141403 - DNA, 2406 bp, Homo sapiens
atgcctaagaagtttgtccagatgctggtttttaatttgactctgactgaagttgttctaagtgggaatgtgttaatttggcctacagatggtagccattggttaaatattaagattattctagaagagttgattcaaagaaatcacaatgtgactgtactggcttcatcagcaactctattcatcaactccaatcccgattctcctgtgaattttgaagtgatacctgtttcctacaagaagagcaatatagattccttaattgagcatatgataatgctgtggattgaccatagaccaactcctctcacaatatgggctttctacaaagaactaggaaaacttctagacactttctttcaaattaacatacaactctgtgatggtgtactaaagaacccaaagttgatggcaagacttcagaaaggtggttttgatgtgttggtagcagacccagtaacaatctgtggtgatcttgttgctctgaaattaggaattccatttatgtacacattgaggttctctccagcatcaacagtggagagacactgtgggaaaatcccagcaccagtctcctatgtaccggcagccttatcagagctcactgaccagatgacctttggtgaaaggattaaaaataccatatcttattctctgcaagactatatatttcagtcctactggggagaatggaattcatactatagcaaaattttaggacatcccaaaaccaaagcttttatcactcatggtggaactaatgggatctacgaagctatttaccacggagtccctatggtgggagttcccatgtttgctgatcagcctgataacattgctcacatgaaggccaaaggagcagctgtggaagtgaacctaaacacaatgacaagtgtggatttgcttagcgctttgagaacagtcattaatgaaccttcttataaagagaatgctatgaggttatcaagaattcaccatgatcaacctgtaaagcccctggatcgagcagtcttctggatcgagtttgtcatgcgccacaaaggagccaagcaccttcgggttgcagcccatgacctcacctggttccagtaccactctttggatgtaattgggttcttgctgataagtctcataggaaccactcttggtgggaatgttttgatttggccaatggaaggtagtcattggctaaatgttaagataattatagatgagctcattaaaaaggagcataatgtgactgtcctagttgcctctggtgcacttttcatcacaccaacctctaacccatctctgacatttgaaatatatagggtgccctttggcaaagaaagaatagaaggagtaattaaggacttcgttttgacatggctggaaaatagaccatctccttcaaccatttggagattctatcaggagatggccaaagtaatcaaggacttccacatggtgtctcaggagatctgtgatggcgttcttaaaaaccaacagctgatggcaaagctaaagaaaagcaagtttgaagtcctggtgtctgatccagtatttccttgtggcgatatagtagctttaaaacttggaattccatttatgtactccttgaggttttctccagcctcaacagtggaaaagcactgtgggaagtgtgtccggaattggtgggttcttggtctcgctgtcttcaaggatgaagccgcggaccctcacggaatgaaactgcagaccttcgcggtgagtgttactgttcttcaaggcagcgcgtttggagttgttagttccttccggtgggttcatggtctcactggcttcaggagtgaagctacagacctttgcaaagcccagccagcttcacctctcaatggcactcactgtgggactttgcagcacctagcccgggcactctggcagcccagagggagctcgttccctgatcaagcccagcaggctctgaccagctgcacccgtggagtccacgcccactgggaacccgtgccggcccacaagcaccacaagcagccctcgctccagcctgctcctctccctccacacctctgtgtgagcagagggagccagctctggcctcagccagccccagagagggggcccccacagcacagtggtgggccaaagggctcctcgagcttggccagagcagacgccaaggccgaggaggtgccgagagcaagccataaaataagcctcaatacatttaagaaaattgaaattggagtttgctggaggtccactccagatcctgtttgcctggatatcacaagtggaggctacagaacaacaaatactgcagaatggcagatgttgctgcctgatccttcctctggaagctttgtctcagaggggcacctggctgtctcagtcagcccctacttagaggtgtctcccagttag

SEQ ID NO: 141404 - DNA, 664 bp, Homo sapiens
gcaactggaaaacaagcattgcattgcatcaggatgtctatgaaatggacttcagctcttctgctatcaccagggatgctgcattttctgtaggattaaatccctaatcttaatcaaaaagtgatgacacatttcataatgaaatgtgacctgtctttcctcaattctagcaccaccaccacctcactgcctggccaaattaacttactttcaatgttgatacttttctgcttatcgtttagatataaagagaatgctatgaaattatcaagaattcatcatgatcaaccagtgaagccccttgatcgagcagtcttctggattgaatttgtcatgcgccataaaggagccaagcaccttcgggttgcagcccacgacctcacctggttccagtaccactctttggatgtgactgggttcctgctggcctgtgtggcaactgtgatattcatcatcacaaaatgttgtctgttttgtttctggaagtttgctagaaaagcaaagaagggaaaaaatgattagttatatctgagatttgaagctggaaaacctgataggtgagactacttcagtttattacaacaagaagacgttgtgatacaagagattcctttcttcttgtgacaaaacatctttcaaaacttacctttgtcagtcaaaattt

SEQ ID NO: 141405 - DNA, 573 bp, Homo sapiens
atgtctgacctaatcagactttacaagaaggtgaagcatcagagatgtgatcttgctggcctgaagaaaagaaaccgctttgtgccatgtgaagtgcttgctcctcctttaccttccgccatgattgtaagtttcctgaggtctccccagaagccaagcagacgccagcatcatgctccctgtacggcctgcgagactctaagaagggcccctggagaagtttgcttccctggaggtaagcgtgaccctacagacatggatgatgcagccacagctctccgggaagcccaggaggaagtgggtctccgtcctcaccaagtggaagttgtctgctgcctggtgccatgtcttattgatcgtattctacggattaacagcattggcatgagctgggagcttggtaggcatgcagagtcccaggtcccaaccagacctgctgaattggagcctgagttttaccatgattcccagtatagcccgcttgttcctcatcccactgaccctaagcccaacacaccaatgactgctgatcatgataaaacacaatggtcaacaccagattcatgtaaataa

SEQ ID NO: 141406 - DNA, 837 bp, Homo sapiens; identical to SEQ ID NO: 124648

SEQ ID NO: 141407 - DNA, 1434 bp, Homo sapiens
atggttctccgctgcgacgagcaggaggaaggaaagctgaacagaacatcttggtgcctaagccgctcttccttgggtaacatgaaaaagcctttacaagtcgatcctgaatgtcaaaatatgccatttaatgactggaatcaacaccctcatttttgtgcctcaacacccattcagggaagccctcactgtggaaagccagttctctgggagcattgcaccagatggaacacagggacgacaggctcctacaggaagaccacaggagggtttggagtaagacacctggatcctggaggagcacatttccagcgggtggagctgggcaggcaagaacaccgggtgtcacaggacaggcccgggcacctccccaacgcgggcgcaggggaagcggtgactgcgaagggaggcctggggagcagcagggcccggcacgaggaggagggagatgtgcgcttcctgattatcaggactggggcaatctgggtacgatccctgttccaggcacgacaggttccaaaaaaatgccgcatcaactgggcccgaacctggtcccagatatccctcctaaatgtacaatcaaggatttgcaccaaaagagaagagcagtacagaagcagtattccacacagtggtgttgaaagacacgaaagccctgacattgaagacttttccttcaaggaaccccaaaaaatgtgcatgattttgagtgtcaatggagagatgacacaggaaattcaagggagtgcttatggcccagaaagaaggaaatccaacaaccacttaatgaagaagaatgatcagaagttcaagacctgccacagatggccggtcatcccatccatcatcaggctcaggggcccccggagccaagaacccacaggagcagcagaggagacccatggggcagcgactctcccagcagagcaggaggaatccagggtgaaatgcaagaactgcggggctttgggcactcagccaggaacaagacctgccccattaagaggtggagtgggcccttcctctgcaggtcctgggctcacacaaggagaaggagaacctaaaccagcaaaggcccagctaccctttacgactccagggccctttacgagaatgacagagaaaaggagcgaagtccaaggttgtgattggctcccccatgtgaatgtggcctgggtacggtattggaatcgcctggtgaattggtacgctcgcacctgtgttcgggatgttggaaggtcttgggatgatccacggctttcgtccccgtactatgcctctggttatctgtatccctgtatgtctgttatgtcgggatgcagtgatggtgtggtggtgggaatgtggtggaggcaggatgaacatttgtctacatcagggataactatgctgatggacacatggatgtaccagattgcagagctgcagggctag

SEQ ID NO: 141408 - DNA, 2382 bp, Homo sapiens
atgacatcagtgcatcagtttttactagagccaatcacctgtcgtgcctggaacagggatcgtacccagattgccctcagtcctgataatcaggaagcgcacatctataagaagcatgggagccagcgagtgaaagctcgtgaactcagtgagcacaatggacatatcacaggcattcactgggctcccaagagcgaccgcatcgtcacttgcggggtagactgcaatgcctacatctggagtcagaaagatggtgtctggaagccaaccctggtgatccttagaattaatcgtgcagctacttttgtgaagtggtccccgctagagaacaaatttgctgtgggaatcctcagcttggattggcatcccaacaatgttttgctggcagcaggatcatgtgacttcaaatgcagagtgttttctgcttacattaaagaagtggatgaaaagccagccagcatgccctggggcaccaagatgccttttgggcagctgatgtcagagtttggtggcagtggcaccggtggctgggtccacgggaacagtgtcgtggctgctggccatgactgctacccaatgctctttaattatgatgaccgcggctgcctgaccttcgtctccaagttagacattccaaaacagagcatccaacgcaacatgtctgccatagaacacttccgcaacatggacaagagggccacgattgaggaccacaacatggccttggagaggctgcaccagaatagcatcactcacgtctctatttatgaggtagacaagcaaggttgtcgcaaattttgcactactggcattgatggagccatgacaatttgggatttcaagaccctcgagtcttccatccagactttagcaggggcagaactactggacttcttgcagaaccaaggtcactgggaatatgagagacaagagaactactcccatgcccgacgttcttacatgcttcctggcccaacacagagaaactgggataagtttgatccccaggcattgaaacgaaaaagattggtttttctttgcaatacagtttggccaaaatatgaactagaagggcaggaagcctggccagtggggggaagcttaaatgttaataccatactccagcttgacgtctactgccgacaacagcgcaaatggtcagaggtcccttatgtgcaaaccttcatgatcttgagggaaaaccccgatttttgtaaaggctgcaagatagatcctgcccttttagctatcctcagtcgtccactccagagacctcaaccaggaggcttcaatgatttcctggtcaacccacctcaacctcctcttcctgagaccaaagagaaagagcaagcacccccagctccttcctccttgtatcgcactcttagccttcatgggtcagcctcaacctacactaggccctcaggcccccgctctggaatctgcctgctaccagtggtgagccgaccagcaggaccagtccaagtccaggtccccttttccatgcaggacttgtcccaagttaaggaaggcctgggaaaattctcagagaatccgggaaaattcctggagggcttccgtaaattaaccctcacttttgaactaacctggaaggatgtcgccatcctcctaggacaaaccctgtctctggaagaaagacagaccatctgggaggcagcacgtcaatgcggggatgagctacacttggcagatgccaactaccccgtgggagctacagctgtccccctgcaggaccccaactgggactacgataccccggcaggaatctgcgccagaaatcatatgctcctatgcctgatagagggaatgaaaaggagtcaagtcaagcctgtcaattataataagttagcaaccatcgaccaagggccacatgagaatcccacggcctttctcgaaaggctccaggaaactcttatcaaacataccaacctagacccgggatccccagaaggacaactagtcctaaaggatcacttcctcacacaagctgccccagacattaggagaaaactgcgaatgctggctttgggaactagagcccccatgtcagaaatcctcaaattcgcttcctcagtgttttataaccgagaccaggatgagagggacagggccgagaggaaggaaaaacagaaagaagagaggcaggctcaattactagctgctttgcaagttcaccagccccctccaggttgccctaaggataccttcccagggaactgctatcagtgcgggaagccgggccattggaaggcaaactgcccctacgggccaaggggggaaaagccctgcacggcctgtcccctctgccgtaagctcaggtactggaaagagaactgtcccgagagccaaaagggcccctga

SEQ ID NO: 141409 - DNA, 1308 bp, Homo sapiens
  misc_feature (1)...(1308): n = a,t,c or g
gtattgactgggctcccaagagcgaccgcattgtcacttgtggggcagaccgcaatgcctatgtctggagtcagaaagatggtgtttggaagccaaccctggtgatcctgagaattaatcgcgcagctacttttgtgaagtggtcccccctagagaacaaatttgctgtgggaagtggagcacgactcatttctgtttgttactttgagtctgaaaatgactggtgggtgagcaagcacattaaaaagccgattcgctccacagtcctcagcttggattggcatcccaacaacgttttgctggcagcaggatcatgtgacttcaaatgcagagtgttttctgcctacattaaagaagtggatgaaaagccagccagcacgccctggggcagcaagatgccttttgggcagctgatgtcagagtttggtggcagtggcactggtggctgggtccacggggtaagcttctctgccagtgggagccgcctggcctgggtcagccacgacagcaccgtgtctgttgcttgatgcctcaaaaagttgtgcaggtctcgactctgaagacagagttcctgccgctcctaagtgtgtcatttgtctcagagaacagcgtcgtggctgctggccatgactgctgcccaatgctctttaactacgatgaccgcggctgcctgaccttcgtctccaagttagatattccaaaacagagcatccaacgcaacatgtctgcccatgggaacgcttccggcaacatggacaagagagccacaactgaggaccgcaatacggccttggagacgctgcaccagaatagcatcactcaagtctctatttatgaggtggaccaagcaagattgtcgcaaattttgcactactggcatcggatggagccatgacaatttgggatttcaagacctttcgagtcttccatccagggcctccggataatgtgaagctgagttgagcctccgccatcccagcatgacaaacctgtggccgaccgcatgctgtgccgtggcacgaatggcgaggaagccagccccaaggaaacactgaaaacacatatcacgccaatgccgtgtggttttgtttgaatataaaattggtgaaagtgttggtttttttaaggcagtaatttttttgtttgttttttttgcgatttcattccattcttgaccaaagcttctctttaagtagtttattatggaaaattgtcacactaacttgaaaagacagggtgagggagatatgtaaattgtnccactaaaaaatcccataaaagaactgaatgtggaaaaaaaaaaaaaaa

SEQ ID NO: 141410 - DNA, 243 bp, Homo sapiens
agcacaacaagaagagcctaaagaagatgcaggccagcaatgccaaggctgtgagtgtatgtgccgaggctatcaaggccctcgtaaaggccaaggagatactactactcccactacacaagtgggaaaattgaaggccaaaaaggttagaagagacttgtccagggtcatacggctggtaagtgacatagaggatctgaacccaagccgtctagttccagatcttacacctctggccacatg

SEQ ID NO: 141411 - DNA, 478 bp, Homo sapiens
atgtgctttgccaagaagcacaacaagaagagcctaaagaagatgcaggccaacagtgccgaggccatgagtgcacatgccgaggctatcagggcccttgtgaagcccaaggaggctaagcccaagatcccaaaggatgtcagccacaagctcaatcgacttgcctacattccccaccccaagcttgggaagcgtgctcgtgcccgcgttgccaaggggctcaggctgtgccggccaaaggccaaggccaaggaccaaaccaaggtccaggctgcagctccagcttcaactccagctcaggctcccaaagattataaagctgaggctctagaagaagaaaccacttgcacaagaaaacttctggataaagatggcaaaatgactctagatgacataatctctctcctcccaacatttaacacaatgaacagcaaaagtaaaagcaacagaaaaaaagtaccatcaatttccgcttttg

SEQ ID NO: 141412 - DNA, 623 bp, Homo sapiens; identical to SEQ ID NO: 131197

SEQ ID NO: 141413 - DNA, 810 bp, Homo sapiens
atgacgaccacagcgcagagaagcacgcgagcccaacctccacgaaaagaaaatggcggaatgggccttcgcttcccttttatcatggctgtacgcaactgctgtacttgtaagcttggttctgattggcctgccattgctcacaatgcagcaactccaagcctactaccacccagacctttcaactccttttacatccccttggaaccatttttccaagcctcagtgtgccgtggcttttgctgtcccaggtttcccaaagtccctcacataattgtgtcttctgcaggcctattcaccaattactcggcactcaggtcatggacagttttcatcacagggtcatttcagacaccacccagtagccggccttttagctcaccagtcatgcctttgctgacatcctgccaccttacgcacataagttcagagctccagccatgttcactgggcctccatgcaaagagcctggactcgaggagcaagggtggggcagaggagatgccctgtccagcaagacttccctggagctctgctagaaatgtcatccttcaggttctgccggccaaaggccaaggatcaaaccaaggcccagtctgcagctccagcttcagttctagctcaggcttccaaaggtgtccaggcccccacgaagccttcagagtagaggtctctgtcaatctgagaacagaaggactgccccgcattcctgacgagcacctggccgaggctgctggcaaatgccaggcaccagtcattaggagccttggggccaccccagggcagcctcccaagcccaccccttcctag

SEQ ID NO: 141414 - DNA, 431 bp, Homo sapiens
tgtgtgcttgcccctccactctggggaggctgggggtccgggagtgaagggggcagcgagaccgcgggctgctccacgctcaccgtcgtgtccatggagagtaagtgcgcacaggcctgagcaggcaacaaaatgaggatcttgccttgtctttccacctccccagtgatgatcgacagagtagtgggtcggagaggaccacctctggctgctacctccccagcggttctcggcccatccccctctgggtggcgctctacacaaccaacctcagcagctgggtcaactcctgctcccccttccttcttccccttcattatcacctccacaaaggggatctgcaccagatttcttaagaatcctgatgaactccagtttgaagaactagtggtattttcatgaattgttatttttgtggcctgatatgacat

SEQ ID NO: 141415 - DNA, 1821 bp, Homo sapiens; identical to SEQ ID NO: 125549

SEQ ID NO: 141416 - DNA, 2515 bp, Homo sapiens
gttgaacatctagacgtttccttggctcttctggcgccaaaatgtcgttcgtggcaggggttattcggcggctggacgagacagtggtgaaccgcatcgcggcgggggaagttatccagcggccagctaatgctatcaaagagatgattgagaactgtttagatgcaaaatccacaagtattcaagtgattgttaaagagggaggcctgaagttgattcagatccaagacaatggcaccgggatcaggaaagaagatctggatattgtatgtgaaaggttcactacctagtaaacctgcagtccttttgaggattttagcccagtatttctacctatgggcttttcgagggtgaggcttttgggccagcataagccatgtggctcatgttactattacaacgaaaacagctgatggaaagtgtgcatacagagcaagttactcagatggaaaactgaaagcccctcctaaaccatgtgctggcaatcaagggacccagatcacggtggaggacctttttttacaacatagccacgaggagaaaagctttaaaaaatccaagtgaagaatatgggaaaattttggaagttgttggcaggtattcatgtactcaatgcaggcattagtgtctcagttaaaaaacaaggagagacagtagctgatgttaggacactacccaatgcctcaaccgtggacaatattcgctccatctttggaaatgctgttagtcgagaactgatagaaattggatgtgaggataaaaccctagccttcaaaatgaatggttacatatccaatgcaaactactcagtgaagaagtgcatcttcttactcttcatcaaccatcgtctggtagaatcaacttccttgagaaaagccatagaaacagtgtatgcagcctatttgcccaaaaacacacacccattcctgtacctcagtttagaaatcagtccccagaatgtggatgttaatgtgcaccccacaaagcatgaagttcacttcctgcacgaggagagcatcctggagcgggtgcagcagcacatcgagagcaagctcctgggctccaattcctccaggatgtacttcacccagactttgctaccaggacttgctggcccctctggggagatggttaaatccacaacaagtctgacctcgtcttctacttctggaagtagtgataaggtctatgcccaccagatggttcgtacagattcccgggaacagaagcttgatgcatttctgcagcctctgagcaaacccctgtccagtcagccccaggccattgtcacagaggataagacagatatttctagtggcagggctaggcagcaagatgaggagatgcttgaactcccagcccctgctgaagtggctgccaaaaatcagagcttggagggggatacaacaaaggggacttcagaaatgtcagagaagagaggacctacttccagcaaccccagaaagagacatcgggaagattctgatgtggaaatggtggaagatgattcccgaaaggaaatgactgcagcttgtaccccccggagaaggatcattaacctcactagtgttttgagtctccaggaagaaattaatgagcagggacatgaggttctccgggagatgttgcataaccactccttcgtgggctgtgtgaatcctcagtgggccttggcacagcatcaaaccaagttataccttctcaacaccaccaagcttagtgaagaactgttctaccagatactcatttatgattttgccaattttggtgttctcaggttatcggagccagcaccgctctttgaccttgccatgcttgccttagatagtccagagagtggctggacagaggaagatggtcccaaagaaggacttgctgaatacattgttgagtttctgaagaagaaggctgagatgcttgcagactatttctctttggaaattgatgaggaagggaacctgattggattaccccttctgattgacaactatgtgccccctttggagggactgcctatcttcattcttcgactagccactgaggtgaattgggacgaagaaaaggaatgttttgaaagcctcagtaaagaatgcgctatgttctattccatccggaagcagtacatatctgaggagtcgaccctctcaggccagcagagtgaagtgcctggctccattccaaactcctggaagtggactgtggaacacattgtctataaagccttgcgctcacacattctgcctcctaaacatttcacagaagatggaaatatcctgcagcttgctaacctgcctgatctatacaaagtctttgagaggtgttaaatatggttatttatgcactgtgggatgtgttcttctttctctgtattccgatacaaagtgttgtatcaaagtgtgatatacaaagtgtaccaacataagtgttggtagcacttaagacttatacttgccttctgatagtattcctttatacacagtggattgattataaataaatagatgtgtcttaacat

SEQ ID NO: 141417 - DNA, 1271 bp, Homo sapiens
  misc_feature (1)...(1271): n = a,t,c or g
cagtccgaattcccggtcgacgatttcgtcttgagcatctgcagctctgtttaaaacatgttggaggaaaaaaaatcaagcagcagtttttcatgttgatggctgcattttgtctagactgtggagtagtaccatcatggaagaaaatcagttttccagaacctttaagctgcatgaatgcctgtcattttaccaagggaagcttaggatgaatttttttttccctgcctgaggtttctttgtacaaatagcacaggaggacccccagcccccatgcaaaatggtaaccccaggggcgggggtggggggtcgcacccagtccttctgtccctcatgttggcagatagagatatctactttgaaagcctttgtaagggccctgggtacgtttgggaagcctgaagctggaaactgaaagctgggggctgcaagcctgggccttggtttgatccttggccttggccttggccttggccttggtntgatccttggccttggcctttggccttgccttttgggccggcacaaccctgaaacccccttgggcaaaatacggggcaacgaagcaacgccttccccaaagctttgggggtgggcaaatgtaaggcaaagtcgaatcgaagctttgcgggctgaccacccttttgggatcttgggcttaacctccttggggcttttacggagggccttgaatagcctcggcacggtgcacttcatggccttgggcattgttggcctgcatcttctttagggcccttttttgttgtgcttcttggcaaaagcgcatgttcctcaggaaacttgggggtccaacccccttaagagaattcgtatcttttgtgatcgggggtttcttgataccatttcttgggccattttcgggagccgcggcttatggtgcagacatggccaagtccaagaaccacaacacacacaaccagtccccaaaatggcacagaaatggcatcaggaaaccccgatcacaaagatacaaatgtcttaatggggtggacctcaagttcctaaggagcatgcaccttgccaagaagcacaacaagaagggcctaaaaaagatgcaggccaacaatgccgaggccatgagggcacgtgctgaggctatcaaggtcctcgaaagcccaaggagggttgctgtcctctggctgctctgcagctgtttcttatattgtctagtctggatatggctccttgggcggtttgaggtggtgagcattgccgtcattgtgacatcttcagagccctttgaaatatga

SEQ ID NO: 141418 - DNA, 558 bp, Homo sapiens
agcacgaggaacactgaagtcggatttgggtccagtcaccatctggcctccgtattagtcgttgcggagaaggatggtggtacctgctccagtacagtagccaagggatggaacaaagtcgtgggggagtcaagggatgtcgataaggacattagaacccatgggacttggcaacctggagggagaccttagtttcctgctctcagcgacacttccatagcctcatgatagctgcttggtgttctacagtgtctccagatccagaccctcttatatggaccgcaggacaaaaggactctggccacccagcaggccatgggcatgctgtccacggcccccaaggttgcttcgaagccaaggcaggcatcaaaagccaaagtggccttctgcaccagcatccctcaggacaccctgctggggaaggcccggcccggcacaacagcagactgaggcccccaccctgaaaaagcctaggacattcctgggcactgtcatttagggtgctgtacaaatcacctccgcctagaaaatggaattcaacagtcaggatacagattt

SEQ ID NO: 141419 - DNA, 1386 bp, Homo sapiens
tcagtctgctgttgtgccgggccgggccttccccagcagggtgtcctgagggatgctggtgcagaaggccactttggcttttgatgcctgccttggcttcgaagcaaccttgggggccgtggacagcatgcccatggcctgctgggtggccagagtccttttgtcctgcagtccatataagagggtctggatctggagacaccagccctgcagctcccttacttgaagggacactgatcctccaggttgccaagtcccatgggttctaatgtccttatcgacatcccttgactcccccacgactttgttccatcccttggctactgtactggagcaggtaccaccatccttctccacaacgagtaagacagggtcacgttgcagccccgggttgccatttccttccctctcccatctctgcccagcagggaaggctttcatggccacacacaccttggaggcctggggcagctggtgaaccttggctaagaaaaagacggagctgggaatccctctggctggatttcggaagatggatggaaatgcctgggtgtccaggcagaagtgtgctgcagggacgaagcattcacagagaacctctgctagggcagtgtggaaaggaaatgtggggtggaagcccctacacagagtctccactggggcactgcctagtggagctgtgagaagagggccacggtcctccagaccccagaattgcaggtccactgacagcttgcaccgtgctctggaaaagccatagacactcgatgccagcccatggaagcagccaagaggggggttgtaccctgcaaagccacaggggcagagctgctgaaggccctggagctcacctcttacatcagcatgaccaactgctgtcccttcattgtgtctgagagcaaagcctgtcttcatttctttcctggggaggctgaagtgcatgagcagcatgatgaccacgttcatgaggttcgggtttttcacttctgagtacgtgatgcaggatgaggcccgaatctggcacaattcctggtcccaggtctgttccgttcgatccttggttgcttcctgcttgcctccgtccttcacctccccaagagttcggcaaaaccctggttgtcgaaatgagtcaagaatggaaaagccatcgccagcaactgtgaggatggggtgaagacccaaggaggtactatatagagcccatgaatcaaggatgttgtggcgtccaaattgatgcggatacccagggacccatagcaccaccatggcccccgtgttagagtagggatctatgggggtcatgtcatccacagagccctgcccaagacacagcggggtcagaacagcagtctgggctgcagcgacacatccgaggatcactggcat

SEQ ID NO: 141420 - DNA, 1401 bp, Homo sapiens; identical to SEQ ID NO: 123530

SEQ ID NO: 141421 - DNA, 1152 bp, Homo sapiens; identical to SEQ ID NO: 123531

SEQ ID NO: 141422 - DNA, 678 bp, Homo sapiens
  misc_feature (1)...(678): n = a,t,c or g
gtaaaggaatatttgagtaaagtgagttgccgttcttgaagcccgtctcctaaggattctcccggtgtccgcgtagggatctcatgctatataggagggccctgccagcagcgtctcctctctccggtccgtgcctccaagatgacaaagaaaagaaggaacaatggtcgtgcccaaaaaagggccgcggcacgtcagggggnngccncccttaaaatttttnccccngggnccntgccacctaactgtgccccgatgccgtgcccaagggacaaggcccattaagaaattccgtcatttcgaaaccataagtggaggccgcagcagtcaagggacatttctgaagcgagcgtcttcgatgcctatbtbbcttcccaagctgtatgtgaagctacattactgtgtgagttgtgcaattcacaagcaaaagtagtcaggaaatcgatcttcgtgaagcccagcaagaccagaacacccccaccccgatttaggacctggcgggtgattgccccacggtccccccaccaaaagcccatgatctgggtccagaatactgcagacatcagacatgtgttaactgggtttgctgccggcaagccaccatccttgggaaggagttgtgtgggcaaatcaggaagttgccctctcagcagatgtctccaggatggctgccctcag

SEQ ID NO: 141423 - DNA, 813 bp, Homo sapiens
  misc_feature (1)...(813): n = a,t,c or g
gtgctcgaccatcgccgataatatatcgtcgctccaggacttttaaggcacttgctactctaagaggaggagacaaaanaaaatttgaaacccctggaatttgcacccgctgcaggaattcggcacgaggccactgcgcagacccagacttcgctcgtactcgtgcgcctcgcttatgcttttcctccgcaacccatgtctgacaaaacccgataatggctgagatcgagaaattcgataagtcgaaactgaagaagacagagaccgcaagagaaaaattcccactgcccttcccaaagaaacagattgaacaggagaagcaagcaggcgaatccgtaatgaggcgtgcgccgccaattatgcactgtacattccacaagcattgccttccttatttttaacttcttttaagctgttttaacttttgtaagaatgcaaagaggttggatcaacgtttaaatgactgtgctgcccctttcacatcaaaggaactacttgacaaccgaagggcccggcggctggccttttccccatctggtctatctattctgggctgggcagggaaggaaaagaactttgcatgttgggtgaagggaagaagttggggttggaagaagttggggttgggacgacagtgaaaatctatagtaaaaccaaggctgggcccaaggtgtcctgccaggctggtaatggcagtttaatcagagtggccatttttttttttttgttcaaatgattttaattattgggaatgcacaattttttttaatatgcaaaataaaaaggtttaaaaggtaaaaaaaaaaaaaaaaa

SEQ ID NO: 141424 - DNA, 980 bp, Homo sapiens
tctgcctgggatgtaaaccggaccagccgctgcgggcagaaggaaggctcttggctccttcgggaaacccagccccgtcaccgggctccgagcggctcgcaggcgacggacacgtccgtcagccccggcagcgcctagcgtcggctgcggaaagcggagggagtccgacgcgggcgcgggcggggagcgtgcgtccgttcgcacaggcagcgggaggaggggcggccgaaccatggccggggacagcgagcagaccctgcagaaccaccagcagcccaacggcggcgagcacttcgcttataggcgtcacgtggggaacagctagcggcaagtcttccgtgtgtgctaagatcgtgcagctcctggggcagaatgaggtggactatcgccagaagcaggtggtcatcctgagccaggatagcttctaccgtgtccttacctcggagcagaaggccaaagccctgaagggccagttcaactttgaccacccggatgcctttgacaatgaactcattctcaaaacactcaaagaaatcactgaagggaaaacagtccagatccccgtgtatgactttgtctcccattcccggaaggaggagacagttactgtctatcccgcagacgtggtgctctttgaagggatcctggccttctactcccaggaggtacgagacctgttccagatgaagctttttgtggatacagatgcggacacccggctctcacgcagaggcatcatgaatttgctcctccatccacggggattgagagccattactattgctgtatttggtaagcaaaatacgtacatcaggctcgaaccctttaggatcaacgttccccccacgatcacgaagcatatcgaagaactgcagtgcgcacctgtcgtaacacaactcagcaggaaggaggagacagttactgtctatcccgcagacgtggtgctctttgaagggatcctggccttctactcccaggag

SEQ ID NO: 141425 - DNA, 8783 bp, Homo sapiens
  misc_feature (1)...(8783): n = a,t,c or g
atggccctggccgggagttcgggaaattccctcccccgctccttgcccttccgtaaccggattgattttttatacccaaccgggggaataggctccctggggggtaaaagacaacctcctgcccgtattgaaactgagttaatgggcaaatttgatgaaggtaaactgcccaccgatccacacctgatgctccgactggccattgaaactgttgctcatgactatgatgtcatagttattgacagcgcgcctaacctgggtatcggcacgattaatgtctttttcgatatgcttcgtgatctgctcaagaacgttgatcttaaagggttcgagcctgatgtacgtattttgcttaccaaatacagcaatagtaatggctctcagtccccgtggatggaggagcaaattcgggatgcctggggaagcatggttctaaaaaatgttgtacgtgaaacggatgaagttggtaaagcggttatcaatcacaagaaacgtaaaaatagcccgcgaatcgtccagtcaaacgacctcactgaggcggcatatagtctctcccgggatcaaaaacgtatgctgtatctgttcgttgaccagatcagaaaatctgatggcaccctacaggaacatgacggtatctgcgagatccatgttgctaaatatgctgaaatattcggattgacctctgcggaagccagtaaggatatacggcaggcattgaagagtttcgcggggaaggaagtggtttttcctcgccctgaagaggatgccggcgatgaaaaaggctatgaatcccttcacccgtttatcaaacgtgcgcacagtccatccagaggaatttacagtgtacatatcaacccatatctcattcccttctttatcgggttacagaaccggtttacgcagtttcggcttagtgacaaccaaagaaatcaccaatccgtatgccatgcgttctctacgaatccctgtgtcagtatcgtaagccggatggctcaggcatcgtctctctgaaaatcgactggatcatagagcgttaccagctgcctcaaagttaccagcgtatgcctgacttccgccgccgcttcctgcaggtctgtgttaatgagatcaacagcagaactccaatgcgcctctcatacattgagaaaaagaaaggccgccagacgactcatatctttttcgatatgcttcgtgatctgctcaagaacgttgatcttaaagggttcgagcctgatgtacgtattttgcttaccaaatacagcaatagtaatggctctcagtccccgtggatggaggagcaaattcgggatgcctggggaagcatggttctaaaaaatgttgtacgtgaaacggatgaagttggtaaagctgccccgatggtggattcgttaattgcgcgcgtaggagtaatggctcgcggtaatgccattactttgcctgtatgtggtcgggatgtgaagtttactcttgaagtgctccggggtgatagtgttgagaagacctctcgggtatggtcaggtaatgaacgtgaccaggagctgcttactgaggacgcactggatgatctcatcccttcttttctactgactggtcaacagacaccggcgttcggtcgaagagtatctggtgtcatagaaattgcggggctgcgtttaaccattcatgaatcacttggacgcttgcgtaacaagggtatcgcttttaagcgcggaaaagatgctaaaggcggctatcagactggtctgctgaaggtcgggcgttttgatgctgaccttgatctgatagagctggaggctgattcgaagttgtgggagctgttccagcttgattatcgcgttctgttgcaacaccacgccttgcgtgcccttccgaagaaagaagctgcacaagccatttacactttcatcgaaagccttccgcagaacccgttgccgctatcgttcgcgcgaatccgtgagcgcctggctttgcagtcagctgttggcgagcaaaaccgtatcattaagaaagcgatagaacagcttaaaacaatcggctatctcgactgttctattgagaagaaaggccgggaaagttttgtaatcgtccattctcgcaatccaaagctgaaactccccgaataaatgctggaatctgtcgcagcagagatgatgagcgtttctgacggtgttatgcgtctgcctttattcctcgcgatgatcctgcctgttcagttgggggcagctaccgctgatgcgtgtaccttcattccggttacgcgtgaccagtccgacatctatgaagtctttaacgtggcaggttcatcttttggttcttatgctgctggtgatgttctggacatgcaatccgtcggtgtgtacagccagttacgtcgccgctatgtgctggtggcaagctccgatggcaccagcaaaaccgcaaccttcaagatggaagacttcgaaggccagaatgtaccaatccgaaaaggtcgcactaacatctacgttaaccgtattaagtctgttgttgataacggttccggcagcctacttcactcgtttactaatgctgctggtgagcaaatcactgttacctgctctctgaactacaacattggtcagattgccctccagttacgtcgccgctatgtgctggtggcaagctccgatggcaccagcaaaaccgcaaccttcaagatggaagacttcgaaggccagaatgtaccaatcccccaaggtcgcaataacataaaagttaaccgtattaagtctgttgttgataacggttccggcagcctacttcactcgtttactaatgctgctggaaactcatggaaacacttaaccagtgcataaacgctggtcatgaaatgacgaaggctatcgccattgcacagtttaatgatgacagcccggaagcgaggaaaataacccggcgctggagaataggtgaagcagcggatttagttggggtttcttctcaggctatcagagatgccgagaaagcagggcgactaccgcacccggatatggaaattcgaggacgggttgagcaacgtgttggttatacaattgaacaaattaatcatatgcgtgatgtgtttggtacgcgattgcgacgtgctgaagacgtatttccaccggtgatcggggttgctgcccataaaggtggcgtttacaaaacctcagtttctgttcatcttgctcaggatctggctctgaaggggctacgtgttttgctcgtggaaagtaacgacccccagggaacagcctcaatgtatcacggatggttagggacatcattgagcagaaaggcttattctgagtgcttaggagaagatccctataccatccctaaaaattacttaggaggggagattttaggaaggcgaaaccttccacaaatcgtaaaatttgagcgttacacaaaatgactgccggggtatgcttccaccacccaatggtggattttgagcgttcagccacgattcgccggaaaccttggggatcatctgaaagagcgattcccgttggctaacaacgatctttcaaaacgctacacaagcggtaagaagatcccgcaaagctatgcgatggcgattgctcgtcagaagagcgcttggaatccgaaagtgaaatcaccggtaggggccagcggcttgatgcagattatgcctggtacagcgacccatacggtgaagatgttctctattcccggttatagcagtcctgggcaattgctggatccggaaacgaatatcaacattggcaccagttacctgcaatatgtttatcagcagtttggcaataatcgtattttctcctcagcagcttataacgccggaccagggcgggtgcgaacctggcttggcaacagcgccgggcgtatcgacgcagtggcatttgtcgagagtattccattctccgagacgcgcggttatgtgaagaacgtgctggcttatgacgcttactaccgctatttcatgggggataaaccgacgttgatgagcgccacggaatggggacaggcgaagtccaacgtggctcaattcgtttataccatgcatcgtgtcggcaaagttgttccgccgaaacgtcatattttgaaaaacatctctctgagtttcttccctggggcaaaaattggtgtcctgggtctgaatggcgcgggtaagtccaccctgctgcgcattatggcgggcattgataaagacatcgaaggtgaagcgcgtccgcagccagacatcaagattggttatctgccgcaggaaccgcagctgaacccggaacacaccgtgcgtgagtccattgaagaagcggtttcagaagtggttaacgccctgaaacgcctggatgaagtgtatgcgctgtacgccgatccggatgccgattttgacaagctggccgctgaacaaggccgtctggaagagatcattcaggctcacgacggtcataatctgaacgtacagctggagcgtgcggcggatgcgctacgtctgccggactgggacgcgaaaatcgctaacctctccggtggtgaacgtcgtcgcgtagcgttgtgccgcctgctgctggaaaaaccagacatgctgctgctcgacgaaccgaccaaccacctggatgccgaatccgtggcctggctggaacgcttcctgcacgacttcgaaggcaccgttgtggcgattacccacgggggatcctctagagtcgactgcagacagtagtggccgctgcaaaacgctgacggaacagtagctgcatacaacggatatcacgttgtgtttgctcttgcgggaagcccgaaagacgctgatgacacatcaatctacatgttttatcaaaaggtcggcgacaactcaatcgacagctggaaaaacgcgggccgtgtctttaaagacagcgataagttcgacgccaacgatccgatacatgaaagatcagacgcaagaatggtccggttcggcaacccttggagcaccgagctcgtatcatggggtcagagaatgaattaattcggagccaacactgctgctttccccacacagcgaccagctctcaatggagtctttgatgagcagcccgcatttggcatcgtggtgtctggcctgcagggaggacccgggggatgtgtatgaaatctaacaatgcgctcatcgtcatcctcggcaccgtcaccctggatgctgtaggcataggcttggttatgccggtactgccgggcctcttgcgggatatcgtccattccgacagcatcgccagtcactatggcgtgctgctagcgctatatgcgttgatgcaatttctatgcgcacccgttctcggagcactgtccgaccgctttggccgccgcccagtcctgctcgcttcgctacttggagccactatcgactacgcgatcatggcgaccacacccgtcctgtggatctacccactagtcaattcaccatcttgttgatcgacgtgtacctgtggctgggctccatcaagcatgccagtgccattttggacaacttgccagtaggctatgaagcagaaatgtcctccaaaggggctggcaccaatcaccccccatctaacctgctctaccaagaaagctcagaaaaaggagagccagacccttgcaaatgggcaatagggtttaaggtaatgaaggtgcaggatcccccagcccagatcaagaaggtggtaaataatgaggatggcaatgcccaatactgcctggcagtgataagattcagcaccatgacggagaaccagactttcaggctgccattggtccaacatggttggagaaaaagggcagatttcttgataatctcccagaccctctctccgacctggaaccagatgctgctgttcaatgatttggtgctgcatggagatgtgaaggagctggcagagtccccgcccttagtggtggtggagctgtatgacagcgacgctgtggtggggccactgcccttgagtgccaaagaacaactcagctcctccgctgacccgtacctccactcggtatttgctcagcaccggccgaatgttggcaggcaccggccccagcacactatccctgacgttttcatctggatggtcagcaacaacaggagagtggcctatgcccgcatcgcctccgaagggggcttttatagccccaaggggggcctccaacccgagtggcccctcttgttttttgttccctacccctgggggtggtaaggtgatgcacttcaaaaagcctttacagataaagaggaattacttaagcagcaggcatctaaccttcatgagcagaaaaaagctggggtgatatttgaagctgaagaagttatcactcttttaacttctgtgcttaaaacgtcatctgcatcaagaactagtttaagctcacgacatcagtttgctcctggagcgacagtattgtataagggcgataaaatggtgcttaacctggacaggtctcgtgttccaactgagtgtatagaagaaattgaggccattcttaaggaacttgaaaagcccgcacctggacccccactaccaagacgtgattgactcgcgtgacgtgatcgcccgtattgaggagttgcaggggtaccgagctcgaattcgtaatcatggtcatagctgtttcctgtgtgaaattgttatccgctcacaattccacacaacatacgagccggaagcataagttcgacgccaacgatccgatcctgaaagatcagacgcaagaatggtccggttctgcaacctttacatcggggatcctntagccatgaacagcaaggtgctggtcgacctgcgcttgtgctctccgttcaagcctttaatcaactgggaatgacgctggtggcccccattacgcagggcggaaattttgcccgttatgccggatttagcgttcctttacattgcgaagaaggcgatgtgcacggcgtggtgctggtgaatcaggtgcggatgatggatctacacgcccggctggcaaagcgtattggtctggctgcggatgaggtggtggaagaggcgttattacgcttgcaggcggtggtggaataacggtaactgatgaaatcgagcgcgcgaatgttttcaaaatgaacggcaaatggtacttgttcactgattcacgcggttcaaaaatgacgatcgatggtattaactcaaacgatatttacatgcttggttatgtatcaaactctttaaccggcccttacaagccgctgaacaaaacagggcttgtgctgcaaatgggtcttgatccaaacgatgtgacattcacttactctcacttcgcagtgccgcaagccaaaggcaacaatgtggttatcacaagctacatgacaaacagaggcttcttcgaggataaaaagggcaacatttgcgccaagcttcttaatgaacatcaaaggcaataatcgtgaattgccctttctcctggagtccactatgaatgaatacattgagcagcgaaagccatgtgacacgatgaaagtgggaggaaatctggattccaaaggctatggagtagcaacgcccaagggttcctcattaagctttatctgttcgggcaatacgatgcccattgtacttgttgactggtctgatatccgtgagcaaaaacggcttatggtattgcgagcttcagtcgcactacacggtcgttctgttactctttatgagaaagcgttcccgctttcagagcaatgttcaaagaaagctcatgaccaatttctagccgaccttgcgagcattctaccgagtaacaccacaccgctcattgtcagtgatgctggctttaaagtgccatggtataaatccgttgagaagctggaaaacatctttaatgcacgctaacacaaagaatggcaaaaatagaagcacgggtagtcatctaagacgacacgcaccgacgaccaacaatgacctagccaaataatcctccctaactcattttatgaggccagcatcatcctgataccaaagccgggcagagacacaaccaaaaaagagaattttagaccaatatccttgatgaacattgatgcaaaaatcctcaataaaatactggcaaaccgaatccagcagcacatcaaaaagcttatctgccatgatcaagtgggcttcatccctgggatgcaaggctggttcaatatacgcaaatcaataaatgtaatccagcatataaacataaacagaaccaaaaataaaaaccacatgattatctcaatagatgcagaaaaggcctttgacaaaattcaacagctcttcatgctaaaaactctcaataaattaggtattgatgggatgtatctcaaaataataagagctatctatgacaaacacacagccaatatcatactgaatgggcaaaaactggaagcattccctttgaaaactggcacaagacagggatgccctctctcaccactcctattcaacatagtgttggaagttctggccagggcaattaggcaggagaaggaaataaagggtattcaattaggaaaagaggaagtcaaattgtccctgtttgcagacgacatgattgtatatctagaaaaccccattgtctcagctcaaaatctccttaagctgataaacaacagtgaagtctcaggatacaaaatcaatgtacaaaaatcacaagcattcttataccccaataacagacaaacagagagccaaatcatgagtgaactcccattcacaattgcttcaaagagaataaaatacttaggaatccaacttacaagggacgtgaaggacctcttcaaggagaactttaagtgtgtatttttaatataa

SEQ ID NO: 141426 - DNA, 9591 bp, Homo sapiens
ccgaccaacaccaacacccagctccgacgcagctcctctgcgcccttgccgccctccgagccacagctttcctcccgctcctgcccccggcccgtcgccgtctccgcgctcgcagcggcctcgggagggcccaggtagcgagcagcgacctcgcgagccttccgcactcccgcccggttccccggccgtccgcctatccttggccccctccgctttctccgcgccggcccgcctcgcttatgcctcggcgctgagccgctctcccgattgcccgccgacatgagctgcaacggaggctcccacccgcggatcaacactctgggccgcatgatccgcgccgagtctggcccggacctgcgctacgaggtgaccagcggcggcgggggcaccagcaggatgtactattctcggcgcggcgtgatcaccgaccagaactcggacggctactgtcaaaccggcacgatgtccaggcaccagaaccagaacaccatccaggagctgctgcagaactgctccgactgcttgatgcgagcagagctcatcgtgcagcctgaattgaagtatggagatggaatacaactgactcggagtcgagaattggatgagtgttttgcccaggccaatgaccaaatggaaatcctcgacagcttgatcagagagatgcggcagatgggccagccctgtgatgcttaccagaaaaggcttcttcagctccaagagcaaatgcgagccctttataaagccatcagtgtccctcgagtccgcagggccagctccaagggtggtggaggctacacttgtcagagtggctctggctgggatgagttcaccaaacatgtcaccagtgaatgtttggggtggatgaggcagcaaagggcggagatggacatggtggcctggggtgtggacctggcctcagtggagcagcacattaacagccaccggggcatccacaactccatcggcgactatcgctggcagctggacaaaatcaaagccgacctgcgcgagaaatctgctatctaccagttggaggaggagtatgaaaacctgctgaaagcgtcctttgagaggatggatcacctgcgacagctgcagaacatcattcaggccacgtccagggagatcatgtggatcaatgactgcgaggaggaggagctgctgtacgactggagcgacaagaacaccaacatcgctcagaaacaggaggccttctccatacgcatgagtcaactggaagttaaagaaaaagagctcaataagctgaaacaagaaagtgaccaacttgtcctcaatcagcatccagcttcagacaaaattgaggcctatatggacactctgcagacgcagtggagttggattcttcagatcaccaagtgcattgatgttcatctgaaagaaaatgctgcctactttcagttttttgaagaggcgcagtctactgaagcatacctgaaggggctccaggactccatcaggaagaagtacccctgcgacaagaacatgcccctgcagcacctgctggaacagatcaaggagctggagaaagaacgagagaaaatccttgaatacaagcgtcaggtgcagaacttggtaaacaagtctaagaagattgtacagctgaagcctcgtaacccagactacagaagcaataaacccattattctcagagctctctgtgactacaaacaagatcagaaaatcgtgcataagggggatgagtgtatcctgaaggacaacaacgagcgcagcaagtggtacgtgacgggcccgggaggcgttgacatgcttgttccctctgtggggctgatcatccctcctccgaacccactggccgtggacctctcttgcaagattgagcagtactacgaagccatcttggctctgtggaaccagctctacatcaacatgaagagcctggtgtcctggcactactgcatgattgacatagagaagatcagggccatgacaatcgccaagctgaaaacaatgcggcaggaagattacatgaagacgatagccgaccttgagttacattaccaagagttcatcagaaatagccaaggctcagagatgtttggagatgatgacaagcggaaaatacagtctcagttcaccgatgcccagaagcattaccagaccctggtcattcagctccctggctatccccagcaccagacagtgaccacaactgaaatcactcatcatggaacctgccaagatgtcaaccataataaagtaattgaaaccaacagagaaaatgacaagcaagaaacatggatgctgatggagctgcagaagattcgcaggcagatagagcactgcgagggcaggatgactctcaaaaacctccctctagcagaccagggatcttctcaccacatcacagtgaaaattaacgagcttaagagtgtgcagaatgattcacaagcaattgctgaggttctcaaccagcttaaagatatgcttgccaacttcagaggttctgaaaagtactgctatttacagaatgaagtatttggactatttcagaaactggaaaatatcaatggtgttacagatggctacttaaatagcttatgcacagtaagggcactgctccaggctattctccaaacagaagacatgttaaaggtttatgaagccaggctcactgaggaggaaactgtctgcctggacctggataaagtggaagcttaccgctgtggactgaagaaaataaaaaatgacttgaacttgaagaagtcgttgttggccactatgaagacagaactacagaaagcccagcagatccactctcagacttcacagcagtatccactttatgatctggacttgggcaagttcggtgaaaaagtcacacagctgacagaccgctggcaaaggatagataaacagatcgactttaggttatgggacctggagaaacaaatcaagcaattgaggaattatcgtgataactatcaggctttctgcaagtggctctatgatgctaaacgccgccaggattccttagaatccatgaaatttggagattccaacacagtcatgcggtttttgaatgagcagaagaacttgcacagtgaaatatctggcaaacgagacaaatcagaggaagtacaaaaaattgctgaactttgcgccaattcaattaaggattatgagctccagctggcctcatacacctcaggactggaaactctgctgaacatacctatcaagaggaccatgattcagtccccttctggggtgattctgcaagaggctgcagatgttcatgctcggtacattgaactacttacaagatctggagactattacaggttcttaagtgagatgctgaagagtttggaagatctgaagctgaaaaataccaagatcgaagttttggaagaggagctcagactggcccgagatgccaactcggaaaactgtaataagaacaaattcctggatcagaacctgcagaaataccaggcagagtgttcccagttcaaagcgaagcttgcgagcctggaggagctgaagagacaggctgagctggatgggaagtcggctaagcaaaatctagacaagtgctacggccaaataaaagaactcaatgagaagatcacccgactgacttatgagattgaagatgaaaagagaagaagaaaatctgtggaagacagatttgaccaacagaagaatgactatgaccaactgcagaaagcaaggcaatgtgaaaaggagaaccttggttggcagaaattagagtctgagaaagccatcaaggagaaggagtacgagattgaaaggttgagggttctactgcaggaagaaggcacccggaagagagaatatgaaaatgagctggcaaaggtaagaaaccactataatgaggagatgagtaatttaaggaacaagtatgaaacagagattaacattacgaagaccaccatcaaggagatatccatgcaaaaagaggatgattccaaaaatcttagaaaccagcttgatagactttcaagggaaaatcgagatctgaaggatgaaattgtcaggctcaatgacagcatcttgcaggccactgagcagcgaaggcgagctgaagaaaacgcccttcagcaaaaggcctgtggctctgagataatgcagaagaagcagcatctggagatagaactgaagcaggtcatgcagcagcgctctgaggacaatgcccggcacaagcagtccctggaggaggctgccaagaccattcaggacaaaaataaggagatcgagagactcaaagctgagtttcaggaggaggccaagcgccgctgggaatatgaaaatgaactgagtaaggtaagaaacaattatgatgaggagatcattagcttaaaaaatcagtttgagaccgagatcaacatcaccaagaccaccatccaccagctcaccatgcagaaggaagaggataccagtggctaccgggctcagatagacaatctcacccgagaaaacaggagcttatctgaagaaataaagaggctgaagaacactctaacccagaccacagagaatctcaggagggtggaagaagacatccaacagcaaaaggccactggctctgaggtgtctcagaggaaacagcagctggaggttgagctgagacaagtcactcagatgcgaacagaggagagcgtaagatataagcaatctcttgatgatgctgccaaaaccatccaggataaaaacaaggagatagaaaggttaaaacaactgatcgacaaagaaacaaatgaccggaaatgcctggaagatgaaaacgcgagattacaaagggtccagtatgacctgcagaaagcaaacagtagtgcgacggagacaataaacaaactgaaggttcaggagcaagaactgacacgcctgaggatcgactatgaaagggtttcccaggagaggactgtgaaggaccaggatatcacgcggttccagaactctctgaaagagctgcagctgcagaagcagaaggtggaagaggagctgaatcggctgaagaggaccgcgtcagaagactcctgcaagaggaagaagctggaggaagagctggaaggcatgaggaggtcgctgaaggagcaagccatcaaaatcaccaacctgacccagcagctggagcaggcatccattgttaagaagaggagtgaggatgacctccggcagcagagggacgtgctggatggccacctgagggaaaagcagaggacccaggaagagctgaggaggctctcttctgaggtcgaggccctgaggcggcagttactccaggaacaggaaagtgtcaaacaagctcacttgaggaatgagcatttccagaaggcgatagaagataaaagcagaagcttaaatgaaagcaaaatagaaattgagaggctgcagtctctcacagagaacctgaccaaggagcacttgatgttagaagaagaactgcggaacctgaggctggagtacgatgacctgaggagaggacgaagcgaagcggacagtgataaaaatgcaaccatcttggaactaaggagccagctgcagatcagcaacaaccggaccctggaactgcaggggctgattaatgatttacagagagagagggaaaatttgagacaggaaattgagaaattccaaaagcaggctttagaggcatctaataggattcaggaatcaaagaatcagtgtactcaggtggtacaggaaagagagagccttctggtgaaaatcaaagtcctggagcaagacaaggcaaggctgcagaggctggaggatgagctgaatcgtgcaaaatcaactctagaggcagaaaccagggtgaaacagcgcctggagtgtgagaaacagcaaattcagaatgacctgaatcagtggaagactcaatattcccgcaaggaggaggctattaggaagatagaatcggaaagagaaaagagtgagagagagaagaacagtcttaggagtgagatcgaaagactccaagcagagatcaagagaattgaagagaggtgcaggcgtaagctggaggattctaccagggagacacagtcacagttagaaacagaacgctcccgatatcagagggagattgataaactcagacagcgcccatatgggtcccatcgagagacccagactgagtgtgagtggaccgttgacacctccaagctggtgtttgatgggctgaggaagaaggtgacagcaatgcagctctatgagtgtcagctgatcgacaaaacaaccttggacaaactattgaaggggaagaagtcagtggaagaagttgcttctgaaatccagccattccttcggggtgcaggatctatcgctggagcatctgcttctcctaaggaaaaatactctttggtagaggccaagagaaagaaattaatcagcccagaatccacagtcatgcttctggaggcccaggcagctacaggtggtataattgatccccatcggaatgagaagctgactgtcgacagtgccatagctcgggacctcattgacttcgatgaccgtcagcagatatatgcagcagaaaaagctatcactggttttgatgatccattttcaggcaagacagtatctgtttcagaagccatcaagaaaaatttgattgatagagaaaccggaatgcgcctgctggaagcccagattgcttcagggggtgtagtagaccctgtgaacagtgtctttttgccaaaagatgtcgccttggcccgggggctgattgatagagatttgtatcgatccctgaatgatccccgagatagtcagaaaaactttgtggatccagtcaccaaaaagaaggtcagttacgtgcagctgaaggaacggtgcagaatcgaaccacatactggtctgctcttgctttcagtacagaagagaagcatgtccttccaaggaatcagacaacctgtgaccgtcactgagctagtagattctggtatattgagaccgtccactgtcaatgaactggaatctggtcagatttcttatgacgaggttggtgagagaattaaggacttcctccagggttcaagctgcatagcaggcatatacaatgagaccacaaaacagaagcttggcatttatgaggccatgaaaattggcttagtccgacctggtactgctctggagttgctggaagcccaagcagctactggctttatagtggatcctgttagcaacttgaggttaccagtggaggaagcctacaagagaggtctggtgggcattgagttcaaagagaagctcctgtctgcagaacgagctgtcactgggtataatgatcctgaaacaggaaacatcatctctttgttccaagccatgaataaggaactcatcgaaaagggccacggtattcgcttattagaagcacagatcgcaaccggggggatcattgacccaaaggagagccatcgtttaccagttgacatagcatataagaggggctatttcaatgaggaactcagtgagattctctcagatccaagtgatgataccaaaggattttttgaccccaacactgaagaaaatcttacctatctgcaactaaaagaaagatgcattaaggatgaggaaacagggctctgtcttctgcctctgaaagaaaagaagaaacaggtgcagacatcacaaaagaataccctcaggaagcgtagagtggtcatagttgacccagaaaccaataaagaaatgtctgttcaggaggcctacaagaagggcctaattgattatgaaaccttcaaagaactgtgtgagcaggaatgtgaatgggaagaaataaccatcacgggatcagatggctccaccagggtggtcctggtagatagaaagacaggcagtcagtatgatattcaagatgctattgacaagggccttgttgacaggaagttctttgatcagtaccgatccggcagcctcagcctcactcaatttgctgacatgatctccttgaaaaatggtgtcggcaccagcagcagcatgggcagtggtgtcagcgatgatgtttttagcagctcccgacatgaatcagtaagtaagatttccaccatatccagcgtcaggaatttaaccataaggagcagctctttttcagacaccctggaagaatcgagccccattgcagccatctttgacacagaaaacctggagaaaatctccattacagaaggtatagagcggggcatcgttgacagcatcacgggtcagaggcttctggaggctcaggcctgcacaggtggcatcatccacccaaccacgggccagaagctgtcacttcaggacgcagtctcccagggtgtgattgaccaagacatggccaccaggctgaagcctgctcagaaagccttcataggcttcgagggtgtgaagggaaagaagaagatgtcagcagcagaggcagtgaaagaaaaatggctcccgtatgaggctggccagcgcttcctggagttccagtacctcacgggaggtcttgttgacccggaagtgcatgggaggataagcaccgaagaagccatccggaaggggttcatagatggccgcgccgcacagaggctgcaagacaccagcagctatgccaaaatcctgacctgccccaaaaccaaattaaaaatatcctataaggatgccataaatcgctccatggtagaagatatcactgggctgcgccttctggaagccgcctccgtgtcgtccaagggcttacccagcccttacaacatgtcttcggctccggggtcccgctccggctcccgctcgggatctcgctccggatctcgctccgggtcccgcagtgggtcccggagaggaagctttgacgccacagggaattcttcctactcttattcctactcatttagcagtagttctattgggcactagtagtcagttgggagtggttgctataccttgacttcatttatatgaatttccactttattaaataatagaaaagaaaatcccggtgcttgcagtagagtgataggacattctatgcttacagaaaatatagccatgattgaaatcaaatagtaaaggctgttctggctttttatcttcttagctcatcttaaataagcagtacacttggatgcagtgcgtctgaagtgctaatcagttgtaacaatagcacaaatcgaacttaggatttgtttcttctcttctgtgtttcgatttttgatcaattctttaattttggaagcctataatacagttttctattcttggagataaaaattaaatggatcactgatattttagtcattctgcttctcatctaaatatttccatattctgtattaggagaaaattaccctcccagcaccagcccccctctcaaacccccaacccaaaaccaagcattttggaatgagtctcctttagtttcagagtgtggattgtataacccatatactcttcgatgtacttgtttggtttggtattaatttgactgtgcatgacagcggcaatcttttctttggtcaaagttttctgtttattttgcttgtcatattcgatgtactttaaggtgtctttatgaagtttgctattctggcaataaacttttagacttttgaa

SEQ ID NO: 141427 - DNA, 2595 bp, Homo sapiens
atggccgggctgggggcgtcgctccacgtctggggttggctaatgctcggcagctgcctcctggccagagcccaggtaagagccagtgctccgcgacacctgttttcgcggagcctccggcggggactcagctttagcgacacggaggccaggtgcgcgcgagagctcattcatgttcacacgtccacaaacgccccggcacgcaccgaggcgtacccggcaggcagcgcggaaccccctaggcgaccccgcgctggccgggagcactctttcttcagccaaaggtacgttccattaccgcccctcgggggcgcgctaggcagcgggccggccaagctgccgccgcccagggcgccctgtcccgttcgcttttgtgccgacctggaaacactctgtggtgctctagattgttacaaagttcggggtggtgcagccccagcgcgccccgctccccggcctgcaggtggcatacaagtctcttcgctgtcgggattcgggactgaatctctgccgggcggcaaccccttcccccaccgggatcaccgggaaagtggcaccatggattctccatctttgactgtggccacgcccctctcgctgactccgcccatcccacgggaattggcgtgtggcgattggaggcgtgtcgggggcggggctgggggaggtgggctgaggaggcggggcctgggaggggacaaagccgggaagaggaaaagctcggacctaccctgtggtcccgggtttctgcagagtctacttcagaagcggaggcactgggagtccggtttgggattgccaggctgtggttgtgagtctgagcttgtgagcggctgtggcgccccaactcttcgccagcatatcatcccggcagaaggcaggaatggggtaaaggaaaaaagcgcagatcttgggtgtggagggagtcaaggcctgcgtgcaaagaagggaacaaatccaggtattgagaatgggaaaagaaaagggaaggaggggatgctggatgcttggatatgcagaaggtctgcttttgggcctgggagggagaaactgggcggtgaggaagttggatgcaacgacaaggggaaaatcaggtttattgaagtcaaaatgtccaaaaaaatcagtggcggttctgtggtagagatgcaaggagatgaaatgacacgaatcatttgggaattgattaaagagaaactcatttttccctacgtggaattggatctacatagctatgatttaggcatagagaatcgtgatgcaccaacgaccaagtcaccaaggatgctgcagaggctgataagaagcataatgtttggcgtcaaatgtgccactatcactcctgatgagaagagggttgaggagttcaagttgaaacaaatgtggaaatcaccaaatggcaccatacgaaatattctgggtggcacggtcttcagagaagccattatctgcaaaaatatcccccggcttgtgagtggatgggtaaaacctatcatcataggtcgtcatgcttatggggatcaaggatttggatctaacatgcaaaatgccatcatgaagaaacttaagtggttgcatttggccagggtagggaaattttcagatgctaatgccaagttttactgtcggctctactatgcgggagagtttcataagatgcgtgaagtgattctggacagcagtgaagaagatttcattcgttccctctcccactcatcaccctggcaggcccggggaggcaaatcaggagctgccttctatgcaactgaggatgatagatttattttgaagcaaatgcctcgtctggaagtccagtccttcctcgactttgcaccacattacttcaattatattacaaatgctgttcaacaaaagaggcccacggcgttggccaaaattcttggagtttacagaattggttataagaactctcagaacaacactgagaagaagttagatctccttgtcatggaaaatcttttctacgggagaaagatggcacaggtttttgatttgaagggctctcttaggaatcggaatgtaaaaactgacactggaaaagagagttgtgatgtggtcctgctagatgaaaatctcctaaagatggttcgagacaaccctctatatattcgttctcattccaaagctgtgctgagaacctcgatccatagtgactcccatttcctttctagccacctcattatagattattctttgctggttgggcgagatgatactagcaatgagctagtagttggaattatagattatattcgaacatttacatgggacaaaaagcttgagatggttgtgaaatcaacaggaattttaggtggacaagttttgaatctgcttgaagaaattgacaacaaaaggaaatggagtttgtcctgcaagcctagtctttgtgttactggtggagggtgtccaggttcttggcgttttgaacaaagaattggacaaaacacaaaaagcaaggaaagaatgaagcaacaaaagcagagatttattgaaaacgaaagtacattccacagagtaggagcccaggagcactggggcacaacagctcccgttacagaactttctggggtttaa

SEQ ID NO: 141428 - DNA, 2140 bp, Homo sapiens
gactgaagctgggaaggtgactattgggatcgatgaacacttggctgagttggaccagctgcagcagcctcagctgggggcaggggtaagggagttaacagggatgaacaagcctagcaaggtcaaggttgaagttctccaaggttgcctttgggtgaaaagctctcttgatcaagaaattgtggaacaccttataatgagcaaccaggaaaaagcatgtgttcctgatgtctgtgagcaccagtctgagatgcgcggatgcttcagcatgcctccagaagcagagaaagaacaaaagcactggaaccggtctccggttgttcctctacctgtgatttccttccccatctgtagacattctcatcccacaagccccagctccaatgcagcttccctctctgaagcttcttgggattctagctatctccccaggaaaataccactccatggcagacccatatatccaaatcgtagagaacgagaagctatgattttatcatcttatgctggaatcttaatgaacagtatcccgattgaggaagtctttaaaatttatggggctgattcttctgccgattctggtaccatcaaggcagcgcggaaccccctaggcgaccccgcgctggccgggagcactctttcttcagccaaaggtacgttccattaccgcccctcggggcgcgctaggcagcgggccggccaagctgcgccgcccagggcgccctgtcccgttcgcttttgtgccgacctggaaacactctgtggtgctctagattgttacaaagttcggggtggtgcagccccagcgcgccccgctccccggcctgcaggtggcatacaagtctcttcgctgtcgggattcgggactgaatctctgccgggcggcaaccccttcccccaccgggatcaccgggaaagtggcaccatggattctccatctttgactgtggccacgcccctctcgctgactccgcccatcccacgggaattggcgtgtggcgattggaggcgtgtcgggggcggggctgggggaggtgggctgaggaggcggggcctgggaggggacaaagccgggaagaggaaaagctcggacctaccctgtggtcccgggtttctgcagagtctacttcagaagcggaggcactgggagtccggtttgggattgccaggctgtggttgtgagtctgagcttgtgagcggctgtggcgccccaactcttcgccagcatatcatcccggcagaaggcaggaatggggtaaaggaaaaaagcgcagatcttgggtgtggagggagtcaaggcctgcgtgcaaagaagggaacaaatccaggtattgagaatgggaaaagaaaagggaaggaggggatgctggatgcttggatatgcagaaggtctgcttttgggcctgggagggagaaactgggcggtgaggaagttggatgcaacgacaaggggaaaatcaggtttattgaagtcaaaatgtccaaaaaaatcagtggcggttctgtggtagagatgcaaggagatgaaatgacacgaatcatttgggaattgattaaagagaaactcatttttccctacgtggaattggatctacatagagaagccattatctgcaaaaatatcccccggcttgtgagtggatgggtaaaacctatcatcataggtcgtcatgcttatggggatcaatacattacaaaaggaaaagtgaccatcatcaatctgaagaggacccgggagaagtttctgctggcagctcgtgccattgaaaacccctctgaggtcaatgtcatgtcctctaggaacactggccagggggctgtgctgaaggttgctgctgtcatgggagccactcttattgctggtagcttcactcctagaaccttcactcaccagatccgagatcctggagagattgaaaaagaagagcaggccacagctggaaaagctgagacccaggaggaatttcagggtgaatggactgctccaactcctgagttcgctgctactgagcctgaggttgcagactggcctgaagttgcgcaggtgccctctgggcctattcagcaggtccccactgaagactggagcactcagcctgccgctgaaactggtctgcagctcccgtgctcaggccagtga

SEQ ID NO: 141429 - DNA, 2358 bp, Homo sapiens
atgcggccggcgctctgcgatccaaggcacactggggtctttcatccggtgtttttaaaaaggaggaaacaaaaggctcagaggcagggccccaggggccaacctgtccccgcacgcgtcaggacacccggtcctgctcccagcgcggccgggaagttctttcgggacctggggcaaaaaaacctttccaccttcgggacccgagtctcccagtcgtccagaggaggacggtccctccctgtcccgcgagccccgcagcccgcgctctccgggcagcgcaggtccgggccagactcggcgcggatcatgcggcccagagtgttgatccgcgggtgggagcctccgttgcagctcatgtcggcgggcaatcgggagagcggctcagcgccgaggcataagcgaggcgggccggcgcggagaaagcggagggggccaaggataggcggacggccggggaaccgggcgggagtgcggaaggctcgcgaggtcgctgctcgctacctgggccctcccgaggccgctgcgagcgcggagacggcgacgggccgggggcaggagcgggaggaaagctgtggctcggagggcggcaagggcgcagaggagctgcgtcggagctgggtgttggtgttggaagaagttatagcacagttccacagcagtttcatcaaacccgtgaagcagttctgtcttgcaaaggtgggtgtggagcggcacacttcactctcgttaaacctgtccgacggctccttgagttttaactgcttagcagtttggcttcaggtggaaatgaacaaagcaactcggagtcctttcccaccaaggcacacagaagaaacatcaccatcatctctaaacagtcaagtgaaattgaagggggcagaggaggtctccgtgcaccgtggaggggaagggaagtatccgcgggacgtggaggagggaggggagatctccatggaggctggagggggaagggaggtgaccacagctctgcttcctcctcagggaaggggagtggcccagtgtggctccaaccaccaggcttcacctgtgccctcggccccaccacaggcagagcctgttgctggacttccagttcacttttgttcaggcaagtttattaaactcaaaatgtctaaaaaaatcagtggcggttctgtggtagagatgcaaggagatgaaatgacacaaatcatttgggaattgaataaagagaaactcatttttccctatgtggaactggatgtacatagctatgatttaggcatagagtactgtgatgccaccaacgaccaggtcaccaaggatgctgcagaagctataaagaagtataacgttggtgtcaagtgtgccactatcactgctgatgagaaaagggttgaggagttcaagttgaaacaaatgtggaaatcgccaaatggcaccatccaaaatattctggttggcacggtcctcagagaagccattatctgcaaaaatatcccccagcttgtgagtggatgggtaaaatccatcatcgtaggtcgcattgcttatggggatcaatacagagcagctgattttgttgttcctgggcctggaaaagtagagataacctacacactaagtgacagaacccaaaaggtgacatacctgctgagcaccaaaaacactattctgaagaaatatgatggacgttttaaagacatctttcaggagatatatgacaagcagtacaagtcccagtttgaagcccaaaagatctggtatgagcataggctcgctgatgacatggtggcccaagctatgaaatcagaaggaggcttcatctgggcctgtaaaaactatgatggtgacatgcagtcagactctgtggcccaagggtatggctctcttggcatgatgaccagcatgctagtgtgtccacatggcaagacagtagaagcagaggctgcccactggactgtaacccgtcacttctgcatgtaccagaaaggccaggagatatccaccaatcccattgcttccatttttgcctggaccagagggttggccctccgagcaaagactgataacaataaagagcttgccttttttgcaaatgctttggaagaagtctgtattgagacaattgaggctggtttcatgaccaaggacttggctgcttgcattaaaggtttacccagtgcgcaatgttctgactacttgaatacttttgagttcatggacaaacttggagaaaacttgaagatcaaactggctcaggccaaactttacgttcatacctgggctgaggaggataagtgtcttttgataactaggtctacaggttttcatttttctgtgtcacactcaaggataaaggcaaaatcgattgtgtaa

SEQ ID NO: 141430 - DNA, 2417 bp, Homo sapiens
ctactgatagaccttcacgaattcggcacgaggaaaagctcggacctaccctgtggtcccgggtttctgcagagtctacttcagaagcggaggcactgggtattccggtttgggattgccaggctgtggttgtgagtctgagcttgtgagcggctgtggcgccccaactcttcgccagcatatcatcccggcaggcgataaactacattcagttgagtctgcaagactgggaggaactggggtgataagaaatctattcactgtcaaggtttattgaagtcaaaatgtccaaaaaaatcagtggcggttctgtggtagagatgcaaggagatgaaatgacacgaatcatttgggaattgattaaagagaaactcatttttccctacgtggaattggatctacatagctatgatttaggcatagagaatcgtgatgccaccaacgaccaagtcaccaaggatgctgcagaagctataaagaagcataatgttggcgtcaaatgtgccactatcactcctgatgagaagagggttgaggagttcaagttgaaacaaatgtggaaatcaccaaatggcaccatacgaaatattctgggtggcacggtcttcagagaagccattatctgcaaaaatatcccccggcttgtgagtggatgggtaaaacctatcatcataggtcgtcatgcttatggggatcaatacagagcaactgattttgttgttcctgggcctggaaaagtagagataacctacacaccaagtgacggaacccaaaaggtgacatacctgggtacataactttgaagaaggtggtggtgttgccatggggatgtataatcaagataagtcaattgaagattttgcacacagttccttccaaatggctctgtctaagggttggcctttgtatctgagcaccaaaaacactattctgaagaaatatgatgggcgttttaaagacatctttcaggagatgtgatgacaagcagtacaagtcccagtttgaagctcaaaagatctggtatgagcataggctccatcgacggacatggtggcccaagctatgaaatcagagggaggcttcatctgggcctgtaaaaactatgatggtgacgtgcagtcggactctgtggcccaagggtatggctctctcggcatgatgaccagcgtgctggttttgtccagatggcaagacagtagaagcatgaggctgcccacgggactgtaacccgtcactaccgcatgtaccaggaaaggacagggagacgtccacccaatcccattggcttccatttttgcctgggggccagagggtttaggcccacagagcaaagcttgataacaataaagagcttgccttctttgcaaatgctttggaagaaagcttttatgaaacacatgagggctggcttcatgaccaaggacttggctgcttgcattaaaggtttacccaatgtgcaacgttctgactacttgaatacatttgagttcaatggataaacttggagaaaacttgaagatcaaactagctcaggccaaactttaagttcatacctgagctaagaaggataattgtcttttggtaactaggtctacaggtttacatttttctgtgttacactcaaggataaaggcaaaatcaattttgtaatttgtttagaagccagagtttatcttttctataagtttacagcctttttcttatatatacagttattgccacctttggtgaacatggcaagggactttttttacaattttttatgtttagttgtctagtaacccagcctagggaattcgggtagtactcatttgtattcactgtcactttttctcatgttctaattataaatgaccaaaatcaagattgctgcaaagggtgaaatgatagccacagtattgctccctaaaatatgcataaagtagaaattcactggcctttcccctcctggtccatgaccttgggcacagggaagttctggtgtcatagatatcccgttttgtgaggtagagctgtgcattaaacttgcacatgactggaacgaagtatgagtgcaactcaaatgtgttgaagatactgcagtcatttttgtaaagaccttgctgaatgtttccaatagactaaatactgtttaggccgcaggagagtttggaatccggaataaatactacctggagtcttgtcctctccatttttctctttctcctcctggcctggcctgaatattatactactctaaatagcatatttcatccaagtgcaataatgtaagctgaatcttttttggacttctgctggcctgttttatttcttttatataaatgtgatttctcagaaattgatattaaacactatcttatcttctcctgaactgttgattttaattaaaattaagtgctaattaccaaaaaaaaaaa

SEQ ID NO: 141431 - DNA, 692 bp, Homo sapiens; identical to SEQ ID NO: 118832

SEQ ID NO: 141432 - DNA, 2152 bp, Homo sapiens
atgcagaagggcaggtcgcggggagtgtttttgggctctcaccccacaacggcgtctaaggttgaggttttacattttacagctcccgaagcaccagtggagtacattaccttcaagcaaaacactgagaggcttctaaaaactattttgcttaaggaggatcacttttgctcatggttctctaataagaacattttccaaggtgcagcaagtttcgatcttcaaaaacccgcagctactcacagtgtaagatgcctgtcggggtggggctctgggcctggaaaaactagagcagtctggatgctgcgaggcggcgagcagcccagaggagcagtctggagccgtggcggcgacagaggcctcctcagacattgacatagcgacctcagagctgagtgtgacagtgaccggagatggcagtgatagcagggatggtggattccccaacgatgccagcacagaaaatcgaagctcagaccaagaaagcgcaagtgaagacatcgaacttgagagcttggaggactttgagcatttcctcatgagtggtgaaagtttattccattaccctttagtgggagaggaggagacagaaagggaggaggaagacgaagagatacaagaggagggaggggaggaggaggaagaggaggaggaggaggaggaggaggaggaggaggaggaggaggaggaagaagaacagcctcgggcgggtccacaaggcagtggcggcaaccatgagcagtattcgttagaggaggatcaggcgctggaggagtgggtttcctcagagacatctgccctgccccgacctcgctggcaggtcgttactgctcttcaccagcggcagctgggttcacgtccccgctttgtatatgaggcctgtggggcaagagcctttgtgcagcgtttccgcctgcaatatcgtcttgcagaccatgtcggctgtgtcaatactgtacactttaaccagcgtggcacccggctggccagtagcggtgatgacctaaaggtgatagtgtgggactgggtgcggcagaggccagtactgaactttgaaagtggtcacacaaataatgtcttccaggccaagttccttcctaactgtggtgattccactctggccatgtgtgcccgtgatgggcaggtacgggtagcagagttaattaatgcatcatatttcaacaatactaagtgtgtggcccagcacaggggacctgcccacaagttggctctggagcctgactctccttataagttcctcacttcaggtgaagatgctgttgtcttcaccattgacctcagacaagaccggccagcttcaaaagttgtggtaacaagagaaaatgataagaaagtgggactgtatacaattactgtgaatcccgccaatacctaccaatttgcagtgggtggacaagatcagtttgtaaggatttatgaccagaggaaaattgataagaaagaaaacaatggcgtgctcaagaaattcactcctcatcatctggttaattgtgatttcccaacaaacatcacctgcgttgtgtacagccacgatggcacagagctgctagccagctacaatgatgacgatatttacctcttcaactcctctcacagtgatggtgctcaatacagtaagagatttaagggacacagaaataataccacagtcaaaggtgttaatttctatggccccaggagtgagtttgtagtgagcggtagtgattgcgggcacatcttcttctgggagaaatcatcctgccaaatcatccagttcctaaaggggagcagagaaggtacaataaactgtcttgaaccccacccttacctacctgtgttggcgtgcagtggcctagatcatgatgtcaagatctggacacccacagctaaagctgccactgagcttactgggttaaagaaggtgattaagaagaacaagtgggaacgagatgaagacagcttgcaccatggcagcctgtttgaccagtacatgctttggttcctcctgcgtcacgtgacgcagagaggtcgtcaccaggactggagaagtggtgaagctgaatttccagatgaagaatcggatgagtcttccagcacttcagagacatctgaggaggaggtccaagaccgagtgcagtgcatgccatcctga

SEQ ID NO: 141433 - DNA, 293 bp, Homo sapiens
  misc_feature (1)...(293): n = a,t,c or g
ctaaacctgctcctccaaagccagagcccaagcctaaaaaggcccctgcaaagaagggagagaaggtacccaaaggaaaaagagaaaagctgatgctggcaaggagcgggaaggtgctggagatcccaagtgaagtgtgtgcattttttataactgtacttctggtgactgtacagtttgaaaatattcttatcaagtttataaaattgcagattttggtttacctttttttaagcaatgtggttagacnccagaacacttcaatggtggtttttggggggaaggggtatntg

SEQ ID NO: 141434 - DNA, 947 bp, Homo sapiens
tcgtgcttgtccttgaaactaaagaacatcaaagaacaattccctttgcatccatgaattatggttagtgcctggttttgaatcattgcctctacttgggactcttgcccctatgggttttgctggttctgaaatttctgatgcctgtagccaaagtgggacatttgagtgggcttctggaaatccaacattctagaagaaaggcccaccccacaaaaacttttgaggaggaggagaaaacttctcctacccctggtaccttttggttggttgtgggtggttttccttccagtcccattgtacctgatgttccacctttttccctcctccttcctgcccaaaaaaagaaaccctgctccctcccaaagcccagagccccaagcctaaaaaggcccctgcaaagaagggagagaaggtacccaaagggaaaaagggaaaagctgatgctggcaaggaggggaataaccctgcagaaaatggagatgccaaaacagcccaggcacagaaagctgaaggtgctggagatgccaagtgaagttgtgtgcattttttgattaactgtgttacttctgggtgactgtacagtttgaaatactattttttatccaagttttattaaaaatgcagagttttgttttactttttttttttttttaaaagctatgtcgttagccccccagaacacttcattgttgtttttgggggggaagggggcatttggcactaatagaatgtctccaaagttgaattgatgtggaaaaaacacctttcccttctaagttttgagagacttcctcttggctcccaggaggagggattccctgactttgacacacatggccaccttggcacaaaaagccttgtggtatagaaaaacaaatttgtttttatgtcctcttctccctttccatctttcagcatagacttaactcccttaagcccagaca

SEQ ID NO: 141435 - DNA, 2253 bp, Homo sapiens
cacgcgtccggctccaggcaccaggctctttccccttcagtgtctcagaggaggcgacggcagcaccatggacccccgcttggccactgtccgccagacctgctgctgcttcaatgaccgcatcgcaaccaccgccctggccatctaccatgtgatcatgagcgtcttgttgttcatcgagcactcagtacaggtggcccatggcaaggcgtcctgcaagctctcccagatgggctacctcaggatcgctgacctgatctccagcttcctgctcatcaccatgctcttcatcatcagcctgagcctactgatcggcgtagtcaagaaccgggagaagtacctgctgcccttcctgtccctgcaaatcatggactatctcctgtgcctgctcaccctgctgggctcctacattgagctgcccgcctacctcaagttggcctcccggaaccgagctagctactgcaagttgcccctgatgacgctgcagctgctggacttttgcctgagcatcctgaccctctgcagctcctacatggaagtgcccacctatctcaacttcaagtccatgaaccacatgaattacctccccagccaggaggatatgcctcataaccagttcatcaagatgatgatcatcttttccatcgccttcatcactggccttatcttcaagggctacatgttcaagggcgtgtggcggtgctacagattgatcaagtgcatgaactcgggggaggagaagagaaactccaagatgctccagaaggtggtcctgccgtcctacaaggaagccctgtctttgccatcgaagtacccagaggggggcccagcaccacccccatactcagaggtgtgaccctcgccaggccccagccccagtgctgggaggggtggagctgcctcataatctgcttttttgctttggtggcccctgtggcctgggtgggccctcccgcccctccctggcaggacaatctgcttgtgtctccctcgctggcctgctcctcctgcagggcctgtgagctgctcacatttgtgttcaacgctttaggctgagtcactcctcgggtctctccataattcagcccaacaatgcttggtttatttcaatcagctctgagacttgttgtagacgattggccattctaaagttggtgagtttgtcaagcaactatcgacttgatcatacagacacaagcaactgtcaaataaaaaacccacttgtcagttcagtaaaataatttggtcaaacaacagtctattgcattgatttataaatagttgtcagttcacatagcaatttaatcaagtaatcattaattagttaccccctatatataaatatatgtaatcaatttcttcaaatagcttgcttacatgataatcaattagccaaccatgagtcatttagaatagtgataaatagaatacacagaatagtgatgaaattcaatttaaaaaatcacgttagcctccaaaccatttaattcaaatgaacccatcaactggatgccaactctggcgaatgtaggacctctgagtggctgtataattgttaattcaaatgaaattcatttaaacagttgacaaactgtcattcaacaattagctccaggaaataacagttatttcatcataaaacagtcccttcaaacacacaattgttctgctgaagagttgtcatcaacaatccaatgctcacctattcagttgctctgtgggtcagtgtgggcttgcatagcgttgggattccatgaaaggagtcattttagtggtggagctgcccagtccattccccaggccaggctgtcgctgggccatccattcagtcgattcagtcataggcgaattctgttctgcccgaggctttgtggtcaagcaaaaatttcagccctgaaaatcagggcacatctgttcgttgggacttaaacccacaggtttagtttcagttcaaaggcagggcaacccccttgtggggcactgaccctggccactgggggtgcatgggcggttgtggcagctggggaggttttgggccccaacagccctcctgtgcctgcttccctgtgtgtcggggtcctccagggagctgacccagaggtggaggccacggaggcagggtctctggggactgtcggggggtacagagggagaaggctctgcaaaagctccctggcaatacccccttgtgtaattgcttgtgtgtgcggcagggaggaagtttcaataaagcagcaacaagcttcaaaaaaa

SEQ ID NO: 141436 - DNA, 387 bp, Homo sapiens
  misc_feature (1)...(387): n = a,t,c or g
gcgcccaggagctacacaccttcgaggtgaccggccaggaaacggtcgcccagatcaaggctcatgtagcctcactggagggcattgccccggaagatcaagtcgtgctcctggcaggcgcgcccctggaggatgaggccactctgggccagtgcggggtggaggccctgactaccctggaagtagcaggccgcatgcttggaggtggccaaacaggagaagaagaagaagaagacaggtcgggctaagcggcggatgcagtacaaccggcgctttgtcaacgttgtgcccacctttggcaagaagaagggccccaatgccaacttttaaagtcttttgtaaattctgggctttctccttaataaaaaagccantttagtttcagtc

SEQ ID NO: 141437 - DNA, 456 bp, Homo sapiens
cgtgcaattccttggctggatccgaagggcttgtagcaggttggctgcggggtcagaaggcgcggtttaacttaagaacggggcctgctccgtggccctgctccagtccctatccgaactccttgggaggcctggccttccgcacgtgagccgccgcgaccaccatcccgtcgcgatcgtttctggaccgctttccactcccaaatctcctttatcccagagcatttcttggcttctcttacaagccgtcttttctttactcagtcgccaatatgcagctctttgtccgcgcccaggagctacacaccttcgaggtgaccggccaggaaacggtcgcccagatcaaggtaaggctgcttggtgcgccctgggttccattttcttgtgctcttcactctcgcggcccgagggaacgcttacgagccttatctttccctgtaggctcatgtagcctca

SEQ ID NO: 141438 - DNA, 887 bp, Homo sapiens
tctcactcaccttaggagtctgacctctcacttttccagcacgggccagggaaccatggactttacctgtagtgggaaaggaaggcaccagcaggtaagagcaagaaggtgccacccagcagaacccctcttttctcaattcaagcctttaaagagaagctgcgcccaataggtaatgagaacaaagttgcagatatttgaccttgaaatcttaagtttcatttcaggatcttccagcttctaattttatagagcactttgggggccctggtctgacctaattttagtgtggaagctgataaccagactaggatctcgtgatgtgactgaaatacaactacactctggctcagtctcccatggacgtctgtgttcaacatgagggatgtaaacaggaagaatcactctgaactgaagacagtgagaagtactctattaccataggtgtgacactcagctgtcaggactatgcaccccacactcactagacgcttaccggtacttcaaagaacattcctctctcactcacctccaaagcatgcgggcctggttacttcccagggtaagtcagggccttccaccccgcacttggcccaagagtgggcttcatccctcccaggggcgcgccttgccagggagcaccgacttgatctttccgggggcaatgcctcccagttgaaggctacatggagcctttgatcttgggcgaaccgttttccttggccggtgctggaaaagtgacaggtcgggctaagcggcggatgcagtacaaccggcgctttgtcaacgttgtgcccacctttggcaagaagaagggccccaatgccaactcttaagtcttttgtaattctggctttctctaataaaaaagccacttagttcagtaa

SEQ ID NO: 141439 - DNA, 2193 bp, Homo sapiens
atgcacgtaaagcgttttgggcagtgcctgacacatggaatcctacggcccctgaatattttggcatcttcaacctaccgcaactgtgtcaagaatgcctctcttatttctgcattgtccactggacgttttagtcatattcagacaccagttgtttcctccactcccagacttaccacatctgagagaaacctgacatgtgggcatacctcagtgatccttaatagaatggcccccgtgcttccaagtgtcctgaagctgccagtcagatctctaacatacttcagtgcaagaaaaggcaagagaaagaccgtgaaagctgtcatcgataggtttcttcgacttcattgtggcctttgggtgaggagaaagactggggacttcctgagggcaggcccatgtcgcattcaccaccatttcctggctatcaccaccaccaccaccaccaccaccaccaccaccaccaccatcatcaccaccaccaccaccaccatcatcatcatcatcatcctcatcatccttcccaggattattatggccctttcacagccactttcacaacagcacatcctgggcagctgctgtgctcagcccctgagacccaaggcccctggcatcctcccaaggagcagcctgggaaactgtgtgcccccaccctccatgagcctgaaacccgtgctggtggatccgatgtcggggggtcccaaacacggctgcatctcaatgaaaatcacacttctgggtctcaccccagacctactgaagcctctgcggatgggcccaggactttgcatgtttaacgaggtccccagagaagagttagagaagatgaaaagtgtgattgaaaatgcaaagaaaaaagaggttgctggggccaagcctcatataactgctgcagagggtaaacttcacaacatgatagttgatctggataatgtggtcaaaaaggtccaagcagctcagtctgaggctaaggttgtatctcagtatcatgagctggtggtccaagctcgggatgactttaaacgagagctggacagtattactccagaagtccttcctgggtggaaaggaatgagtgtttcagacttagctgacaagctctctactgatgatctgaactccctcattgctcatgcacatcgtcgtattgatcagctgaacagagagctggcagaacagaaggccaccgaaaagcagcacatcacgttagccttggagaaacaaaagctggaagaaaagcgggcatttgactctgcagtagcaaaagcattagaacatcacagaagtgaaatacaggctgaacaggacagaaagatagaagaagtcagagatgccatggaaaatgaaatgagaacccagcttcgccgacaggcagctgcccacactgatcacttgcgagatgtccttagggtacaagaacaggaattgaagtctgaatttgagcagaacctgtctgagaaactctctgaacaagaattacaatttcgtcgtctcagtcaagagcaagttgacaactttactctggatataaatactgcctatgccagactcagaggaatcgaacaggctgttcagagccatgcagttgctgaagaggaagccagaaaagcccaccaactctggctttcagtggaggcattaaagtacagcatgaagacctcatctgcagaaacacctactatcccgctgggtagtgcagttgaggccatcaaagccaactgttctgataatgaattcacccaagctttaaccgcagctatccctccagagtccctgacccgtggggtgtacagtgaagagacccttagagcccgtttctatgctgttcaaaaactggcccgaagggtagcaatgattgatgaaaccagaaatagcttgtaccagtacttcctctcctacctacagtccctgctcctattcccacctcagcaactgaagccgcccccagagctctgccctgaggatataaacacatttaaattactgtcatatgcttcctattgcattgagcatggtgatctggagctagcagcaaagtttgtcaatcagctgaagggggaatccagacgagtggcacaggactggctgaaggaagcccgaatgaccctagaaacgaaacagatagtggaaatcctgacagcatatgccagcgccgtaggaataggaaccactcaggtgcagccagagtga

SEQ ID NO: 141440 - DNA, 858 bp, Homo sapiens; identical to SEQ ID NO: 59347

SEQ ID NO: 141441 - DNA, 906 bp, Homo sapiens
cttggaagcagccatcacagccgctgtggcggccacgttcaagccccgcttcccgaagtgcacaagggcatcgtaacttcggtcttttgcttggaccagacaatcatcgatttccaaaatcaccatcatcactataatctcaggactgaaaccaaaatggctttgtgcatgttctccaacgctgggagggcagcaacaggagtctctgtccagaaccgggagacctccactctccctggggtctcctggatgctccaggctatcaccaccaccaccaccaccaccaccaccaccaccaccaccatcatcaccaccaccaccaccaccatcatcatcatcatcatcctcatcatccttcccaggattattatggccctttccaggtcctgcaggtggagcagcaggtacacactggcacacaaagtcagtccttgcaccctgcagccctgagctgctagcgctctcagaagcactcctggacatcttaggctggccgtgtttgccgctggcccgcccagaccccggtggtggggggcccgagggagcaggggcgccgtctcccctgatggtggtgaggtcctgcatgctgaagctccgcagtctctccgataaggcaccctgtccgtcagaggtcctgctccacaggtcacactcgacaaaggccaagagggagctctgatggtcagccaggtggaaatcaagacctggatcaactctgaggcgcaggtgcccagacatagctgttgcaacagatgctgctggagtgttcacgaagctctgcgtgaagcaccgcagaggaacaaagacgaggatggtacggtccctgctcccatggagctcacagtcttgcagctgcccaggaggcctcaggggcagaggacacagatgggccattcccgtgggcat

SEQ ID NO: 141442 - DNA, 2058 bp, Homo sapiens
atggttagtgacctggttgagttccacagccacctgtggtttagagttcagtccagggatgtaaaaccactaagtgcccagaaacatcactggatcacagtccaaatctcagagcagaggaggcctaggacagaaagcccgtccccacctgagccaagaaccaacaaccacagacagaattatacccacagaggctcccaggaaatgcagcaaagagtaggatccagtgtgagaggaggcctcgagccactgctagcttatttccaagtcagcgatgagatggtggtgttgcagggcttttccgtagttcagctaaagatggggtccttgtccgtcccgtggccacgaaaacgtagcctcgcagacggtttgaaggggaatatcattgtctatgggaatacaattgatacttacaccaccgtggagacgctcttaaaccttggcgtgagcggcagccgcatccacctcgtgcagcccccgcccgcctccaccatcacctgcatcaacaactactcggtggagagcgccgtggcggacgcgctaggagccgccggagtcactatgtaccgggatgcgatcctggcccagtggaatgacggcctgcacccagaccccatctacagcgcctccttcaccacacccaccaagcctttcagactccagtgctctatgttcttcagcttctgtgagaagaatgtggattatgaaacgtttaaagccctcaatgatgcatgtcttgtgtatgacagtcgacttgtgattgataccaacttccacaccaacgacatagccatcagagctgctggctccctcaccaaattctccaatagatactactcaaatgagtggactcacagcaacttcagttccaaagaaattggctttcagctggcagcagctatgctacatctctttgatccaacccttgagcctgtgaccgagccaccagctaatcttgaccggctcatccccatgtacaagggagccaagattcaaggcctagcaactactgatcttcatactgtctcagtcactttgccttttccagaatgtgatatagttgcagtcatacagcctatcgtcttttcagatcctgtgagtcaggaatttggacagggcacagtgggcacagattgtctctgctccacactattcacagccttagatgggaagactagagggttagatcaatggtccagatcatctgaaggcttgtttactaaatccgaaagcttgttactcagctgggctgggatgactcaaggaccggaagtgttcaccacagcctccccacctgggctgtcctcaagtgcctgggcttcctcacagtatggtggcctcagagtagccagactgctcacgcagtggctctgggctccaagtgcaagtgttgttactagcaagctggaagctgcgttgccttttatgacccaccctcaaaagtcccacagcatcacttctcccactctctctgttggagcagtcacagcaaccaccgagattcaaggggtggggaatagagaatccatctctcaaggcagagagtgtcagggtcatattgcgggacgcctgcagcctgcagggctcctcaaggacttgacaagtcaccaccaactaagtgactgtgaccctcgtcttgaggtgcacagcctcggccacgtacatggaatccaagtcagccctcctaaacacaaagaagtcctttggcctgacaatctgtggaaatgtgaactcaggcaaatcgagaggttcaaatcttcgtgttcattgaagaacacctgtgaaactgctcaggccgtcaggagtcatgctgaacgtaagggtttacatgtagattctctggtcattgagcatagccaggtgaacaaagtacccaagatgtgtggccagactcacagagctcagggtcaggttaacccatgtgtgagctctgcctgccacagtgagatgagccttattgaaaaggaacaaattgttcctaaaccagaagaggctgcgcagaagaaaaagatagcccagaagaaactgaagaaatggaaacttacggcacaggaatag

SEQ ID NO: 141443 - DNA, 807 bp, Homo sapiens; identical to SEQ ID NO: 126247

SEQ ID NO: 141444 - DNA, 1829 bp, Homo sapiens
tcaccttttcttcacaaacttctttctggaagcgttgggatttaagcgtctccgcccagctcccaaggtgctgtcccggacctgtagggtagctgagcggctggagatgtcattctcgacaaagggcgacatcccggcgatgtagtcaggggcgaacacgttggttttctgcctggcctttcgggagagtcgcggttgagggaagcgctgatcctcggtgagatgggggttgatggcgtatgtgccccctttgggagtgggaagcgagtaccggaggccgcgggcgttcagcaccttggggttgcgggagaagtgcatgtgcagggtgccgtcgtcactgatggtcacggacactttcttcagggtcttgttcccacagtgtgaacagaacactcggctcatgtcagacgttgtcttgaaacagccgtggcagcccagacgtagctgaatcagcatgcagttcaccgccagcacgtgcagccccatctgcagcagaacattctgcctggggaagtctgtggtcacgcagccaacccgcacgtcctcggggacgtcgcactgctccagctcctgctggatctgcttgatgttactgaaatactcggaatgctccttgggacttaaagcccttttggcgactctagaggacccccctgagccatatgaatttgtggaagtgggcagaaaacttagataaatttgcagatcctcatctgggctacctggattcctcagaactaccaggaggaaaggctaagtctgctgatccacagagattgcggccacctctcctgctaggggctcaggcccagggagatcagggtactgtccctgagcccctggctgaagttgtacttcctgcattgaggccccacccaagagttggggaaatggatggaggcaaccagagtgaaggttcagagttccttctcctggggatgtcagagagtcctgagcagcagcagatcctgttttggatgttcctgtccatgtacctggtcacggtggtgggaaatgtgctcatcatcctggccatcagctctgattcccgcctgcacacccccgtgtacttcttcctggccaacctctccttcactgacctcttctttgtcaccaacacaatccccaagatgctggtgaacctccagtcccataacaaagccatctcctatgcagggtgtctgacgcagctctacttcctggtctccttggtggccctggacaacctcatcctggctgtgatggcatatgaccgctatgtggccatctgctgccccctccactacaccacagccatgagccctaagctctgtatcttactcctttccttgtgttgggtcctatccgtcctctatggcctcatacacaccctcctcatgaccagagtgaccttctgtgggtcacgaaaaatccactacatcttctgtgagatgtatgtattgctgaggatggcatgttccaacattcagattaatcacacagtgctgattgccacaggctgcttcatcttcctcattccctttggattcgtgatcatttcctatgtgctgattatcagagccatcctcagaataccctcagtctctaagaaatacaaagccttctccacctgtgcctcccatttgggtgcagtctccctcttctatgggacactttgtatggtatacctaaagcccctccatacctactctgtgaaggactcagtagccacagtgatgtatgctgtggtgacacccatgatgaatcccttcatctacagcctgaggaacaaggacatgcatggggctctgggaagactcctagataaacactttaagaggctgacatga

SEQ ID NO: 141445 - DNA, 1617 bp, Homo sapiens
tttggtagttcttagttttattataaccttgtattttctggcaaaaatataaatctaaatgcatgatctctgggcacacagctcaagtatcagccttgagatgacctaagcagcaaaaatttggcctatttaattaaatgcacaggaggttgcagccgcatttattagaaaaatattatcctttggaaattcctttcttgaagattggctccagggcgttgttctttctgtttttatgcaattgcacttccttggcaggcagccaggcgctccggtgctcacaggccatgggacagtccagttcccttcaagaaccaagcggggcaatgggcggacagagccgcaccgtgaagccccgccttgttatttccaatcgggtggtccttggagacgacacgggctggggaaatgggtcaccggaactccacggcggccaaacgcccaatccaaattttgcctgcgggaactcgctcttcaaccttttcttccacaaacttctttctggaagcgttgggatttaagcgtcttccgcccagctcccaaggtgctgtcccggacctgcagggtagctgagcggctggagatgtcattctccgacaaagggtgacaccccggcgatgtagtcaggggcgaacacgttggttttctgcctggccttttgggagagtcgcagctgagggaagcgctgatcctcggtgagatgggggttgatggcgtatttgccccctttgggagtgggaagcgagtaccggaggccgcgggggttcagcaccttggggttgcgggagaagtgcatgtgcagggtgccgtcgtcgctgacggtcacggacactttcttcagggtcttgttcccacagtgtgagcagaacactcgggttcatgtcagacgttgtcttgaaacagccatggcagcgcaagatgtagctccgggcctcacgaatcagcatgccgttcaccgccagcacgtgcagccccatctgcagcagaacattctgcatggcgaagtctggtggtcaggcagccaacccgcacgtcctcggggacgtcacactgctccagctcctgctggatctgcttgatgttactgggggttatccagccacccccgtcgtcatcgctgtcatcttttctgtcttcaaacccgttttcttcctcctcttcctcctcacttggaacgtcctcacctctgtcaatcagcagctcctgcagttcatgatcgatgttgggcaaagggtttctccagaacatgaaggaactaaattccaggttctcaggctcacaagctgagtgtcctttttctgtttcttgtgggggtttaggcttgtagggcagatggaaaccagaaatgtgcagaggtgtttctgggtgctgaatcgatgagctcaccttaaccttctgtggttcttgttttaggtgagacaccccaacaaactctgcttccaactggtatgtgagtgcaagcacttggatgtccgtggcagagaggctggggtagtctcctgttttctttgaaaactcagtcaccagccgcacgtattccggtaagggctccttgaaccgcagctcgtagggcaggacagcgagccgcctgcgtgtggccttgtcccgaatctcagt

SEQ ID NO: 141446 - DNA, 156 bp, Homo sapiens
catttggatgaaacattttggataaaaacctaacagtggtggtttatttggatattcttcagaaaattctattactagtttaaaagaccgcttgaaatcccgcatgagcctcctccgggccggggtcgactgctccgcagctgccccgcggtcagt

SEQ ID NO: 141447 - DNA, 2313 bp, Homo sapiens
tcaccgctgctgcacatccggcccgtcctgtgaagcaggcccgggcgtcacgtgcgagatccgcacgctgatccgccgcgtcacgatatgcccggatgtcgaaccggtttccttcagcgtctgcatccactcggccattttgatctccggatcacatggcgtatccagcgccgccacatcccgggattcagcgaggcgtcttccccgacggcctcccggatagtctgtgagcgtccgaaaagagctccaccggtacacccggcatttcccacataccgtgcttaccaccacttcagtttcatagcccagcgcctcaacctgctctttcagtttttccggtagagcgggtttcatccagtgaggaatacagccggacatcacgaccactcgggccagaccgttcagggtggcattgtccattgccatctgcaggcggtcaccgccggagacgcggagtccgggattttccctgtcaccctcagtcgctcgccgtctgccaccggcattttttcggccggaacagcgaccagctgctgtccagggaggaaatacgcaccacctcgtttcaccctgcgcatcccgcagatcaggctgtgactctgcgccgtcaccggtcgataacatagcggtcatgactgcgtgtctccgggttccactgcccatcaccatccccggacggtacatatcccgcagataacggctccggctccgggagtccgacacgccctgtgttttcagctcaatgcgaatggcctgtgtcagtatggccgtttccggtacccggtgaaggcgttcatcacttccggcagcccggatatcttcatattccgtgcgttcatggtcggacagtccggcctcattcagggctgcgataatctgcggcttttcaggtgtccgaagaagtttgcttttgtcggctgccaccagtcgcgatgtggaatccgatagcggtttccagcgggtcaagcggactgcgtgacggtgaccacactcgcgggtctgaacgccgtggatgctgcacgcaatgcagaactgagcagggataacagcacctcctggctgagtgacaggaacgtcgtatgtcccgtgaccatccctccggcaacaggacgaccaaacgtgcttttttgccatcagcgccatgaatgcggcaccttccttcccgctgtaaccggccaggtgatttttgaatggatacctttccagcaggactgtacgcgaaccagaccgccggggcatctccgagccggcatcacggtcatcacggacgtagcaccacagtgtttctgccatttcctcctgaatgcgctgattcgctcctgtgcttcctgtatttaccgttcgatttttgcggaagtttttctgagcttttaccgaactgcatgcgctgcagttttgcaacagcgccttcagccggttggtttcggaagcataagtcgccacgtccgtgtgaacgataacgttccggggcctcttacgccgccacagcgcctctgcagggcatcgcaggccagttgcgccgtcatgcgtggcgacattgacagccaataacggcacgtgaccacaggtcaatgaccactgccagatacaccagccttcatctgtacgtaagtacgtgatgtctcctgcccacttctggtcgggccactggcgtaaaaatcctgctccaacagattttcgggttgagaagcggtgtaagtgaactgcagttgccatttttacggcagtgagagcagagatagcgctgatgtccggcggtgcttttccgttacgcaccaccccgtcagtagcataatgtagaatcaggggagccctgagcttgttttcctgcaaccagatggtcctaagtcttaggatgccggaccggcgtacgccccacgtcccgctgttgactttatccaaacagccgccgccgcctcgcccattctgtggtcccgctggtctggctctgcgtagttccagtggagcaccgaacactgatactactttgttgctcagccccgcaaggaaccggccattgccaccatggaaacgccggcggagttgctgcgttctagactcgtgcgaagaccggaacatgggcagggtcccgacccggaaggggaagtgggaagaacggaaacctactctgggtaggcgcaaggtggaagagtgctgtgatgatggtccagatatgctctggcttccgtgctcatgggtggtcctccactggtaacggctcccaacacttagtattcttctgtctccataaccaacctctaaatcagtatttaagtacataaggatagaacctttctctaggaattcctccat

SEQ ID NO: 141448 - DNA, 1065 bp, Homo sapiens
tcacgcactggaccccaccctcagggcacaaatggaaaggattggcaggagtcgggagaggggttcgccccaacacggctcctcggagaagacggcggggccgtgaaacaaagctgactggtgctgccggagaggaacaagctcccgcaggagctcacgcttgaaatcccgcatgagcctcctccgggccggggtcgacatgctccgcagctgccccgcggtcagttgtggatcgccgccgccgccgccgccgccgccgccgccgagactgacaaacaaccctgcaatgacgtctccctccgccgcctccggatccctccgccctccgccgctaccacagtgtgagtgcttgcgcctacccagagtaggtttccgtttcttcccacttccccttccgggtcgggaccctgcccatgttccggtcttgcgcacgagtctagaacgcagcaactccgccggcgtttccatggtggcaagtggccggttccttgcggggctgagcaacaaagtagtatcagtgttcggtggctccactggaactacgcagagccagaccagcgggaccacagaatgggctgaggcggcggcggcttgtttggataaagtcaacagcgggacgtggggcgtgacgccggtccggcatcctaagacgtgtggtttgagttgcgggcgagaccaggctttttttaggaccttgggcctgataagtgggcgactgcagtagtgcgggaacctattatttgacaggaacatgacaggaagtgtagggaccccatgcttgatggatggtgacttatagtgtggtagtctcagtgttgatgggcatgaccgagacagcaggagtacccctaagttctggtgagaggtggagcctcagaaggacaccttactcaagctgtctttagttcccaaagacaaaaaggctcagtggaaaagattcctttttttttttttaatgtctctatatttgagactgtgggtttattgtggatatgcattatctagttttaataaataaaagtataaacgtttaacattttcagaaaaaaaaacctcgtgcccaat

SEQ ID NO: 141449 - DNA, 926 bp, Homo sapiens
gcactgaagttatgtattttaacagctttacatgtaatattcatatataaaaaactttaagtgcttttctccaatttaaaaatctaaagaattcaaaaataaggcattcaatatttgaaaaaagtacagatttacaaaatgtgtatattctgtcatgaaaactccacaccaacattatacacttggaaaaaaatacaaacaggatatattacaaatttatgcagcaataacttagttcacaccatgcaataaaaagtacattaatcaagatacacaagcttttgtaggttctaaactgaaggacttttttcttttttttctgcagaatccttaaaacctgtggcacttaaaatttgttagcctttctaatgagaggtaaattatacacaacaatgatgaaaaagattaacagaccagttgtctattatgaatcattccagctttgttcaacaatggccgaaactcttttctcatattctcgtttgttttccctgaataaaactgtgcctcccccgcctatggcctggaactgttaggattcggttccatcccagccagagactgaattgatgttaagatagaagatacatccatatgttggaactcccatcgattctgaaggatatcctaaacatatgcctacccatcagcatacacatttggatgaaacattttggataaaaacctaacagttggtggtttatttggatattcttcagaaaattctattactagtttaaaagtaccatcttcaaaaggtgtcccttctggtccaaatataactgcattccactgcatgatgttgttttcagatggtgcgccactgaacacccacaggtgggtccttttgtaaccgcttgaaattccgcatgagcctcctccgggccggggttgacatgctccgcaattgccccgcggtcagtttt

SEQ ID NO: 141450 - DNA, 413 bp, Homo sapiens; identical to SEQ ID NO: 127726

SEQ ID NO: 141451 - DNA, 442 bp, Homo sapiens
acgcctgaggcaccgcgctgtaatttccgggtccacccacgcgtccgcagtaattcgccaaaatgacgaacacaaatttaaataggagaggcacccgatatatgttctctaggccttttagaaaacatggagtggttcctttggccacatatatgcgaatctataagaaaggtgatattgtacacatcaagggaatgggtactgttcaaaaaggaatgccccacaagtgttaccatggcaaaactggaagagtctacaatgttacccagcatgctgttggcattgttgtaaacaaacaaggtaagggcaagattcttgccaagagaattaatgtgcgtattgagcacattacgcactctaagagccgacatagcttcctgaaacgtgcgaaggaaaatgatcccgaatatgaatgaagcccttgagaacggtaccttggcct

SEQ ID NO: 141452 - DNA, 559 bp, Homo sapiens; identical to SEQ ID NO: 125632

SEQ ID NO: 141453 - DNA, 536 bp, Homo sapiens; identical to SEQ ID NO: 120551

SEQ ID NO: 141454 - DNA, 929 bp, Homo sapiens
cccacgcgtccggaaattatgagtttatcaagttggaaaggaacgccttagtgcaaagtttaattattgatgaagattactattactatgattaaaaaccctcctagtgaaagctgtgttcttctgtgacctggatttaaatgtatcttggcactcgagcttaatgatgactgttttttttgattgcttgaagcaatgtgaaaaacacatttcaccggctctgaaagctcttgagttgccatttgaaagaaatcttagaatactttacagttacttaaagtcagaattttaaaggaaggggaaatgctggtatataacattggtttctttaatagggaatgggtactgttcaaaaaggaatgccccacaagtgttaccatggcaaaactggaagagtctacaatgttacccagcatgctgttggcattgttgtaaacaaacaagttaagggcaagattcctgccaagagaattaatgtgcgtattgagcacattaagcactctaagagccgacacagcttcctgaaacgtgtgaaggaaaatgatcagaaaaagaaagaagccaaagagaaagaagttcccatggagcccaccgtgtacatgtctgaaaaggggaggacactttttcctggggagcctgccaatcacataaagaacaaaaggcttctgtgctggaccctgcctgcttatctgtgcagtttgatctcagactgctgtgctagcaatcagcgagactccgtgggcgtaggaccctccgagccatgtgcgggatataatctcctgatcaatcccccgattaaaaataaagagtccgcaaaagaaccgcaagtgtggcacagccgcacgctgcaaaacgcagacggaacagtagctgaatacaacggcaatcacgatgtgttcgctcgagcaaggaagcccgaaaaacgctaa

SEQ ID NO: 141455 - DNA, 724 bp, Homo sapiens
atccttaattaaattaatcccccccccccgccctttcggccggaaccgccatcttccagtaaattcgccaaaaatgacggaccacaaaggggaaagaggagaggcaccccgataataatgttctctaagggccttttaagaaaacaatgggagttgttcctttggcccacatatttatgcgaaatctataagcaaaggtgtgattttgtagacatccaaggggaatggggtaccttgttccaaaaagggaattgcccccacaaagttgttacccatggccaaaacctggaaggagtcttaccaatggttaccccagccatgcttgttggccatttgttgtaaaacaaacaagtttaagggcaaagattcttgcccaagaggaatttaatgtggcgtatttgagcacatttaaggcacttttaaggagcccgagataagcttccctgaaaacgtgtggaagggaaaatggatccaggaaaaaggaaaggaagcccaaaggaggaaaggttacctgggggtttcaacttaaaaggcgccaccttggcttcccaccccaggaggaagccacatttttgttgaaggaacccattgggggaagggagccttgagcttgcttggaaccctatttcccctattggatttcatggggcattaatagggtgtttaaaaaaaaaattaaaggaccctctgggctacaaaaaaaaaaaaaaaaaaaagtcgacgc

SEQ ID NO: 141456 - DNA, 762 bp, Homo sapiens
atgggccccgtttgtctgctgtcggctcccctcgcggtggttctgctgaagcagcctggctgccggcccggggacaccctgcctggattccgcggcgcccccacgcgcctctgtgaatgcgtgggctcgctggatttcccgcagggcttgctggccacgctctcccgtcagctgtgtgtcttccgttgcctcccggggacgtttgtagctgctgttcattcgcaggctgggctggagtcggggtctctgacacccagccctggagaccctctctcggcaacctgggccatggcagttgtcaaaacaaatcggcaagtccttgatggagccccagaagggagagtggccagtgccacgccatggcaacgatgctggctggagatggagtggacgctcaggtgccgctggatgatgccggccacctgcagttttggggcccagctggaggtcagcagggtggactcacaaccccctgagttcagacgagttatttcctttgaggagggaggaattgagttacttcaggcccggatggatccaccgctgctgacgtactttggtgctgacgtactttggtgccgtgactcggatacattccctagaggttgccctcagaacaccctcccaggtaactgccatcgctgcgggaagccaggccactggaaggcagactgcatcagtcggacaaatgggaggaagctccacacagctggccccctccgccacactcagccagtggaacaggactgccctgagggctga

SEQ ID NO: 141457 - DNA, 372 bp, Homo sapiens; identical to SEQ ID NO: 127653

SEQ ID NO: 141458 - DNA, 3297 bp, Homo sapiens
tcaattagagaagccaggtggcaggcccttgtgaattgcctttgtttgtggatctgatgcagcctccactgcggctggggtagcagggagctgctgtgcatctagctttgcaagagcacaaagcatctccgagctccattttccattggccaaggagatcctttctgaggcttccctgagcaggagggctacaacctgcagttttgatgtgagttggaactcagtgcagggtgtgtgatcacactcaggagcccagctggcttcacccggtggatcccgcaccagggctgcaggtggagctgcctgccagtcctgcgccatgcgctcgcactcctcagcccttgggtggtcgatgggactgggcgctaatttccccatggagctggactgcccatccacatctgacttggtgcttagcctcacacgtgtggactggtggcatttcccagcatcagaatgggcattggtaacatgctgtttctttgaagaatgagtgccccattcaaagacgttgtcttgtttggcctcaaaatatcttcctctcatgtgaggtatccagggttgatctatttcaagcaagcctattaagcaggtgttattatcatcatcatttgacacctggttcctcggtgttcctatatcttctttaatggatccaccattttcccagtttcctaaagcagaaaccaaggcatcagctgacacatctctctcctcatccctttcgtctaatccatcaccaagactcgtttctttttgccatgcatccaatctatgcacttctgtcatttttgccaccaccactaagtgtgcttgttgcacctccttgagttgaatactggtagcaccacttgaagtatagagatccaaggttggggcacttgtgtctattgggccccctctgatacgctgatcatcagcagccttgctctcttcaatggggacagagctacggatcaggatggaggatcctgagacgcctccattgacaaccctgcagtgacttttctcatgtccttttggataaggaccaatgtctttacactggcctgcctcactctgcatcacctggtccctgcgtaaccgtaataggttcctcacccgacatgcatggcaaatcaatacaccaagacactggcagcttgtcccaagctcctgctgataaatcattttattggcacagctggacaggaaaggacagaatgagtaatgggagtcgggcaccatgtcgtggacaaaggcccgagttgacatggtaacaacaggcagaccgatgtggcccaggcagtagtctggcctctggacaagtcggagaataggccccaggtcatttctcctttgtgcttggaagctttttcttcctgctccctctgcctcttgaccgaccatgttgaccacggtgctgcccccatgtggccctgcaaggcttgggaagctccctccacttgggatcttcagtacaacgcgtagaatatagtaggtgctcagtaaatacttgttaaatattgaatgaatcaatgggactttggaggtggcctttctggggcaccacagcaatgctctgttcattgtgccttcaccctgggaaggagaaaaggtcaagccttctgtcctctgcaagaccctctgttgctcttccaatggcttgtttttgtcacagtcacacataactgcatgctgcccaaggttggggccctggatgaatggggctgtacacatggtgaggagacacagggcgaacctgagatatgaaaaacggagcaaaggagggtgagtcctatctcctgctgcaatgcctaccaccatcaccattaccatcaccaccaccatcaccatcaccaccaccaccaccaccaccaccaccatcaccatcatcaccatcaccaccaccatcaccaccaccaccaccatcaccatcaccaccaccatcaccatcaccatcaccaccaccaccaacatcaccaccatcaccatcatcaccatcaccatcaccaccaccatcaccaccatcaccatcaccactatcaccaacaccgccaccaccaccatcaccatcactgccaccactaccatcaccatcactgccaccaccaccatcaccatcaccatcaccaccaccaccaccatcaccaccaccatcaccaccaccatcaccatcaccgccaccatcaccatcaccatcaccaccaccaccaccatcaccaccaccatcaccaccaccatcaccatcaccatcactgccaccatcaccatcaccaccaccatcaccatcaccaccaccatcaccatcaccactgccatcaccatcaccatcactatcaccatcactgccaccatcaccatcaccatcaccaccacatcaccaccaccatcaccatcaccaccaccaccatcaccaccaccatcatcatcaccaccaccatcaccaccaccatcaccatcaccaccatcaccatcaccatcaccaccaccaccaccatcaccaccaccaccaccaccatcaccaccaccatcaccatcattatcaccatcactgccaccatcaccatcaccaccaccaccattgccatcaccaccaccaccattgccatcaccaccaccatcgccattgccatcaccatcgtcaccaccaccaccgtcaacaccatcaccatcaccaccatcaccatcaccatcaacatcaccatccccaaactctgcattagccctctgagagccagcacatagtaggtgctcaataaatgttgcattgtcactccctgtgtgtctatatccaaggatcacatagtgtccgcaagtttcttgtcctaaagcaaaagctctcaatggggatggtgttgccccctgggggagacctggaacattgtggagcttgtttagattgtgaccaggactggcgatgtgcaatgccttcacataaatatcctcccaaacatgcacattgttgtgaaggttgtttgtgctaaatggtctcagtgggctaaaatcaaggtgtcttgcagagctgcattccattctggagactttaggggagaatccattttcttgccttttcctgattccagaggctgttttccttggctcatggccacgtcctctgtcttcaaagccagcaatgggggtcaagtatttctcatgctgcatcactctgacactggcccttcttcctctttcttccacgtctaaggacccaattttccaggagcctgtcacccactcacaagcagacatcccaacacccacccacagagatgcattggcagccccaattttgaagtttaaggctactgccggcat

SEQ ID NO: 141459 - DNA, 922 bp, Homo sapiens
atgcctgatctcccttgggttaatgtagaggaagggattcaaagacttagggagattgtgatggtggagtggattagtcactttaggcctactcatcccagcttggagaatctagaagatatagccttgaccaatgtcttgcaaaatagatttgtgagggcagaacctgcatctttgaagagccctgtaattgctcttctctgtatgtcagatctaacggtgggaaccacagtcactcaactacaacatttaaatacaatgggagtaattggatcccaagatggcagggaccaagtggcagcactcaaccatcaaaagcaaggagacctgtggccttttcccagggtaactgtgctatggagaaagggaattgatcagacattttggggactactgaacactggctctgagctgacattgattccaggggacccaaaatgtcgttgcagtcctccagttaaagtagaggctcatggatgtcaggtaattaatggagttttagctcagatccaacttacagtgggtctggtgggtccgcgcccagtcccatccaccacccaagggctgaggagtgctgggcgcacggcaccgggactggcaggcagctccacctgcagccccggtgtgggatccactaggtgaagccagctgggctcctgagtctggtggggacgtggagagtctttatatctggctcagggattgtaaatacaccaatcagcaccctgtgtttagctcaaggtttgtgagtgcaccaatggacactctgtatctagctgctctggtggggacgtggaggacctttatgtctagctcagggattgtaaatacaccaatcggcactctgtatctagctcaagttttatacttccctgacacatcctgtgataagcctcgtagtagagactctagtctggtggtg

SEQ ID NO: 141460 - DNA, 1551 bp, Homo sapiens
gaactcagcagcggaggctggacgcttgcatggcgcttgagagattccatcgtgcctggctcacataagcgcttcctggaagtgaagtcgtgctgtcctgaacgcgggccaggcagctgcggcctgggggttttggagtgatcacgaatgagcaaggcgtttgggctcctgaggcaaatctgtcagtccatcctggctgagtcctcgcagtccccggcagatcttgaagaaaagaaggaagaagacagcaacagtgaagagagagcagcccagagagcgtcccagggcctgggacttaccctcatggcctggttgggtttacacaacatttggacagaccttgcttgccttaactccttgattcaggtgttcgtaatgaatgtggacttcaccaggatattgaagaggatcacggtgcccaggggagctgacgagcagaggagaagcgtcccttttccagatgcttctgctgctggagaagatgcaggacagccggcagaaagcagtgcggcccctggagctggcctactgcctgcagaagtgcaacgtgcccttgtttgtccaacatgatgctgcccaactgtacctcaaactctggaacctgattaaggaccagatcactgatgtgcacttggtggagagactgcaggccctgtatacgatccgggtgaaggactccttgatttgcgttgactgtgccatggagagtagcagaaacagcagcatgctcaccctcccactttctctttttgatgtggactcaaagcccctgaagacactgggaggacggcctgcactgcttcttccagcccagggagttatcaagcaaaagcaagtgcttctgtgagaactgtgggaagaagacccgtgggaaacaggtcttgaagctgacccatttgccccagaccctgacaatccacctcatgcgattctccatcaggaattcacagaccgagaaagatcttgccactcccttgtacttcccccagagcttggatttcaagccaagatccttccaattgaagcgagagtcttgttgatgcttgaggagcagtctggagggcagtatgagctttttgctgtgattgcgcacgtgggaatggcagactccggtcattactggtgtctacatccggaatgctgtggatggaaaatgggttctgcttcaatgactccaatatttgcttggtgtcctgggaagacatccagtgtacctacggaaatcctaactaccactggcaggaaactgcatatcttctggtttacatgaaagatggagtgctaatggaaatgcccaaaaccttcagagattgacacgctgtcattttccatttccgttcctggatctacggagtcttctaagagattttgcaatgaggagaagcattgttttcaaactatataactgagccttatttataattagggatattatcaaaatatgtaaccatgaggcccctcaggtccttgatcagtcagaatggatgctttcaccagcagacccggccatgtggctgctccggtcctgggtgctcgctgctgtgcaagaca

SEQ ID NO: 141461 - DNA, 1080 bp, Homo sapiens
atgggctcctgtgcggaccaagcctccccgaccagcgccgctcccggctccacgccgccgagtcccaccgaccacccaagggctgaggagtgcgggcgcacggcgcgggactggcaggcagctccacctgcggcccaggtgtgggatccactgggtgaagccagctgggctcctgagtctggcctggttggtttacacaacattggacagacctgctgccttaactccttgattcaggtgttcgtaatgaatgtggacttcaccaggatattgaagaggatcacggtgcccaggggagctgacgagcagaggagaagcgtccctttccagatgcttctgctgctggagaagatgcaggacagccggcagaaagcagtgcggcccctggagctggcctactgcctgcagaagtgcaacgtgcccttgtttgtccaacatgatgctgcccaactgtacctcaaactctggaacctgattaaggaccagatcactgatgtgcacttggtggagagactgcgactgcaggccctgtatatgatccggatgaaggactccttgatttgccttgactgtgccatggagagtagcagaaacagcagcatgctcaccctccgactttctttttttgatgtggactcaaagcccctgaagacactgcccagggagttatcaagcaaaagcaaatgcttctgtgagaactgtgggaagaagacccgtgggaaacaggtcttgaagctgacccatttgccccagaccctgacaatccacctcatgcgattctccatcaggaattcacagacgagaaagatctgccactccctgtacttcccccagagcttggatttcagccagatccttccaatgaagcgagagtcttgtgatgctgaggagcagtctggagggcagtatgagctttttgctgtgattgcgcacgtgggaatggcagactccggtcattactgtgtctacatccggaatgctgtggatggaaaatggttctgcttcaatgactccaatatttgcttggtgtcctgggaagacatccagtgtacctacggaaatcctaactaccactggtaa

SEQ ID NO: 141462 - DNA, 420 bp, Homo sapiens
tccgtgcctccaagatgacaaagattagaaggaacaatggtcgtgccaaaaagggccgcggccacgtgcagcctattcgctgcactaactgtgcccgatgcgtgcccaaggacaaggccattaagaaattcgtcattcgaaacatagtggaggccgcagcagtcagggacatttctgaagcgagcgtcttcgatggtaagtgggtcaccggcgcgaactgtgtgaggatcccagtatcttaaagccttcgcccaacttcgcccttttggaggctctgtttcgttggagcctctcaggcaatttccacgtatttaaggttgttactggtagaagagaattctcttgtttgccgttttgattcttttctgggcagagggtgactttgtgatagagtgcacagcctttactctgaggtaaagg

SEQ ID NO: 141463 - DNA, 928 bp, Homo sapiens
  misc_feature (1)...(928): n = a,t,c or g
acataacctcgattttcttccgccatccggctaaatagtcccatgtgcactttgttccatggataaataaacactaggaacgcatttccaccctagatttcagcagaaatgctgaattgtaaaggaatatttgagtaaagtgagttgccgttcttgaagcccgtctcctaaggattctcccggtgtccgcgtagggatctcatgctatataggagggccctgccaggcagcgtctcctctctccggtccgtgcctccaagatgacaaagaaaagaaggaacaatggtcgtgcccaaaaaagggccgcggcccacgtcagggggnngccncccttaaaatttttnccccngggnccntgccacctaactgtgcccggatgcgtgccccaagggacaaggcccattaagaaattccgtcattcggaaacatagtgggaggccgcagcaggcaagggcacatttctgaagcgagccgtcttcggatgcctatbtbbcttcccaagctggtatgtgaagctacatttactgttgtgagttgtgcaattcacaagcaaaagtagttcaggaaatcgatctccgtgaaagcccggcaaagacccgaacacccccaccccgattttaggacctggcgggtggttgccccacggtccccccaccaaaagcccatgatctgggtccagaatactgcagacatcagacatgtgttaactgggtttgctgccggcaagccaccatccttgggaaggagttgtgtgggcaaatcaggaagttgccctctcagcagatgtctccaggatggctgccctcaggttattcctgttggttgtataaatataagacagaagccaccactgctttgcaatcacgtggggaagtgtatcatccgctccaagctctgtggagcagacctcctggccgggatccactga

SEQ ID NO: 141464 - DNA, 270 bp, Homo sapiens
atggccaagatcaaggctcgagacctgcacgagaaggaggagctgctgaaacagttggatgacctgaagactcagaaagagaaactcaggaaattctacaagggcaagaagtacaagcccctggacctgtggcctaagaagacacgcgccatgtgctgccggttcaacaagcacaaggagaacctgaagaccaagaagcggcagcggaaggagaggctgtgcctcctgcggaagtacgcagtcaaggcccgagtggcgcgttgtcaataa

SEQ ID NO: 141465 - DNA, 708 bp, Homo sapiens
atggctaaaaggggccaaggtacagctcaggccatggcttcagagggtgcaagccccaagccttggcagcttccaggtggtgttgagcctacaagtgcacagaaatcaagaattgaggtttgggaaccttcacctagatttcagaggatgtatggaaatatctggatgtccaaacagaagtttgctgctgggaggctgtgtttttgtgagtgtactctgagtgagtcagctcaaggcagctgctctatttccctgaagttacaaatccaggaagcagtgggcactggaaagggatgcaccagggtgtctgatacacacctagacaaaggagaaggtagcaaagttaaagccattttgcttatatccattccaagagaccactcactggatggatgtaccccaagagcaaggcattcttggtggtccatctgctgtgggaggaaagaaggtaaaagatcaatgagtgtgtttggtgggcagctatcaggagttgactctggaatccagaattgtttccatcttgtggttccgctatcctgtagagagcatgagagtctcctgttggatcttctgtgtccatatggcaaatggaggaaaaaggagcatagaggcaagaggggctcaaaattgtatctgtttgccgccctcgcagacccgctgctgactcccatccctccagatccagcagggtgtccgctgtgctcctga

SEQ ID NO: 141466 - DNA, 493 bp, Homo sapiens
ctgctctgccactctgcctttcccctccctttccaccagactccagctcctctccatacaggactgggacccccaaagtgtcctgcccacccgaagttttcctctcaggcctccggctgtgtgctttgttcccaaaattgctccaatttcctccccttcgagcccacttcctccctaacccccagacacaggcattgatctcttcttttgtgctaggggttttgctgatatttgtaggtggccctctgaaaaacataaacaaaactggacctgactcagaataaagtggtaaagccctcttcatctgggcatctgtttctctaggtttctttttacatgggtttgcatatggagatctggttatctctgcggaggtttctgtgttgatgtctctgtttggaggtctctcggtaggtaggtgtgtatcctgctcagctttcactgtattcagctttgccatggcatgagaataaaactccaaactggtggccat

SEQ ID NO: 141467 - DNA, 925 bp, Homo sapiens
acactttgggagaaagaggcaagccaggatttgcttgaagccccaggggtttgaagactagccgtaggtaaaccatggcaagatgcccatctcaataaaaaaaaatatatattttaaaaagaataataggatcttgcctctgaagatgaaataacagaggaaattggagtaaggaagaaaagttgagaggggctaaggttataggtcagagagttgaagcctgggagctaggatttcagtcatggagctggtccagggtctgggaagctcctttccatggtcatgggtggaggccgctatagacgagaaggttactggagttgaagagagcttctttttgcatgggtttgcatatggagatctggttatctctgctgaggtttctatgttgatgtctctgtttggaggtctctcagtaggtaggaacaatggcaagcctctagcccaatcgggagcagcaatgggcacctcactggatcaggagcacagtggacaccctgctggatccggaggaatggaagtcagtggcgggtctgcgatggcggcaaacagcactggtggacgcattttagtgagctcgctttactacctgattgagcaggcagcggcggtggcctatgcagcaatggccaagatcaaggctcgagacctgcacgagaaggaggagctgctgaaacagttggatgacctgaaggtggagctgtcccagctgcacgtcgccaaaactcagaaagagaaactcaggaaattctacaagggcaagaagtataagcccctggacctgtggcctaagaagacacgcgccatgtgctgccggttcaacaagcacaaggagaacctgaagaccaagaagcggcagcggaaggagaggctgtgcctcctgcggaagtacgcagtcaaggcccgagtggcgcgttgtcaataa

SEQ ID NO: 141468 - DNA, 495 bp, Homo sapiens
  misc_feature (1)...(495): n = a,t,c or g
tactaaattcgcggcccgtcgaccggcgttggcggcttgtgcagcaatctccaagatcaaggctcgagatcttcgcgggaagaagaaggaggagctgctgaaacagcatggacgacctgaaaggtggagctgtcccaactgcgcgtcgcctaagtgacaggcggagcggcctccaagctctctaagatccgagtcgtccggaaatccattgcccgtgttctcacagatattaaccagacttcaggaaagaaaaccttcagggaaattcttacaaggggcaagaagtacaagcccctgggaccttgcgggccttaaggaaggacacgtgccatgcgccgccggctcaacaagcacgaggagaacctgaagaccaagaagcagcagcggaaggagcggctgtacccgctgcggaagtacgcggtcaaggcctgaggggcgcattgtcaataaagcacagctggctgagaaaaatctgaaaaaaangagggtaataaa

SEQ ID NO: 141469 - DNA, 1149 bp, Homo sapiens
atggaactggactgggaaagaatgatgccaattgtccatgagggtacccaggtggcacagaaagtggaaatccgagaacaagagcaagttgattccaacaatggcactgggtctctgagtctgattggctcctctcaaagagataaaatccggatgggacaaagcagttatctggctgctctgtcccctaaaattggtgaaattgacaatgcctacgtcatagggttgacggcaaaatctggccttggaattataactgaagccatttatccaaagaagatatacaaatggccagtaaacacaggaaaagatgttcaacatcactggacattagaaaagtgcaatcaaaagcagaaagaatacaacttcacacccactgggatggctcaaattaaaaggcagacaatgacaaatgttagtgagggtgtgaagaaactggaacccctgtgcattgctgtgcctacccggtgggcccgacccagccacgatcaaggcgatcctaatcttaacaatcatgggaaaccgcggctctccaagttctaccagccctatggatttgtggaaacattagacaaatgttttgaaaatgtttgtgaactggatttgattttccatgtagacacggttcacaatattcttgcagaaatgatgatgggggaatgctgcaacattattgctgctgtcactaccacatcaggtgaggggctggagaagcctccacagatgcagcaggtggatagtgaaggaaaggctccaagccacgccactaacctggactcccttttccgatgtccagaattaaagagaggtaaaagatttctggcttttggcaggacagtgctggtgcaaaggaagtgtggggccaggcccaaggaagccctgtgcagcataccttacagtccgccgaaccagaagcagcccactcccccacctggatttcctgccacccaggggaccagttgtatttcttacagaaaagaaaggtgcatgaggaagctctccggtgcttcagaagactattgggagcctgaatcgcagaatgaagtggaggaaggctacagggccagcccaagctgccaggtggctgaagcagagggcccagaacccaaccttagctcacaaaacaaaactctcacttctacctcttga

SEQ ID NO: 141470 - DNA, 1279 bp, Homo sapiens
gatcgcaggcgagattacgaggcgaggctcgcgcgcccgcccccgccctggcccccagtgcccacccggtccgcccggcacagccatgatcaaggcgatcctaatcttcaacaaccacgggaagccgcggctctccaagttctaccagccctacagtgaagatacacaacagcaaatcatcagggagactttccatttggtatctaagagagatgaaaatgtttgtaatttcctagaaggaggattattaattggaggatctgacaacaaacgtgatttatagacattatgcaacgttatattttgtcttctgtgtggattcttcagaaagtgaacttggcattttagatctaattcaagtatttgtggaaacattagacaaatgttttgaaaatgtctgtgagctggatttgattttccatgtagacaaggttcacaatattcttgcagaaatggtgatggggggaatggtattggagacaaatatgaatgagattgttacacaaattgatgcacaaaataagctggaaaaatctgaggctggcttagcaggagctccagccccgtgctgtatcagctgtaaagaatatgaatcttcctggagatcccaagaaatattaacattgggtgacatcagtattaaaagtgccaaacctgccctcttttaaataaaaatgtaaaaagggccactcccaggtaaaatccagggggaagagtcatctaagtttaccatgcagttggtttaccaaaaatagaggaggagagtcttaacttttgctcttggatttaagtcaaggtactgtatagaagttgtgtaaaatcagtatgaaagttcaatgttgctgttcttgctcagtgattttaaagaaattgagtagttcctatgtgatttttttttttcttttctaaactgcattcctgtgcccacctacggcatgcctctatgtattggctactacagtgttttaaaaagtgtttccagatatttctctaattatgtacaacctaaaatgttggtgttttgtatggatcacaagtgcagcattccttaattccttctgctatatgtcacacagttgttatttggagaaccaagtatgtattgcatgaaaacattatgacttttttctcttagtttaaataaactccaaggtaactggacttctaaagcacctttctgtttgcctgatatctactttagcaataattttttttacaaccctctgactcaacaaagtaaataaaagtatattttatcactaaaaaaaaaaaaaaaaaa

SEQ ID NO: 141471 - DNA, 909 bp, Homo sapiens
ctaaattgcagactgctcctgcaggaagccttcagggcctgggaggcctttatctggctcaaaagctagggctacttctcgaaggacttccaaatgctcctcagcagctgatagtgactggtcaatccactccaggccccccgtcagatggcaggcattccttgtcaccagcaccaggcgactgacagacaggagcagggtagtcgtccctgtgtccaggagcttggggtccaacggagggtacatcgacttcacaacatcatctaccctggggctgttccacttggccaccacaatcatgtcgctgacaatggctgaagtcttcatcttggccccagagcccattgtcatggcaacaagcttctctgtcagagtgtgacaaatcttcaagatggcaatgcagtgggacatgagacccgaggcatcttcgatccagtctttgttctccagaatggcctcaatgtgggggttggtgataacaacgtcatccagttcacggtctccatgcttccggggagctcctgactcagtcccgttcacatcgtcctcatgggctaaggctgctgggtcccctttcacattgcggaagttttgttctttcactctttgcaataaatctcgctgctggtcactctttgggtccacactgcccttatgaggtgtaacactcaccacaaaggtctgcagcttcagtcctgaagccagcgagaccacgaacccaccgggagggacgaacaacttcagacaagagaaacaaacaactccagatgcaccacctttaagagctgtaacactcaccccgaaggtctgcagcttcactcctgaagtcagcgagaccacgaacccaccagaaggaagaaactctggacacatctgaacatctgaaggcacagactccggacacaccat

SEQ ID NO: 141472 - DNA, 675 bp, Homo sapiens; identical to SEQ ID NO: 124689

SEQ ID NO: 141473 - DNA, 1222 bp, Homo sapiens; identical to SEQ ID NO: 114673

SEQ ID NO: 141474 - DNA, 552 bp, Homo sapiens
ttaaaaggttttccctctctctcctccttctgacatggcgttgggtgcaggaagaggtggtgtacagatggcccctgtctggggactgctgcctggtagagggccccatcctgttgtctttgcattggcctctctccttgctgcctctgccaccaaaggatttctggactgttggtgtgcctgtggcccaagggcttggcattctccactggcattggttggcccacaggttcctgagatccagcggccactcacatttaatcgctgtctctgcacaaacgtgagtgcagctttctgtaggagacactcggcataacagatttcagcatgcatttcctcgcgaaggtctgcagcttcacttctgaggctggcgagaccatgaacccatgggaaggaaaaaacaactccagatgcactgcctttaagagctgtaacactcactgcaaaggtctgcagcttcactcctgaagtcagtgagaccacgaacccaccagaaggaagaaactccggacacatctgaacatctgaaggaacaaactctggacataccat

SEQ ID NO: 141475 - DNA, 1110 bp, Homo sapiens
ctaaattgcagactgctcctgcaggaagccttcagggcctgggaggcctttatctggctcaaaagctagggctacttctcgaaggacttccaaatgctcctcagcagctgatagtgactggtcaatccactccaggccccccgtcagatggcaggcattccttgtcaccagcaccaggcgactgacagacaggagcagggtagtcgtccctgtgtccaggagcttggggtccaacggagggtacatcgacttcacaacatcatctaccctggggctgttccacttggccaccacaatcatgtcgctgacaatggctgaagtcttcatcttggccccagagcccattgtcatggcaacaagcttctctgtcagagtgtgacaaatcttcaagatggcaatgcagtgggacatgagacccgaggcatcttcgatccagtctttgttctccagaatggcctcaatgtgggggttggtgataacaacgtcatccagttcacggtctccatgcttccggggagctcctgactcagtcccgttcacatcgtcctcatgggctaaggctgctgggtcccctttcacattgcggaagttttgttctttcactctttgcaataaatctcgctgctggtcactctttgggtccacactgcctttatgaggtgtaacactcaccacaaaggtctgcagcttcagtccccgaaggtctgcagcttcactcctgaagtcagcgagaccacgaacccaccagaaggaagaaactctggacacatctgaacatctgaaggcacagactccggacacaccatctttaagaactgtaacactcaacacgagggtccgcggcttcattcttgaagtcagcgagaccaagaacccaccaatattgtacacaacatttctggggcagctgacagtattattgagtgccattgctcttgttttcctcaaggactggtgaagacattgtccaggaatgttaccacctgctaggtgtgcaaccttaggcaagttttttagcctctgtgagaatccatgtgaatggatccttatttcttcttgtttgaagaaaatttcatcatctgacacatacttctgcaaaatatccctcat

SEQ ID NO: 141476 - DNA, 1065 bp, Homo sapiens
atgggtgctgaaagacataaaacaaacttcaggctatgcaaagcggccttggaacctgcatggagcctcttaaatgaacaaagagccagggtgtcccataaaacattcaacaagggactgaggctggacaagtttgaagaatgtggattccaagagtggatgtctccaggaggttccgggaagttctggctgactggccaccaagcagccctcatcatttttcgatcaagtgatcatagtccaggccatgtaagacatgcctacttcccctttgccttctgccatgattgtaagtttcctgaggtctccccagaagctgagcagactgccatcatcctgcttcctgtacagcctgtagaactgatgcctaaatcaaaggaacttgtttcttcaagctcttctggcagtgattctgacagtgaggttgacaaaaaggtgactactgctgcaccaagtcattttggtgatactcaacaatattgtccatatcccattctgaaggatagtaaaaggacaatactgaaaatggaaactcttgcagaagtatatctgactaagtccatccgggacatagcatccaacaagaaaaactggatctacacacagaagaaagtagcaagatgtcagatgtgtccagagtttcttccttctggtgagttcatggtcttgctgacttcaggagtgaagctgcagaccttcccgctcgtcccagacaaccaaaaggagaagaagagatgtgagaaagagaaggagacctgccaccatggcaatgaccccgtgaagagggaatggcggtccatgcacaggacccagcctccaatcaatcacagcaggtgccagctggtagtgccaagtgtcctgcggccatgcccatttggaacctgcaccagcctacaagtgccacgtccaccccggctcccacccgcacctctccctccacacctccctgcaggaagagggagcaagctccgccttggcagcccagagaggggccccatagtgcagcggtgggctgaagggctcctcgagcagccagagaggacgtcaaggctgaggagatgctga

SEQ ID NO: 141477 - DNA, 493 bp, Homo sapiens
attctaaactccctgaaggagacaaattaccagtggacaagaacacagcctctggagtccaataggcctggtgtattcattagggatgcctaaatcaaaggaacttgtttcttcaagctcttctggcagtgattctgacagtgaggttgacaaaaagttaaagaggaaaaagcaagttgctccagaaaaacctgtaaagaaacaaaagacaggtgagacttcgagagccctgtcatcttctaaacagagcagcagcagcagagatgataacatgtttcagattgggaaaatgaggtacgttagtgttcgcgattttaaaggcaaagtgctaattgatattagagaatattggatggatcctgaaggtgaaatgaaaccaggaagaaaaggtatttctttaaatccagagacatggagccagctgaaggaacagatttctgacattgatgatgcagtaagaaaactgtaaaattcgagccatataaataaaacc

SEQ ID NO: 141478 - DNA, 389 bp, Homo sapiens
tttttttgcagtttcatcgtttttgtttttatttttcccctttcaacctggttttcggctctggaagctgttcctgtgcacagttctatttcctacagttctgagaaagcggttccatcgcagatgaccaaaggctggacccctctggctataacgtagaccttccagtgggtggtgtcgacatagccgatatcccctggctctattggcatggccacagactgacaatgtcttcggcactggaagggagggatgagctgcaacatggcctcaccgcttactccccacaacaggttctgggtgaagaaaggagcacttgtttaaagaggcatcttttggaaatggcaggtgagtgaaaacaggaaaaagctcacgtaacatttgtgatc

SEQ ID NO: 141479 - DNA, 466 bp, Homo sapiens
tcatggtgaggatcagtggggaaggcgctttacctcgaagaaacttctggtgctacacgtgtgtgtgttgtggtctgtgactttgcagcgggggaaactgaggccctaagagacggtgtctcaacatgtggtatttggacggctgccatcagagacataatagggggatctctggcggccacttggataaacatggcctctggagccctgcttcagacctacacagccagacttggaacagagcccaaggaactgccattttataccccggggcaggggtgagccccaagaagtgcgaggcccattgttcacggggtgaaagccacccgtccaaagccaaggaacctcctggacaaagacatgttttccaagtccgacccactgtgcgtcatgtatacccaagggatggagaacaagcagtggcggtgagtttgggcgcaccgaagtcatcgacaacacgctcaat

SEQ ID NO: 141480 - DNA, 523 bp, Homo sapiens
ctcaatcatggctgtagagtttatgcctgtgtgtgtacacgttatagttcattgactctgtgcaactattcttcagggacctagtacttaagatactgtactcatatttttccctctttacccaccgcccacagttttcccacccttacttggctctctcttagtcatgggctggcttgaccagtttaattactttttttctgtttcatacttctacaggaggagacctctgaacagatcacaaatgttacgtgagctttttcctgttttcactcacctgccatttccaaaagatgcctctttaaacaagtgctcctttcttcacccagaacctgttgtggggagtaaggtaggaaattttgagaggacttggatctagaattttctttatttgggacctggactgatgtcataaccaaggccttccctgcatattggcttagagggttacagggtgaattgaggggacacccacacagactaggtcttccctcctgctgctagccaagagacttgcaggggg

SEQ ID NO: 141481 - DNA, 1185 bp, Homo sapiens
ccgaccggggtgaatttccgggtcgaggatttcgtctggagttgggggagagcccagggctccagtcgtttcggatgaggcgtgaatcgcgcagggtattgactaatttggggtgggggggtccggtgggcgatggagcagcctgaggacatggcgtcgctgagcgagtttcgactccttggcgggcagcatcccggccaccaaggcggagatcaccgtgtcctgcttgaacctactggacaaagacatgttttccaagtccgacccactgtgcgtcatgtatacccaagggatggagaacaagcagtggcgggagtttgggcgcaccgaagtcatcgacaacacgctcaatcctgacttcgtgcgcaagttcattgtggattactttttcgaggagaagcagaacctccgttttgatctatactacgttgactctaagagttctgatttatccaaacacgatttcctgggccaggccttctgcacccttggagagattgtggggtcccctgggagccgcctggaaaagcccctcacgataggcgcattcagcctgaattccaggacgggcaaacccatgccaactgtgtccaacggtggtgtcccaggaaagaaatgtggcaccatcatcctgtccgctgaggagctcagcaactgtagggatgtcgccaccatgcagttctgtgccaacaagctggacaagaaagatttctttgggaaatctgaccccttcttggtattctacagaagcaacgaggatggaacgttcaccatttgccacaagaccgaggtcatgaagaacaccctaaatccagtctggcaaactttctccattcccgtgagagccctctgcaacggcgactacgatcggaccatcaaggtggaggtgtatgactgggatcgggacggcagccatgacttcattggggagttcaccaccagttaccgggagctggcccgtgggcagagccaattcaacatctatgaggtggtaaacccgaaaaagaaaatgaagaaaaagaaatacgtgaattctggcacagtcaccctgctttcctttgctgtggagtcagagtgcaccttccttgactacatcaaaggagggacccagatcaacttcactgtggccattgatttcactgcctccaatgggaacccctcacagtccacatccctgcatgtatt

SEQ ID NO: 141482 - DNA, 2586 bp, Homo sapiens
  misc_feature (1)...(2586): n = a,t,c or g
atggcctctggagccctgcttcagacctacacagccagacttggaacagagcccaaggaactgccattttataccccggggcaggggaacctcctggacaaagacatgttttccaagtccgacccactgtgcgtcatgtatacccaagggatggagaacaagcagtggcgggagtttatggagaccatgttgaattacgatcttgcattcagcatcttggttatgcctcttggtcctgggtcagctgtagtcctcaccgacacaggtgacaaggaattgaatgggatggagtactgcgttcctccactagagatcttttcccagattgacttcagttttttaattgacctttggggcgcattcagcctgaattccaggacgggcaaacccatgccagctgtgtccaacgggnatgtcgccaccatgcagttctgtgccaacaagctggacaagaaagatttctttgggaaatctgaccccttcttggtattctacagaagcaacgaggatnggaacgggatcccgtggagcactgaagaaactgatccggaggcccgcctagcggtgggccagtatcccgcccctgtgaaagggcgatggctgcgctggttcaccatttgccacaagaccgaggtcatgaagaacaccctaaatccagtctggcaaactttctccattcccgtgagagccctctgcaacggcgactacgatcggaccatcaaggtggaggtgtacgactgggatcgggacggcagctacctcacagtcagcttcattgtttccacctggaatttgcctcgtcttaccctggcgttcctgtactcctttgcctggaatagtctcctcttctgtgccagttggggacagctaccagntctccggctggatgccccaggccagcacattgaccaaggccctctggcagtgactggggaagttaaaggagccaaccctggggtcagtgggagttctgccgtgtacaagtcttggccgtgcttgatatgttaccaaacgttcctgggggtaaaatcgcccctggttgagaccgctgagttagccaccaacaagccttctctgagcacctactctgagcctagccccatgatttatctgacacaggtggtaaacccgaaaacagaaaatgaagaaaaagaaaaacgtgaattctggcacagaatcattgtagtcaatcattttccagttctcagccgctcagttgtgatcaagggacacgtggtttccgaactgccagctcagaataggaaaataacttgggattttatattggaagacatggaatcttgctgccaacgagatcagcatttatgacaaactttcagagactgttgatttggtgagacagaccggccatcagtgtggcatgtcagagaaggcaattgaaaaatttatcagacagctgctggaaaagaatgaacctcagagaccccccccgcagtatcctctccttatagttgtgtataaggttctcgcaaccttggggattaatcttgctcactgcctactttgtgattcaacctttcagcccattagcacctgagccagtgctttctggagctcacacctggcgctcactcatccatcacattatgctgatgtccttgcccattgccaagaagtacatgtcagaaaataagggagttcctctgcatgggggtgatgaagacagaccctttccagactttgacccctggtggacaaacgactgtgagcagaatgagtcagagcccattcctgccaactgcactggctgtgcccagaaacacctgaaggtgatgctcctggaagacgccccaaggaaatttgagaggctccatccactggtgatcaagacaggnaaagcccctgttggaggaagagattcagcattttttgtgccagttccctgaggcgacagaaggcttctcctgaaaggttttttcgacaagtggtggcgctagatttccctgagcgggggttcccattttcttatccatggaggagacctcttgaacagatcacaaatgttacgtgagctttttcctgttttcacgtcacctgccatttccaaaagatgcctctttaaacaagtgctcctttcttcacccagaacctgttgtggggagtaagatgcataagatgcctgacctattttatcattgcagcgggtgaagccatgtttgcagctcatccctcccttccagtgccgaagaccattgtcagtctgtggccatgccaatagagccaggggatatcggctatgtcgacaccacccactggaaggtctacgttatagccagaggggtccagcctttggtcatctgcgatggaaccgctttctcagaactgtaggaaatagaactgtgcacaggaacagcttccagagccgaaaaccagggttgaaaggggaaaaataaaaacaaaaacgattgaaactggttttctggggggtttggttacttagttaacctgcccttttggcatgcatgttgtggaaccagctgtgagctgcaaggcagtgggccagagcctccgccctcctgaactcttcctgcaggtggctcaggaaggattcagcctggccacttg

SEQ ID NO: 141483 - DNA, 554 bp, Homo sapiens
  misc_feature (1)...(554): n = a,t,c or g
aaaccgtgtactattagccatggtcaaccccaccgtgttcttcgacattgccgtcgacggcgagcccttgggccgcgtctcctttgaggtaaggggcctggataccaagaagtgactgctcatctaatccataaagctatgttaacagattggngctgtttgcagacaaggtcccaaagacagcagaaaattttcgtgctctgagcactggagagaaaggatttggttataagggttcctgctttcacagaattattccagggtttatgtgtcagggtggtgacttcacacgccataatggcactggtggcaagtccatctatggggagaaatttgaagatgagaacttcatcctaaagcatacgggtcctggcatcttgtccatggcaaatgctggacccaacacaaatggttcccagtttttcatctgcactgccaagactgagtggttggatggcaagcatgtggtgtttggcaaagtgaaagaaggcatgaatattgtggaggccatggagcgctttnggtccagggattgcaagaccagcaagaagtca

SEQ ID NO: 141484 - DNA, 1226 bp, Homo sapiens
atcgtaaaacgttgagcccgccccatgagggagtgaacatacgatccggaggcacgaagggggaatccccgtcatggctaacgagctcgtccgacattacatctgacggcccacagggccacaacggcctacacagccggcagggaaacacagaaagccagaggggggagcagatgaggggcaccaccacaaatgacactgaagatcgccagtacaccgagcaacagtggggggctcctgtccttgaaactgactttgcctgtgcttgtggaggaggctggtgttcattttcattctttggaaagagcagcaaaacagataaacatccagccagactgatcaagacaaacagaaaaatggacaaattccttgaaaactacaacttgccaaaattaagacaaaatgcaacaaaatctgaaaagtcctatggatctactaatgaatttgaattggtagttaaacatcctccaagagagaaaactccagggtccaaatggcttctctggctgtcctccacactgcagctggagtctcgagcccagagagtggagtccacggcccccacaagctggtctttgtgtctccaattcattcgcatcctcaagctcccaggcagagccagactcagtacaagcaggaggggcaagagtgtggggagagcccctcgaggtgtgagtgcacagagaagaccagaaactgagggtgaggaagaaatattaagaacgacccttgggaggggccccatactatcagctatggtcaaccccaccaagttcttcaatgagccctggggccgcatctctatccagctgtttgcagacaagtttccaaagacagcagaaaatgtttgtgctctgagcattggagagaaaggatttggttataagggttcctgctttcacagaattattccggggtttatgtgtcacggtggtgacttcacacaccataatggcagtggtggcaagtacatctatggggagaaatttgatgatgagaacttcatcctgaagcagacaggttctggcatcttgtccaaggaaaatgctggacccaacacaaacggttcccagtttttcatctgcagtgccaagagtgagtggttggatggtgagcatgtgttctttggcaaggtgaaagaaggcatgaatattgtggaggccatggagggttttgggtccaggaatggcaagaccagcaagaagatcaccattgctgactgttga

SEQ ID NO: 141485 - DNA, 962 bp, Homo sapiens
ggcacgagggacgccaccgccgaggaaaaccgtgtactattagccatggtcaaccccaccgtgttcttcgacattgccgtcgacggcgagcccttgggccgcgtctcctttgaggtaaggggcctggataccaagaagtgactgctcatctaatccataaagctatgttaacagattggaggtagtagcattttcattacaagtgactaaaagaacagctgtttacccctgatcgtgcagcagtgcttgctgttccttagaattttgccttctgtttgcagacaaggtcccaaagacagcagaaaattttcgtgctctgagcactggagagaaaggatttgggttataaggggttccctgctttcacagaattattccagggtttatgctgtcaggggtggtgacttcacaccgccataaatggcactggtggcaagtccatctatggggagaaaatttgaagatgagaacttcatccctaaagcatacgggtcctggcatcttgtcccatggcaaatgctggaccccaacacaaatggttcccagtttttcatctgcactgccaagactgcagtggttggatggcaagccttgtggtgtttggcaaagtgaaagaaaggcatgaatattgtggaggccatggagcgcttttgggtcccaggaatggcaagacccagcaagaagatcaccattgctgactgtggacaactccgaataaagtttgaccttgtgttttattctttaaccaccaagatcattccttctggaagccccagggagagcacccctccaacccatttgctcgcaagtatcctagaatctttgtgctctcgcttgcagttcccttttgggttccatgttttccttgttccctcccatgcctagctggattgcagcagttaagtttatgattattgaaataaaaactaaataacaattgtcaaaaaaaaaaaaaaaagcgg

SEQ ID NO: 141486 - DNA, 410 bp, Homo sapiens
  misc_feature (1)...(410): n = a,t,c or g
tcgaccgcctcggaggcgttcagntgcttcaagatgaagccactggctgccagaaactcattgaagtggacgatgaacgcaaacttcgtactttctatgagaagcgtatggccacagaagttgctgctgacgctctgggtgaagaatggaagggttatgtggtccgaatcagtggtgggaacgacaaacaaggtttccccatgaagcagggtgtcttgacccatggccgtgtccgcctgctactgagtaaggggcattcctgttacagaccaaggagaactggagaaagaaagagaaaatcagttccgtggttgcattgtggatgcaaatctgaagcgttctcaacttggttattgtaaaaaaaggagagaaggatattcctggactgactgatactacagtgcctcgcn

SEQ ID NO: 141487 - DNA, 1098 bp, Homo sapiens
  misc_feature (1)...(1098): n = a,t,c or g
aaaaaagcttatgtcacctgcgataagtgcacgttggccctcttccgtggtgtctcggaggcgtntcagctggcttcaaagatgatagctgaacagtctccttcccagccactggctgcccagaaactcattgaagtgvgacgatgaacgcaaacttcgtactttctatgagaagcgtatggccacagaagttgcatgctgacgctcatgggtgaagaatggaagggttatgtggtccgaatcagtggtgggaacgacaaacaaggtttccccatgaagcagggtgtcttgacccatggcccgtgtccgcctgctactgaagtaaggggcattcctgttacagaccaaggagaacctggagaaagaaaagagaaaatccagttccgtgggttgcatttgtggatagcaaatcttggagcgttcttcaacttgggttattgttaaaaaaaaaaaaaaagtaaagaaggatattccctgggactgactgatactacagtgcctcgccgcctggggccccaaaagaagctagcagaatccgcaaacttttcaatctctctaaaagaagatgatgtccgccagtatgttgtaagaaagcccttaaataaagaaggtaagaaacctaggaccaaagcacccaagattcagcgtcttgttactccacgtgtcctgcagcacaaacggcggcgtattgctctgaagaagcagcgtaccaagaaaaataaagaagaggctgcagaatatgctaaacttttgggccaagagaatgaaggaggctaaggagaagcgccaggaacaaattgcgaagagacgcagactttcctctctggcgagcttctacttctaagtctgaatccagtcagaaataagattttttgagtaacaaataaataagatcagactctgagaaaaaacataaaacaaaaaaaaaatggggggggcggcttttagaggatccagtttttccccggggggggggggaagttttttttttttatggggggccccaaaaaaaaatagggggggggggtttttaacggcgggggggggggaaacccggggggtcccccaattaaagcgggggggagcaaaggaggctcc

SEQ ID NO: 141488 - DNA, 415 bp, Homo sapiens
agcggaagcaggctccaggtctcggagctcatccagcacacctacgagcccgaagcccctcctgcagtcccccaaacccagtctggcagcacggcccgtcatcccgcagaaaccaagaaccgcctcacggcctgatgacattccagactctccatctagcccgaaagttgcccttcttccacctgtcctgaaaaaagttccttcagacaaagagagagatggccagagtagcccccagcccagccccaggacattttcacaggaagtttcaaggagaagctggggccagcaggcccaggagtatcaagaacaaaagcaacggtcctccagtaaagatggccatcaaggcagcaaatctaatgactccggggaagaagcagaaaaagagtttatttttgtgtaaaggtcacccacg

SEQ ID NO: 141489 - DNA, 3142 bp, Homo sapiens
cagaacgagacttatctatgataccagttttggaattatcagagcccttaaaataaccatgattaagttgttaagggctctagtggaaaaagcagacaacatgcaagaacagatgggtaatgtaagcaggagataaaagctcttaagaaaaaaaaattaaaaggaaatactagagataagaaacctgtaacagggtattgtcaccagcaccacccagcaggtaagcgagccagtgcctgtgacttctccttctattcttaactgaccctctgagagcaaaggacttctaatccaggaagatttaaaatcagcagagcggctcatgcgtgatgctaagaactctaaaacggtgagtttcacttcaggctgtgtgagagtctggtataataaaaacgtttcataaaatttagttttagaaattcaggagaccctggaatcaatggctggagaagttacaagagtagtagatgaacaactaaaggtttgtggggtttgttatttgggaaatgaaattgttaatatttaactacgcatgatagcatttcattcccgacaagacttgattcatgccagcaccgaaaagatttctattccacgtacctttgttaaaaatgtcctgttggagcagtctggaattgatatccttaacaaaattaggtaggtttataatgttaataaacctaggagctgcagtttctgtaaatgcagtcgaggcagctgtaaagaacattgccatcataaactggtgagtgctgtgcacatcttgagcaggacctcctgtttcagctctgctgtgatgcaggatgacttccgggagaagccagttaaacgttccatcatcacagtggaggagctaacagagatagagcgtttggaagatctggatacctgtatggtaagacacatcctctggtggtaccgttacccttttcactggactgtgccattgtttttttttttttttagcctttgcactgagggcttacactgagtgttcggtggatagtatctttattctggtcattcagacaggctcctattagagtgtctgcagaatagtaagtccagataatcggtcaataccatgaccagagtgatttctttaagtattcctaaataaactttttccctcagacaggagaagcggagctcgggatttatctctgagttgccctctgaagaggggaagaagctggaacactttaccaagttaaggccaaaaaggaataagaagcagcaacccacccaagcagcggtaggtggactgcaggagaggccccatctctcccacacccttttcttctctggggaaagttggagggtcgtagatgaattttttaccaagaaggtgaccaaaatggattccaagtgagttcagagtaatttcactgataatgctattttattcatatttaaattactaacagttacaattaattctcggaaaagtagtggctttctcaatttaatcaaatcccggtccaaatccgagcgaccaccaacgatcttgatgacagaagaaccctcctcaccaaaaggggcagtcagaagtccacctgtggactgtcccaggaaggacacaaaggccgccgagcacaatggcaattctgaacggatagaggagataaaaacacctgactcctttgaagagagtcaaggggaagaaatagggaaggtggaacggagtgacagcaagagcagcccacaggcagggcggaggtatggggtccaggtgatgggcagtggtctgctggcagagatgaaagccaagcaagagaagagagctgcgtgtgcgcagaaggtaagggtggacctatttttaattcattcatttatttgatatataatagatgcacacattttcatggtgggaggtggggcaggtaagtcaggccattgccatcacccccttaggaaaagcgcttaccttctgattgcagagtcacatgattcagaacccaaagcggaagcaggctccaggtctcggagctcatccagcacacctacgagcccgaagcccctcctgcagtcccccaaacccagtctggcagcacggcccgtcatcccgcagaaaccaagaaccgcctcacggcctggtaagagttttgcagttagggagttgcattgtgaccaggtggcttcccagagccagctggatcagactctgcaggtggtttcaggggcagctggtgagcgaggtacagcggcttctgcaggaggggatcacaagaaacctatgcaaagctgtgaaagtgatgcagacaaagagagagatggccagagtagcccccagcccagccccaggacattttcacaggaaggtaaggattgtaaggatttcttttctctgggttagctctccccaaggagggacatttcaaaataaaggagtgctcgctcagtcacaaggtcagatgttccttactctcagaagtgtggtgcagacatggacattctcagggcgaccctgcaccagtttgctccttctaatttgctgaggtagaagcacagcaagctaatcctgtgacgagaatgctttcttcccaaatcagactgagctgttaccaaggggccgaccatggctaacagcttccagctgccacaccttgagaccctctacagtggtcttgctgtggctaggccacccccactttccctgccaaccaccgaggacggctggtacactagagctgcccaacacaggactctactgagcaacttttgctctagggccctcctctggcctggtttgaccctttggcctgaccagccctcactgaagcctgtcctctctgtgatcaagtcatttcgggtctggctcatgatgcaccttctcatttccccaggtgaacttattcccttctaaggctacaattcccacctttgcagtgatgtctccctcgtcttttgctttatccagagcaaagctgggcatcaagacaggtgtatgtgtccagtggctctgccacctgccctcagcatgggctgtgttctgtgctccggcagccggtggtgcagagtggctgatctttgcctggtggagccattgaatgttggcttttctccttgctgagagtgtggctgtcataagatggggaaagaagggaggaaggacaaggtgtgtgatgcacagtcctgaatt

SEQ ID NO: 141490 - DNA, 484 bp, Homo sapiens
atgaatcggcaactaagtgactcctatacagaagacaccaaagagccatcagatgtcaccacatctgagagaaccagaagtcctccaggttctgccaaaaccactatgatagacaccttgaaaaaactgcaggatgtactaaaaactgaggactccaaaaatcccacaaagtcagcagcagatttgttggaacaatatgtcaaggctacgggaccaatcatagagatcctccaaaaagcgacaaagactatggaaatgatcatgattgtggaggagaaagccagtgacgaactccaacctgacccggagctccagcagcgatacatccacagtgtccgtgggaagcccgggctggtgaagcagcggacacaggagattgagacccggctccggctggcgggcctcaccgtctcttccccactgaagcgctcacactctcttgccaagctggggagtctcaccttctcaacggaagacctgtcca

SEQ ID NO: 141491 - DNA, 1029 bp, Homo sapiens
ctgctaactgagtggctgacggtcctgtctctcgagttggaggcatcttgacttagttgctgggagcctgtgttggaacttatttgttggagaaatgtcttcagagtcagaaaaggataaagagagactgattcaagctgccaaaatgttcttctttcatgtacaagatcttgcttctgtcataaacacactgactgaattgtttagcccgcagtatgaatactcaaatccttttgatggctgtgaaaaacaatagttacattaaggatttttttgagcaaatgctcaaatatttttaaggagatgcaatctgtagtggatgcaagacatgacaaaattcaaaaggagtctttatgttccaaggttgcaatggccatgtgctctgtggttcagaagagtaccaatgtagaggagttgcatcagtcagctaaagaagtattcaaaagtgcccatacgccagtcatcatctctgtgctaaacagcagtaacatccttgggagtctggaatcttctctttcacacttgatgaaattccccatcatgaatcttcaattaagtgacttctatacagaagacaccaaagagcaatcagatgtcaccacatctgagagaaccagaagtcctccaggttcttccaaaaccactatgatagacaccttgaaaaaactgcaggatgtactaaaaactgaggattccaaaaatcccacaaagtcagcagcagatctgttggaacaaattgtcaaggctatgggaccaatcttagagatcctccaaaaagcgataaagactatggaaatgaatatttctgtgtttaagaaagccagtgacaagtagggatgcaacagaaatgttcatttctgtcagaaaactacttaaaatcttatggtttttcatagtagtttctaagatcttttggtgccaaacatgtgctatgttagaacataagtacacaaaagtcatctggcaaaacatttacctgtagttttgctttattaaaataaaaagaaataattaagaaaaaaaaaaaaa

SEQ ID NO: 141492 - DNA, 996 bp, Homo sapiens
atggcggccacaccccctcatcgcgcgggacccaacccatgcagacacagtaggcacctcagcgagggacgcgaggagacgcgcacacacccacactcaccacacacccacggagggggtgtggaaggccccgctcccccggcatctcggctgcagcgggacaaggtgacacatccgggagcccggcagcgcgccgggtgtgcactcacccgggcccgccgcccgcgagcctcggacgcgggcagcagcagcagcagccgccgccgccgccgccgccacctccggccctccacgtcagccgacggcgggagggagcgggtggcggcgttgaagcgagtactttacctcgtgtgggcctttattcctgaatcttggctaaactctttaggtttaacctattggcctcaaaaatattgggcagttgcattacctgtctacctccttattgctatagtaattggctacgtgctcttgtttgggattaacatgatgagtacctctccactcgactccatccatacaatcacaggtcatgaaaggaacaccaatgttttgcaaactatgggcagcagtgtttttgagggtcatgatcagtttagtgttacagtcacaggggaccctatggccagggctggaagaagccagctagagcctcacagtgactcagatgccacactccaattgcactgtagtcagcccacttgtgtcataaagcctgtttacacaaagcctagcatattagaagcagctgtgagtcagcctgcttcagctgctgctgctgccccaagaggcccatctctccctgtgatactttggtttctaaggcaacctcttttgaatgttctcagtgaatgcaccatgggtgggcacatcctggggaaagttcagtcactcactcctcaccaccattctgtgaaggatttacgcacctggcaagaattaaaatgcagtgtctaccttattgctgatggagcccgattttcaagtgctgcataa

SEQ ID NO: 141493 - DNA, 710 bp, Homo sapiens
gaggaggcgagaatggaccaatggtgccacggagcacatcgctgacgctgattgtgttccttttccacagattgtctaaagccccaggaaaaatggtggaaaattcaccgtcgccattgccagaaagagcgatttatggctttgttcttttcttaaagctcccaatttggcttcatactttacctcgtgtgggcctttattcatgaatcttggataaactctttaggtttacccatctggcctcaaaaatatttgggcagttgcattacctgtctacctccttattgctgtagtaattggctacgtgctcttgttttgggattaacatgatgagtacctctccactcgactccatccatacaatcacagataactatgcaaaaaatcaacagcagaagaaataccaagaggaggccattccagccttaagagatatttctattagtgaagtaaaccaaatgttctttcttgcagccaaagaactttacaccaaaaactgaactgtgtgtaaccatagtaacaccaagcacgtatttatttataagtttttgccattataattttgaccataaattaatttgaccatctctcttattaatagagaagtaaaaaatgtaagttgaccttctcttagattatgttcaatgaatattgtaaatgttcaagtattgttaatgaatagaataaatacaatattgcattcccaaaaa

SEQ ID NO: 141494 - DNA, 524 bp, Homo sapiens
ttaaatttgtgtaacgtccttgacgccttcacgttttctaattataaggtgtttacatccctgagtacattgggatgactggcatgtagagccgctccaggtgccagtcagaatcggaacatgcaggatacttgtgcgtctgcaagtaaggacaatctcgatggtgatcggtgtctctgtctctcccacattgcagagtgtgtgcatgcacgcaaagctgtgtaaagcatagttctcagtgctgacttttctatcaggactctggcaacctgaggctttgtcaaatgcccctgctactacatcaggttgcagcagcaaagagctgtcctctatccagagctgaaagtgcctcttgcgatgaaccagttcaccccggccgtggaccgccaagcagctactcagctgcttaagctggcccataagtacagagttttctgggtttgttgttgttgttgtttttgcaaagagctggagagatactaagatgagtgaaatatagattccactcttctttaagaggagtc

SEQ ID NO: 141495 - DNA, 675 bp, Homo sapiens
ccaggcggtggaattcggctgaaagtgcctcctgcgattaaccagttcacccaggccctggaccgccaaacagctactcagctgcttaagctggcccacaagtacagaccagagacaaagcaagagaagaagcagagactgttggcccgggccgagaagaaggctgctggcaaaaggggacgtcccaacgaagagaccacctgtccttcgagcaggagttaacaccggtcaccacctttggtgaagaaacaaagaaagctcagcttggttggtgattgcacacgaccgtggattccaatcgagctggttgtcttcttgccctgccctgtgtcgtaaaatggggggtcccttactgcattattcaagggaaaaggcaagactgggacgtctagtccacaggaagacctgcaccacttgtcgccttcacacaggtgaactcggaagacaaaggcgctttggctaagctggtggaagctatcaggaccaattacaatgacagatacgatgagattcggccgtcactggggtggcaatgtcctgggtcctaagtctgtggctcgtatcgccaaagctcgaaaaggcaaaggctaaagaacttgccactaaactgggttaaatgtacactgttgagttttctgtacataaaaataattgaaataatacaaatttttcctt

SEQ ID NO: 141496 - DNA, 684 bp, Homo sapiens
atgaatagaagagagcacaaagacaaggagaatgacatccaggatcccatctggaaaagggtaagactaaaccaggaagaagttgaatccctgaatagaccaataacaggttctgaaattgaggcaataattaagagcctaccaaccaaaaaaagtccaggaccagatggattcacagccgaattctaccagaggtacaaggaggagctgatacttgagctggacactcctcaagaagtcattgcagttaagtcagctcagaacagaggctcagcagtggcccggcagatgacaaagaaaagaaggaacaacggtcatgccaaaaagggccgcggccacgtgcatcctattcgctgcactaactgtacccgatgcgtgcccaaggacaaggccattaagaaattcgtcattcgaaacgtagtggaggccgcagcagtcagggacatttctgaagtgagcgtcttcaatgcctatgtgcttcccaagctgtatgtgaagctatattactgtaacgggtggtacaaattacaacacagctcgacattagttattctcccaaaacctgcggctgcctgtatcattccaggcaaaaaggactttgattactgcaacccaattggttgtcaagggagccttgattacgaacccccctttggtgcctcgtgtaacccaacccgtgcttaa

SEQ ID NO: 141497 - DNA, 1096 bp, Homo sapiens
cggcccctgactttgctctggtctctctcccagctccctgcccaggcccacagccatggccatggcccagaaactcagccacctcctgccgagtctgcggcaggtcatccaggagcctcagctatctctgcagccagagcctgtcttcacggtggatcgagctgaggtgccgccgctcttctggaagccgtacatctatgcgggctaccggccgctgcatcagacctggcgcttctatttccgcacgctgttccagcagcacaacgaggccgtgaatgtctggacccacctgctggcggccctggtactgctgctgcggctggccctctttgtggagaccgtggacttctggggagacccacacgccctgcccctcttcatcattgtccttgcctctttcacctacctctccttcagtgccttggctcacctcctgcaggccaagtttgagttctggcattacagcttcttcttcctggactatgtgggggtggccgtgtaccagtttggcagtgccttggcacacttctactatgctatcgagcccgcctggcatgcccaggtgcaggctgtttttctgcccatggctgcctttctcgcctggctttcctgcattggctcctgctataacaagtacatccagaaaccaggcctgctgggccgcacatgccaggaggtgccctccgtcctggcctacgcactggacattagtcctgtggtgcatcgtatcttcgtgtcctccgaccccaccacggatgatccagctcttctctaccacaagtgccaggtggtcttctttctgctggctgctgccttcttctctaccttcatgcccgagcgctggttccctggcagctgccatgtcttcgggcagggccaccaacttttccacatcttcttggtgctgtgcacgctggctcagctggaggctgtggcactggactatgaggcccgacggcccatctatgagcctctgcacacgcactggcctcacaacttttctggcctcttcctgctcacggtgggcagcagcatcctcactgcattcctcctgagccagctggtacagcgcaaacttgatcagaagaccaagtga

SEQ ID NO: 141498 - DNA, 716 bp, Homo sapiens
acccaatcaattctggggcttccaattcctctctccatggtcttatgtgaaataatacatttttaaaatattgttaaattgacttcaatgactaagattgtggtggagaggatatttccccaaactaactctttctctgacacttaggggttcattgtaatagtaacaccttgctagcaatcatctgctagtgatttgctcatggaagaaaaaggctaaggaaatttaggtttgatgacctttttcagagtttctgggaaagcaaaaccttctctctactactcactgcaaacaagcatgttgtgcaagctgctgctgccaaccaggtcacatccattagtgaaagtcaaatgctgtggagagagacattcaaacctgggtcaactgatagtatccattttcaatttctgacccaatcaattctggggcttccaattcctctctccatggtcttatgtgaaataatacattttttaaactgttgaagtcatattgagctgaaatttcccttaattacaactcttaatattttaactatttatgctaagtttctttgttccagaaaaagtactttaactcggccgggcgcgggtgtcacgcctgcaagcctgtaatctcagcactttgggaagccgagacgagcggatcacgaggtcaggagatcgagaccatcctggctaacacggtgaaaccgcgtctctactaaaaaaaaaaaa

SEQ ID NO: 141499 - DNA, 1566 bp, Homo sapiens
atgacttcactgggcgcttattggctcaggacccctgtgactgccagggcactggtcccagcactgcctgcgtgcagagctgtggtcacggcgctgggggctggcccagcagcagaggctgaacacagcagtcagcctgacagatgcccctctgccccgtcccttctgctcgatgtgggcagtgtcggaggcctgctgtcttctgtggcctttgggaaggagagtttatcttggcagggcttccccagctcagtgcacatcaggccctcggggaaaatgtggggagcgaagagtcactggtgggtgatgtgggcagctcccgtgactcctctacattcagggccatcctcaagagataaggtcactctctgggaaccagtgcggctggggtggcccctggcaggtttgcctccagagacccctcccttcaccattggatgtcagatccccgaagaagccatagcctcctgggaaactccatctgacaacagtcatcaggctcatgagccagatacaaatgctgagtctggggcctgcgtgcccgagaggccctttcctgtcagttggcccagggagcatcacacagggcactcttctcctcagtctctctcgcatctctctggcagacaggtggtcatgatcgtcagtgctgtggggccctattattccagagcaaatgctggagccagacttaccctgtggaaatgcacgaggacgtgggctgtgcctggcttgggacacatttggtctccatgtgaagaccgagattgcaactttctgcgcttggagcccaaaaggacagacacccaaggactctccaggccatacctcagtgacagcagctttgccatcccactggcctcaatcccagaaaaacttcaagagagcaaggcccaggattttaaaagggctaagactaatgttacagaaaatggactaccatggagagaggaattggaagccccagaattgattgggtcagaaattgaaaatgatactatcagtgacccaggtttgaatgtctctctccacagcattgacttcactaatggatgtgacctggttggcagcagtagcttgcacaacatgcttgtttgcagctcatatgacattaacagacaagacacttttcagaaagacaggtacaatcccaagtattctgctgctaatgacactggctttgtggacatcccttcacaggagaaggacctggcgaaggcagtggcaactgtggggcccatctctgttgctgctggtgcaagccatgtctccttccagttctataaaaaaggaatttattttgagccacgctgtgaccccgaaggtctggatcatgctatgctgctggttggctacagctatgaaggagcagactcagataacaataaatattggctggtgaagaacagggcagagagccagaggactctaatccagtggttcctgtttagtccacagcaaaggtgcggccggttggaagaacgcacagcctgcaagcagaagccttatctcccaattaagggtgtagaagaatctgggcgtgttgctggtggctcatgcctgtaa

SEQ ID NO: 141500 - DNA, 436 bp, Homo sapiens
gaccgtggtgcttttggccattggcatgttcttcaccgcctggttcttcgtgtatcctttcactgagcagccagaggaccagcattagtgatgtgggaagctcagggagaaaccacgctagattgccgtgggctgggctctctgcactccacagtccaccccttcgctttgccttaactgctgtgcccagttacgaggtcacctctaccaagtacactcgtgatatctataaagagctcctcatctccttagtggcctcactcttcatgggctttggagtcctcttcctgctgctctgggttggcatctacgtgtgagcacccaagggtaacaaccagatggcttcactgaaacctgcttttgtaaattacttttttttactgttgctggaagtgtcccacctgctgctcataataaatgcagatgtatagcaaaa

SEQ ID NO: 141501 - DNA, 297 bp, Homo sapiens
atgagcagatataccagcccagtgaacccagctgtcttcccccatctgaccgtggtgcttttggccattggcatgttcttcaccgcctggttcttcgtgtatcctttcactgagcagccagaggaccagcattatccaccccttcgctttgccttaactgctgtgcccagttacgaggtcacctctaccaagtacactcgtgatatctataaagagctcctcatctccttagtggcctcactcttcatgggctttggagtcctcttcctgctgctctgggttggcatctacgtgtga

SEQ ID NO: 141502 - DNA, 445 bp, Homo sapiens
gattagccttcgcggggcaaaatggagctcgaggccatgagcagatataccagcccagtgaacccagctgtcttcccccatctgaccgtggtgcttttggccattggcatgttcttcaccgcctggttcttcgtttacgaggtcacctctaccaagtacactcgtgatatctataaagagctcctcatctccttagtggcctcactcttcatgggctttggagtcctcttcctgctgctctgggttggcatctacgtgtgagcacccaagggtaagagctgcaatgggatggatgcgtgagcctccaaggcacagcccagggaagcctccccagagtcaggtaacaaccagatggcttcactgaaacctgcttttgtaaattacttttttttactgttgctggaagtgtcccacctgctgctcataataaatgcagatgtatagc

SEQ ID NO: 141503 - DNA, 448 bp, Homo sapiens
cccacgcgtccgcggagcggcggattagccttcgcggggcaaaatggagctcgaggccatgagcagatataccagcccagtgaacccagctgtcttcccccatctgaccgtggtgcttttggccattggcatgttcttcaccgcctggttcttcgtgtatcctttcactgagcagccagaggaccagcattagtgatgtgggaagctcagggagaaaccacgctaggtacatggaccccgccggttttgtacattggattggggctgagagaaggtaaggaggagaggagggctagtgatgcccaggggcaggttatagccttatttcccaagttcaggtgagctcagtttgttctttggatttccaggacagcgagcaggggacctggctggagtggaggtggggaataggggtgctacagatggaaaggtggtataaggaagggtg

SEQ ID NO: 141504 - DNA, 606 bp, Homo sapiens
  misc_feature (1)...(606): n = a,t,c or g
gaaatcgcaggactacaagtccctcaatgccacttgcgccggaggcacttccttttccggttgtgctaggcgcctgctcctgtcgacgtgttcttccgggtggcggagcggcggacttagccttcgcggcggcaaaatggagctcgaggcccatgagcagatatacccagcccagtgaancccagctgtcttccccccatctgaccgtggtgcttttggccattggcatgttcttcacckgcctggttcttcgtttacgaggtcacctctaccaagtacahctcgtgatatctataaagaggcbcctcatcctccttgagtggccctcactccttcaatgggctttggagtcctcttccctgctgctcttgggttggcatctaccgtgtgagtcacccaagggtaacaacccagaatggctttcactggaaacctgctttttgtaaaattaacttttttttttacttgtttgcttgggaagtgttcccacctgctgctcataataaagtgcagatgctatagcaaaaaaaaaaaaaaggggcgcccgttttaaaggacccttgggggggcccaagtttacgcgggcttgcaaggttttatttcttt

SEQ ID NO: 141505 - DNA, 480 bp, Homo sapiens; identical to SEQ ID NO: 115436

SEQ ID NO: 141506 - DNA, 672 bp, Homo sapiens; identical to SEQ ID NO: 115437

SEQ ID NO: 141507 - DNA, 1846 bp, Homo sapiens
atggcacagagaatcctgaaatgtgagaagaaatctcctagtggattctggcatgaggcaagggaggagaatgtcccctttgtgcccttggacacagttatcaggggaactgacgcctggaactgcatctgcattgtgatcttgacactaccggggcaagcattaggcaaagccatggccctgagaatgacgtggacagaaatcctggacaaggctggccaaagggggaatgcgtgggccctgctcccacccccgatgctgacatcaaaggagcagagacacgcaggagactccaggcagcacccgaggccctggccgccagcacccacctgtgtgccggctccgcagacgaggtccccccagcaccctggcagggactgtaccatcaacagacaaatggcagccgaccaaggaggcgactggcgtgtggaacagcactggccaccttgggaaccaagatattgggaagggacctgaagggcataagggaatccagagactcttgagaagggatcgtagctcacctcagaacgcctggagcagttggctaaacacagcaattttaggagcccctgacccctttgtccagagtgtgcccccccgcctgatgggcaaggacgcgcacactggccactctgacgatgccgaaagccctccatgtctacccgctacgccgcattcgcagacaggcgggggacatcgcggccgcggcaagctagagatgccgcctgctcgagcaaccttccacctgcagggccggccagttctactcttccaggatcactctcgtctcacccttctccccaaaatgtcagagcaagaaccaggaagggagaggctctttctggaagccacaggcataacgttactgaacaacgaggacaaaacatacacacgagcctgcaatgatggaagcaaaacagaacgtttggagatattcactgccgtttacaaggccacagtaagcagtaagcagattttctactcccctctagcagagaacatgttagcaggccctgtgatcaccaggagcatggacaaaagcctccagaagacaaaagtgcaggaaagctcatttctcagagatcagttcagaagtggtccagctgtcctaataggtgttacatcgtttggctgtgtcccaaatctcatcttgaattgtagctcccataatttccacatgctatgggagggacctggtgggagaaaactccgctgtgcattcgcgacggaatgcaagggacaaggacacatcgtatcttactatcttgaagataattttggctttaccactcctggaggtcttgccatagggtgtttgttgagccagtgtgatgtgtcctgtgttggctgcccaggtatatacgaccgtttctatcctcaggtcacctttactggggggaagactgaagacacttgtgaacaagctcctccagaatccttgcatgcagcttttgcagaactgataaaagcaatggtcggtcatgcttgccacaagctgcttctgttgagatcatcattctacgatcttgaccaatgggtgaagtttggttgcacttttggcatcttgcattcacagacctacagaaaccagattagggagcatgttggaggtggctctgtaagtgacaatgctaagattgagaacatagtgatgacatgtgaccaatctccaaagacacactgtgaggctccctcgcccaacggctggcgtggtctggagaggtctagggtaggagcaccctatgaagacatagtaatagaaactatccagaatggcacacagagagaaaaggaagatggaaaagattacgataaactacctccaaatgatgaggccagatga

SEQ ID NO: 141508 - DNA, 1023 bp, Homo sapiens
  misc_feature (1)...(1023): n = a,t,c or g
atgaagtttgaccttaccagcagtgcttaccatggtcacctatcatccttaattgagattagcccatataagtttcagaaaggaaaagatgtcaaaaaagaatttgtacatgtgggagcagcaggagcccctgtgttggcagggttaattgaccatgatcagcaggtagctacaattagacaaggggcacgaaggacaccaaaaatgtgtcctctgggttccacacatatccttcctgcccctactgtggaacagcagccttacctacctgctgatcatggtcaattaaccctgccaacacaggggctcctgctgctccctagacataaggagtcaaaggtgctcaggtacttctggctgcgccattatagaatctgccgtgttcctcctggtgggggtgttgggggtctgtgtttagccatttatgcctattttagctgtaaaagaagtccaaatgaaaatcaggtgatggtggaaccatggggacttgggggtggggcagagatgggaacatttgtatcagttgagtcagcttcgtggctccctgtggagccagggccgagccttgtcatgcgcacttgccaattagagattgatcagccagcagtcaagtgcattctcccgttcttgcaagaaggatcagccctttccataccagccttgtgcaagacgtgctttggtctccttttctctcctacctggatcctgcctctcacgggccgtcctattgctgagactcggngactggcagttgattgtagcagccagctccgagctcagctgatgttgacaggattggcgacatgtggtttttccatgtgttttggggtgctcatgatcctgcagctgggttccaagagggtgcatcccaagaaccagcattctcagacgcaggaagcagaagctgccaagctgtttaaaaactatgcccagcactggcagtcacttttgccatctttaaccaggaaaagcgatgacaaggctggccacattccacgaacaagagaaatcatcttctcttaa

SEQ ID NO: 141509 - DNA, 1412 bp, Homo sapiens
ccggctggcctggacgaacgggaagccgggagctcggccacgggtggcgaggctgcggtgaggcctggtctccggctgccagaccatgctgagtggagcacgctgcaggctcgcctcatcgctgcggcggaacgcgcgcgcacgccgtccgcggtcgcccgtaggtgcctgcacgcagtcaggggtcgcggcctttggcccgaccggggcaagaagactgaggagccgccccgcgacttcgatccaggcgctgctggagttcctggtgtgcccgctctccaagaagccgctcagatatgaagcatcaacaaatgaattgattaatgaagagttgggaatagcttatccaatcattgatgggatccctaatatgataccacaaggcagctaggatgacacgtcaaagtaagaagcaagaagaagtggagcagcgttagtttcattaattttaaaaaaatttaaaaaaacggcaacagccaactttttcttaataccatatacccttttaaaaacacaggtggcaggtaataagtggaagggaaggatgttttctggtctcctccctacgttgactgttcttaattccactggtttctttagcaggactgttctactcagcctctggtggaagaaaacttcccacaggggctgcactagcacagcccagcctttgcttttacagcctgctccttgccctattaccataccagtggtatggtattcttccacctttggacttgggatgggtattaaactcttcagggcataattgatgcaactagagtcaatatgcctgtatatattaatgatagctcttgggccatcggatctctggaaagctccaaatgggatggaaatttagtttgcggggaaagaggcttttgcttggcgcatatccaggcttagggactgtggggaggccttaagtttgcagatgcttcttttattgtactccttgttctgccccttgttttttggaaggctctgacttataacctgctgtatccgggaagaaaccattttgaccagtgtcttgggttggagatgaacatcgcctaattggacatgtgatgacctatttccttattcccattcatcctaagagtcattgaaattttgttttgccttgtttgtttagcttcaaggtctttggtaaagtcacatgttaaggatgactgaaattaattccaaaggagtgatgttggaatagtccctcctaaggggagagaaatgcatttgaaccgaatgtgatataaaaccacataatcaaatagaaacttcatgtacttacaaaaactgagtttgtaaaattaccttcatttctttgacattaaatgcttatattagcaataaacatgttgacactttcctataaaaaataaaccagtttgcagtaaaaaaaaaaaaaaaaa

SEQ ID NO: 141510 - DNA, 867 bp, Homo sapiens
atggggccagaatatcagactgaaaaacccagactgtggcctggagcatgttttcagtgcctgtctttgctgcctgtgctgttgggtagaaccatccaggcgggcagccaggttatgagaggtgaagccttgcccgtggtgatactgcctgcaaaggccagagccaggaccgacccaggtctgacaccaaaacccatgctctttcgatttggggtaaaatttcaaaaccagacatatgtcttcgtgctccagctggccaaacctggtgccatggaaaatccagatgcttgcttacctggcaggccgtgctggatctgctacctggggccagtacaagcaattgagtattcctatgctatccttggaccctcagttcaggaaagacagagggaagaaagagggaaggggtgggaagaggaaggaagaaaggaagaacgcactaatccctgtattaaaggtagctggcaccctatggtgtttgcattcttggaaactacctgccacgtagtgaggaagcccaggcacccagcagagaaggttccctgtgatgctgctgctgctgctgctgcctctgctttgggatccacagctctaaaggaacccacagtgcaaacagcgacaaatggccatttgatccttgacttcagccatgtccttccggcagtccaaagcagcataccacccagcggccagcccagagagaagggcttttctgtactgcatggggctaggcgaaggcttgagcagagcagacaggctgttccatctcccaacaggccacaacagtttcactggattcgtccagtggctgaatctgcacggtctgctcgactactgcttgatgctcgattgacgctgatgctgtag

SEQ ID NO: 141511 - DNA, 774 bp, Homo sapiens
ttttttttttttttattgcattctgtgcccattgtcatttcctaaagttcgtgctgttttctgttttacggatgcaaaaacttctcagatatttttaaggattttcaaatttttaagctgtattctgttccttcaaatatttccttgagagtcaatttttcattctatcttagacgatttgggttatatttcaggctttccacaaatgctgtttttttctttttttttgccacccatttatactaaaagatgaggcaatggaaagaatgagtggcaagtctgcatgcaggaagcgaagttggtcgctttgctctagggtgggtgaagcaggtgggtgggaagtcagccatcctagacgaaggaagcccccaaatgccacaaagttaagtggctctaaaatattatacctgcaggtgggacgttgagaatcaccgaggcccagaatatagaagtaaaagaaagttcttgcgcagccgccaggccaggtcgaagaaggtgagcagcgtgcgcgtgagcgtcttgcagaaggcgccgtaagagccgcgggtcccctgcgggcgcgacagccgcaccgccaggccagacagggccgccgccgccatggacctgatgctgcctcccacatagtgcccagagcccaaggcctccatcaggctccgctcactcaccgaccgtgggacagagggatgcacgcgggaaagtacgggcgggaggcctcctggactgctgctgatcgcgagctgcgctgcaaggcggaagccctccttgaattcc

SEQ ID NO: 141512 - DNA, 3576 bp, Homo sapiens; identical to SEQ ID NO: 141334

SEQ ID NO: 141513 - DNA, 1383 bp, Homo sapiens
tcaccattgagtcacatcctggttcttgcttcccttctcagacccatccaggagttgcactggaggaaacttccattcacctggcgctatacgtgtttggggctggggagtctctggaagtgaactgcgtgccatcctgggacgcaggacacagtctgagatgattgcattgattgtctgctgatggctgcagtatccccactctccaacaggccctggtgtgtgttgttcccctctccttacaggaattttagtgtctggcttcaaactaacataaaattcaaaatgcacctctcgtcttggaggatcccacacagaaatgaccatgaagtagttatgatgtttaacctctcctcggtccgctgtgctggaaggagattgcgttgcactcagaagagtccaaatcatcggagccaagagcattccgggaggaaggaaggagccagggccacagctccgcagcaggagcatgctggctggtgggagcacccaggaggctgcgggagagggagtggtctggaggaagagtggaagagttaaggttccagagaccacagagtcacaggggctttgcaggatggggcaaggaccttgggcttttacactgagtaacatggggacctgctgcagggcgatgggctttctaagtttccaggtgatgtacctggagaatgactgtattagagcatatttattaaaaagttccccacacagggccaggtgccgtagctcaagcctgtcatcacagtatgactccatgaggattttttcacacatcattgcaacacaggcagtgactgacgccaccacctttgccctggaggctggtttctgggcccaagatattgactcaaatcctgcagctatttgatttcggaattcaaattgatctggtattccccgtgggactccagttgcgtttaaatagacatgagagtcgaaagacccataaggggcttctctcgcattatgatgtcttatttttccttcctctagttgatgaaatgccagggtgaaacggatagccaattggactaaagcacaagtgccgctccagttattcggcagagtgtccagtaaaggtccaccagaataccaccacacatccactaggggatgaacaagggctgactgattgataagttcttgaaaattcttaagctcactgcatcccctcaggtctccaaggaatgctgtttcctcccaggcatttgcaacttggtaacctgtttcaattgccaatacttgttttaagtctttaacttctacgacagccatcttggtcttgtggttagatggaggaggagcaattattccgttgtgagaggttttggaagaaggcttagaagaaggtgcaggcagtgcgggatcaaagaaatacat

SEQ ID NO: 141514 - DNA, 1332 bp, Homo sapiens
atgagacaagatggcaaggtggcaagacagctattggtgattggtgagatggtgagacagcgatcagcagctggcaataaggaaggagacaagacgccccagcctatacctctcactgcccaaggaagtaagccctaccagtaccaccaggagggtacccctatatcagcccctaaaatcaaacctgtgtccattgtgggagataagaaacagatggatctgagtactgtccaaaaatatgcagatggagtggccacacataacctagaccatgctagttatcatgtggaaggagatacagttccagatatggaccctcagtggaattaccagagggcttcccaagatctcaaatgcaaaaatcacatgacggagaaagtcagaaatttcaagtgtgagagggagctggcccaaggaaattctactggctttgagatggagggatcacgtggcaaggatggtctctatgagctaagtggcccacagctgacagcaaggaaagaggtacctcattcctgcaactgcaacaaactaaatatggctgatgatctgaatcagcttctgattaaagccactcccttcactatctcggtgtctcctgtccgcggctcgtcctgctacatttcttggttccctgaccggcaagcgagagccgtgtgtggcaggcccccgtggaggatcaacgcagtggctgaacaccgggaaggaactggcacttggcacttggagtccggacgtctcaaactcgtgtgcgtgtggtgtgagcgtggtgttttgtctcgaggagacacgggtcaggtacaaactaagcccaccccactaggaactatgttgaaaaatttcaagaaagaatttaagggagattacggtgttactatgataccaggaaaacttagaactttgtgtgaaatagactggccagcatttgagggaggaaacttagcattccttggagacctgaagggatgcgatgagcttaagaattttcaagagcttatcaatcagtcagccattgttcatccgcaagcagatgtgtggtggtattgtggtggacctttactgggcactctgccgaataactggagtggcacttatactttagtccaattggctatccctttcaccctggcatttcatcaaccagaaggaaaaaaaataagacattgtaaatgggtccaacctccaagaccatccttaaacatcagtagactgggagctgtacgtggatgggagcagcttcgccaacccctgcaaagtgattctgaagaagacgacaagcgctgctccagtcacacccggaagctgactggtccactcatggccgaagcatga

SEQ ID NO: 141515 - DNA, 1663 bp, Homo sapiens
atgaaagggatggggagtatagaggaaatgtttgtagctttagactggtggtcaaggacatctcatggagaaggcatgtcttgccaagccatgaggacatctgggaagggagctacaggcagaggaaacagcaggtacaaacacctcggggtttctgcagttgttgcccattttcctcttggtcattgtgctggagacctctactgggaagcctggtggaagaacagaatcttagccaaacctgaactggggcgtagagcaggttattatctcaaaccctcaagttctcccccttttctaagccagttcccttcttctatgggggctgaggtttcagggacagaccctattagattatttgaaatgcgtttctttgatcccccgccacctgcaccttcctctaagccttcttccaaaacttctcacaagggaacaattgctccttctccatctaatgacacgactgagatagctatcgtagaagttaaagacttaaaacaaactttggcaattaagacaggataccaagatgcaaatgcctggttggaatggatcaaatattccattcacacgttaaacaaaagcaattgttatgcttgtgcgcacagcaggccagaggcccagactgtcccctttccactagggtggtcctccagtcaaccgggcatgggctgcatggtagctctttcccaggattctacagcctggagtaacaagtcatgccacgctctctctctgctatatcccgaagtccggcaccctgcgggtcagcccccaagggccatccagcttccgtctcccaacactaagttcacttcatgtctctcatgatagggagaaaaacttagcgttccttggagacctgaagggatgcagtgagcttaagaattttcaagagcttatcaatcagtcagcccttgttcatccccgagtggatgtgtggtggtattgtggtggacctttactgggccctctgccgaataagtggagtggcacttatactttagtccaattggctatccctttcaccctggcatttcatcaaccagagggagaaaaaataagacatcataaagcgagagaagccccttacgggtctttcgactctcacgtctatttagacgcaattggagtcccatggggaataccagggccactgaggtttgctgggggtctgctccagaccctagtcatgttggattttccagtgcctaaaggtatcaccagtgaagactataaaatagcaaagatggcagcctggcccttgctctgggaattccctcccaggggagtacagacctgttgctggcccaaatacactcatagaagatggctggagaccccagttgggaagacatctcacccagtcatgaataatgggatcagggacttgcttaaagaagcagtctggctgggcacagtagctcatgcctgtaatcccagcactttgaaaggccaagtatctaagcagactcatacctccctttgcagaattgttgctatctgtaagcctgtctacagcccatcttcatacaaaaatgggatcttcctgaacagactccaaatgaagtattggctgtttctgggtctcaagcctgctgaccttttggctggaactacaccactggctctcctggatcttgaaccttcagacttggactaa

SEQ ID NO: 141516 - DNA, 362 bp, Homo sapiens
ggcacgagggatggctgcccaaagattgtcagtttgggtaactctaagacagaccttttctatgaatgcaaaaaatacggcttcaagaagaggtgattggtggtggccccttcctcccctccacatcaagctgctgcagctgccagaaaagatgcctgctactaccagcagaaagggagtggagcccagagcatcacgaggagtgccttctagtgtactgtcaccttgccaccccctcctgtcccttcacccagacacatggaagggatggaaaaggattcttcacagagcactccggtacactgtatcagacaaaaattgatagattagctaatgggttttcttgaatttgagaagcaaag

SEQ ID NO: 141517 - DNA, 518 bp, Homo sapiens
gcctggaggaaagcacagcaatgtcagaatggatttatctgtatcaaggaagaaacccccagaacccaggcccttctggcttagccacagccttcaccttcatgtacatgcaggacactgtagcaacactggccttagctcttatcctcaacacactcagctcatacctaggtgatggcaagtgtgtgatttgtgactcctatgtgcgtccctgcactctggtgcgcatatgtgatgagtgtaactatggatcttaccaggggcgctgtgtgatctgtggaggacctggggtctctgatgcctattattgtaaggagtgcaccatccaggagaaggacccacttaaatctatcattaagcactatttgggtgtatatcgtgacaaagttgaatttgggacaattcaagttgacttcagctttaagcagagagatggctgcccaaagattgtcaatctggggagctctaagacagacctcttctatgaacgcaaaaaatacggcttcaagaagaggtga

SEQ ID NO: 141518 - DNA, 743 bp, Homo sapiens
tctgacgaggtcttacggaagttcccgaaacttccggtggccgggttagtgtaggagctatggctaaacatcatcctgatttgatcttttgccgcaagcaggctggtgttgccatcggaagactgtgtgaaaaatgcgaaggcaagtgtgtgatttgtgactcctatgagcgaccctgcactctggtgcgcatatgtgatgagcggaactatggatcttaccaggggcgctgtgtgatctgtggaggacctggggtctctgatgcctattattgtaaggaagtgcaccatccaggagaaaggacaagagatggctgcttcaaagattgtcaatctggggagctctaagacagacctcttcctatgaaccgcaaaaaataccggcttccaagaaagaaggtgattggtggggtgggccccttccttcccccccaacaatcaagtcttgctgcaagctgccaagaaaacatggccttacttacttaccagcagaaaggggagcagagcccagaagcatcaccaaggagtgcctgctagtgtactgggcagctttgccaccccctcctctcccttcacccagacacgtggtagggatggaaaaggattcttcacagagcatctctggcacaccatatcggagaaaacttgatagattagttaatggtttttcttgaattcgagaagcatagatctgttctccatattggtatgttctccctcaaccaagatcttctaaaaaggaat

SEQ ID NO: 141519 - DNA, 324 bp, Homo sapiens
atgaaggtaacaggcatctttcttctcagtgccttggccctgttgagtctatctggtaacactggagctgactccctgggaagagaggccaaatgttacaatgaacttaatggatgcaccaagatatatgaccctgtctgtgggactgatggaaatacttatcccaatgaatgcgtgttatgttttgaaaatcgggccagttccccattagttactaaggtgaatggtggtaacgtagagcctgtggttgtccctgataacccggggcttggatggaggacttcctcttgtgcttccctgggagatctgcttcatagggcctga

SEQ ID NO: 141520 - DNA, 438 bp, Homo sapiens
ggtggggccttgctgccatctgccatatgacccttccagtcccaggcttctgaagagacgtggtaagtgcggtgcagttttcaactgacctctggacgcagaacttcagccatgaaggtaacaggcatctttcttctcagtgccttggccctgttgagtctatctggtaacactggagctgactccctgggaagagaggccaaattttacaatgaacttagtggatgcaccaagatatatgaccctgtctgtgggactgatggaaatacttatcccaatgaatgcgtgttatgttttgaaaatcggaaacgccagacttctatcctcattcaaaaatctgggccttgctgagaaccagaggttttgaaatcccatcaggtcaccgcggaggcctgactggccttattgttgaataaatgtatctgaatatcaaaaaaa

SEQ ID NO: 141521 - DNA, 645 bp, Homo sapiens
atgcacactgaaagtgatgtagatggacctccattgattcggctgctgagttcatcagaagctgttaaaatgagcacggttcagattcaatgtggcattttgaaagccaggggacacacccagggtgattatggtactcagcatggggaacataacatctttgccaacgtcttcaagggcctttttgacagaaaagaaatgtgcatcctcatggtgggcctggatgctgcagggaagaccacagtccagtacaagcttaagctgggggagatggtgaccaccattcccaccataggcttcaacgtggaaaccatggagtacaagaatattagcttcactgtgtggggcgtgggcggctcggacaagatccggcctctgtgcactgacagagggcgtatgattgaggcctgcgaggagttcatgaggatgctggccgaggacgagctctgggatactgtcctcctggggtttgccaacaagcaggacctctccaatgccgtgaatgcagcagggaccacagacaagctgggactgcactccctttgccacatgaactggtacattcaggccacctgtgccaccagtggcgacgggctctatcaaggactgggctggctgtctagtccgctccggaaccagaagtga

SEQ ID NO: 141522 - DNA, 637 bp, Homo sapiens
ttcacgtcgtgctaggcaccacggcgaggggcgcgggccggtgtgggccgcagagacgttggatttcggcgggggctggggactggcctcggtgcgacttgaggtgtccctggccagtgtccttccacctgtccacaagcatggggaacatcttcgccaacctcttcaagggcctttttggcaaaaaaagaaatgcgcatcctcatggtgggcctggatgctgcagggaagaccacgatcctctacaagcttaagctgggtgagatcgtgcaccaccattcccaccataggcttcaacgtggaaaccgtggagtacaagaacatcagcttcactgtgtgggacgtgggtggccaggacaagatccggcccctgtggcgccactacttccagaacacacaaggccctgatctttatgggtggacagcaatgacagagagcgtgtgaacgaggcccgtgaggagctcatgaggatgctggccgaggacgaagctccgggatgctgtcctcctggtgttcgccaacaagcaggacctccccaacgccatgaatgcggccgagatcacagacaagctgtggctgcactcctacgccacaggaactggacattcaggccacctgcgccaccaacggcgacgg

SEQ ID NO: 141523 - DNA, 317 bp, Homo sapiens; identical to SEQ ID NO: 130995

SEQ ID NO: 141524 - DNA, 560 bp, Homo sapiens; identical to SEQ ID NO: 130996

SEQ ID NO: 141525 - DNA, 4511 bp, Homo sapiens
agccatcacccggcagcctcttgtccagcgctgacccttgggcccagcccgagcaaggaccgcagcaaacatgggtgacatgaccaacagcgacttttactccaaaaaccaaagaaatgagtcgagccatgggggcgagttcgggtgcacaatggaggagctccgctccctcatggagctgcggggcactgaggctgtggtcaagatcaaggagacttatggggacaccgaagccatctgccggcgcctcaaaacctcacctgttgaaggtttgccgggcaccgctccagacctggaaaagagaaagcaaatttttgggcaaaactttatacctccaaagaagccaaaaaccttcctgcagctcgtgtgggaggcgctgcaggacgtgacgctcatcatcctggagattgccgccatcatctccctggggctgtccttctaccacccgcccggcgagggcaacgaaggatgtgcgacggcccagggtggggcagaggatgaaggagaggcagaggcaggttggatcgagggggccgccattctcctctcagttatctgtgtggtcctggtcacggccttcaatgactggagcaaagagaaacagttccggggcctgcagagccgcatcgagcaggaacagaaatttaccgtggtccgggctggccaggtggtgcagatccctgtggctgagatcgtggttggggacatagcccaggtcaaatatggtgacctcctccctgccgacggcctcttcatccagggcaatgacctcaagattgatgaaagctccctaactggagagtctgaccaggtgcgcaagtccgtggacaaggaccccatgctgctgtcaggaacccacgtgatggagggctcaggacggatgttggtgactgctgtgggtgtgaactctcagactggcatcatctttaccctcctgggggctggtggtgaagaggaagagaagaaagacaaaaaaggtgtgaagaagggggatggccttcagctaccagcagcagacggtgcggcagcttcaaacgctgcagatagtgcgaatgccagcctagtcaatggtaaaatgcaggatggcaatgtggacgccagccagagcaaagccaaacaacaggacggggcagccgccatggagatgcagcccctcaagagtgccgagggcggcgacgctgacgacaggaagaaggccagcatgcacaagaaggagaagtccgtgctgcagggcaagctcaccaagctggctgtgcagatcgggaaggcgggcttggtgatgtcagccatcacggtgatcatcctggtgctctacttcactgtggacaccttcgtggtcaacaagaagccgtggctgcctgagtgcacgcccgtctacgtgcagtactttgtcaagttcttcatcattggcgtgacggtgctggtggtcgccgtgcccgaggggctccctctggccgtcaccatctcgttggcctattcggtgaagaaaatgatgaaggacaacaacctggtacgccacctggatgcctgtgagaccatgggcaatgccacagccatctgctcagacaagacaggcacgctgaccaccaatcgcatgacagtggtacaggcctatgtcggcgacgtccactataaagagatccccgaccccagctccatcaacaccaagaccatggagctgctgatcaatgccatcgccatcaacagcgcctacaccaccaagattctgcccccagagaaggagggcgccctgcctcggcaggtgggcaacaagacggagtgcggcctgctgggcttcgtgctggacctgaagcaggactacgagcccgtgcgcagccagatgccagaggagaagttgtacaaagtgtacaccttcaactccgtgcgcaagtccatgagcactgtcatcaagctgcccgacgagagcttccgcatgtacagcaagggggcttctgagatcgtgctcaagaagtgctgcaaaatcctcaatggggcgggagagcctcgtgtcttccggccccgcgaccgggacgagatggtaaagaaggtgattgagcccatggcttgcgatgggctccgcactatctgcgtggcctaccgcgacttccccagcagcccggagccggactgggacaatgagaatgacatcctcaacgaactcacctgcatctgcgtggtgggcatcgaggacccggtgcggccagaggtcccagaagccatccgcaagtgccagcgggcaggcatcacggtccgcatggtcactggcgacaatatcaacacggctcgggccatcgccatcaagtgtggcatcatccatcctggggaggactttctgtgcctcgagggcaaggagttcaacaggaggatccgcaacgagaagggggagattgagcaggagcgaattgacaagatctggccaaagctgcgggtgctggctcgctcctccccaacggacaagcataccctggttaaaggcatcatcgacagcacacacactgagcagcggcaggtggtggccgtgacgggggacgggaccaacgacgggcctgcactcaagaaggccgacgtgggcttcgccatgggcatcgcaggcactgacgtggccaaggaggcctcagacatcatcctgacagacgacaatttcagcagcatcgtcaaggcagtgatgtggggccgcaacgtctatgacagcatctccaaattcttgcagttccagctcaccgtcaacgtggtggccgtgattgtggccttcacaggcgcctgcatcacgcaggactcccctctgaaggccgtgcagatgctctgggtgaacctcatcatggacacgtttgcctcgctggcactggccactgagccgcccacggagaccctgctgctgaggaagccgtacggccgcaacaagccgctcatctccaggaccatgatgaagaacatcctgggccatgctgtctaccagcttgccctcatcttcaccctgctctttgttggcgagaagatgttccagatcgacagcgggaggaacgcgcccctgcattcgccaccctcagaacattacaccatcatcttcaacaccttcgtcatgatgcagctcttcaacgagatcaacgcccgcaagatccacggcgagcgcaatgtctttgacggcatcttccggaaccccatcttctgcaccatcgtgctgggcacctttgccatccagatagtgatcgtgcagtttggagggaagccattcagctgctctccactgcagctggaccagtggatgtggtgcatattcattgggttaggagagctcgtttggggccaggtcatcgccaccatcccgaccagcagactcaagttcctcaaggaggcaggcaggctcacacagaaggaggagatcccggaggaggagctcaacgaggacgtggaggagatcgaccacgcggagcgggagctgcggcggggccagatcctgtggttccgaggcctgaatcggatccagacacagatccgcgtcgtgaaggcgttccgtagctctctctatgaaggtttagaaaagcctgaatctcgaacctccatccataacttcatggctcatcctgaattccggatcgaagattcccagccccacatccccctcattgatgacaccgacctggaagaagatgccgcgctcaagcagaactcgagcccgccgtcatccctcaacaagaacaacagcgccatcgacagtgggatcaacctgacgaccgacacaagcaaatcagctacctcttcaagtccagggagccccatccacagcctggagacgtcgctttagctgaggaccctctcgcctgcccgcccgccctcatggaccccgctgccacccgctttccgggcacccatccatccaggcacccaactcacccaagcagcaacgagcaacaatcggaaaccaaatactggagagaaaaccaacgtttccacccacagaccctttctctggctgcgatgctgtttgaactctttttcacttcaaggcaaggggcgggatctccactgggggcttacgggagtgagcggttttccaaaacaagcccttcctggctcccacccagacatggaccagccatgcacccgcccagccaccacgtccccgcatgaatgtactgtcacatttcaatcctcccttgtttggtttttgggggttggggaggggtttttgtttgtttgtttgttttcttaggcgggaactgcaaacagactcttttctgagactatttatccaatccactggtctgtgagtttttgaaaatgcttgcacagcatggtctcagttgtatagattaatttaataactttttgaaattgcagagcttaactcgcctagtagatttgcaccaatggaaccgaagaacttcatagacactcacaaggttatatccatttctttgtatctatatcaacgtatacttttccgagactgtatacgtccatatagataggtagatatatatatatatatataaatatatatacatggatat

SEQ ID NO: 141526 - DNA, 2901 bp, Homo sapiens
atgggtgacatgaccaacagcgacttttactccaaaaaccaaagaaatgagtcgagccatgggggcgagttcgggtgcacaatggaggagctccgctccctcatggagctgcggggcactgaggctgtggtcaagatcaaggagacttatggggacaccgaagccatctgccggcgcctcaaaacctcacctgttgaagccccagtccctggggagaagctgatgggcactgtggcccctctctcagaaaatcagccaaccacacgcaacagcttaaagatggagtgggctgatagatcagacctggtcacatgctcaaccagagggcacgggtcagtccaccaagaccccaaggagattggaagagggaaggaaaatggaggagaggctgtggacctgctgcagaatggaagggagagagcaggcagcaggcaaagaagatgtcagaggtcggaggagagtgtcacatgcaggtacagtgtgatgagagtatctgacactggattggcaggcagttggacagagcagtcgctaggaagtaggacgaaggagaaacggcccacactgaggagggcaggctgttggggtagagtacgaattgagggtggtgggaacagggagacaggcaaggtggctgctgaggccatccaggtgagcaaggatggtggcctggaccagtgtgcagatggcagagggatgtggtcatatctgagatgtttttctcgaattttgctggatggtgtaacagacagtgagcagcctcccaaggcctttgagcaggtgcgtgagagtggacttgcaagtctggaagaattatctggaaatgcagatggtgggtggaagtgggcccttaccactctgtccggtccccacatgatgaggggtgcacctggctacacctcactcccttgtccagaagaggagaaagtaccagtgtcagctgcatgtccaccaggcacgctccgagcacgttgcaaggcatccacggtgagggccactcctaagtgggccctcttctgtctgtgtctgcaacagtgccaggcacttggtaggtgctcaataaatgctcatggaccacatgaatcacctcatgtgatattcacaaccacccatgggttaagtacaatcaccatccgcattacagtagagggtttgccgggcaccgctccagacctggaaaagagaaagcaaatttttgggcaaaactttatacctccaaagaagccaaaaaccttcctgcagctcgtgtgggaggcgctgcaggacgtgacgctcatcatcctggagattgccgccatcatctccctggggctgtccttctaccacccgcccggcgagggcaacgaaggtacccttctctcagccagcttgagggttaaagtggatgctgggtgcacagcaggccttgcagggtatccagtgccccacctggcccccgtggaggggaactgctctgagttttgcaggaaggatgatccgatgctgctggagattcctttccatggaaatggccgctccccaggtcccagaggaaatgaaggcctgggatgtgcgacggcccagggtggggcagaggatgaaggagaggcagaggcaggttggatcgagggggccgccattctcctctcagttatctgtgtggtcctggtcacggccttcaatgactggagcaaagagaaacagttccggggcctgcagagccgcatcgagcaggaacagaaatttaccgtggtccgggctggccaggtggtccagatccctgtggctgagatcgtggttggggacatagcccaggtcaaatatggtgacctcctccctgccgacggcctcttcatccagggcaatgacctcaagattgatgaaagctccctaactggagagtctgaccaggtgcgcaagtccgtggacaaggaccccatgctgctgtcaggaacccacgtgatggagggctcaggacggatgttggtgactgctgtgggtgtgaactctcagactggcatcatctttaccctcctgggggctggtggtgaagaggaagagaagaaagacaaaaaagcagcagacggtgcggcagcttcaaatgctgcagatagtgcgaatgccagcctagtcaatgagggatgcagtcagcacggcccgcccttcatctgtgacattaatgtctgtggcctgttgcgtcttcgtgatgaccgaccatgtgttgtctgttctctgttgtctgttaaaattctttgtcgtgtaggtaaaatgcaggatggcaatgtggacgccagccagagcaaagccaaacaacaggacggggcagccgccatggagatgcagcccctcaagagtgccgagggcggcgacgctgacgacaggaagaaggccagcatgcacaagaaggagaagtccgtgctgcagggcaagctcaccaagctggctgtgcagatcgggaaggcgggcttggtgatgtcagccatcacggtgatcatcctggtgctctacttcactgtggacaccttcgtggtcaacaagaagccgtggctgcctgagtgcacgcccgtctacgtgcagtactttgtcaagttcttcatcattggcgtgacggtgctggtggtcgccgtgcccgaggggctccctctggccgtcaccatctcgttggcctattcggtgaagaaaatgatgaaggacaacaacctggtacgccacctggatgcctgtgagaccatgggcaatgccacagccatctgctcagacaagacaggcacgctgaccaccaatcgcatgacagtggtacaggcctatgtcggcgacgtccactataaagagatccccgaccccagctccatcaacaccaagaccatggagctgctgatcaatgccatcgccatcaacagcgcctacaccaccaagattctg

SEQ ID NO: 141527 - DNA, 1320 bp, Homo sapiens
atgggtgacatgaccaacagcgacttttactccaaaaaccaaagaaatgagtcgagccatgggggcgagttcgggtgcacaatggaggagctccgctccctcatggagctgcggggcactgaggctgtggtcaagatcaaggagacttatggggacaccgaagccatctgccggcgcctcaaaacctcacctgttgaagccccagtccctggggagaagctgatgggcactgtggcccctctctcagaaaatcagccaaccacacgcaacagcttaaagatggagtgggctgatagatcagacctggtcacatgctcaaccagagggcacgggtcagtccaccaagaccccaaggagattggaagagggaaggaaaatggaggagaggctgtggacctgctgcagaatggaagaagaggagaaagtaccagtgtcagctgcatgtccaccaggcacgctccgagcacgttgcaaggcatccacggtttgccgggcaccgctccagacctggaaaagagaaagcaaatttttgggcaaaactttatacctccaaagaagccaaaaaccttcctgcagctcgtgtgggaggcgctgcaggacgtgacgctcatcatcctggagattgccgccatcatctccctggggctgtccttctaccacccgcccggcgagggcaacgaaggccttgcagggtatccagtgccccacctggcccccgtggaggggaactgctctgagttttgcaggaaggatgatccgatgctgctggagattcctttccatggaaatggccgctccccaggtcccagaggaaatgaaggcctgggatgtgcgacggcccagggtggggcagaggatgaaggagaggcagaggcaggttggatcgagggggccgccattctcctctcagttatctgtgtggtcctggtcacggccttcaatgactggagcaaagagaaacagttccggggcctgcagagccgcatcgagcaggaacagaaatttaccgtggtccgggctggccaggtggtccagatccctgtggctgagatcgtggttggggacatagcccaggtcaaatatggtgacctcctccctgccgacggcctcttcatccagggcaatgacctcaagattgatgaaagctccctaactggagagtctgaccaggtgcgcaagtccgtggacaaggaccccatgctgctgtcaggctcccaactctggtttaggttcatccacagcccctcagccccctggctctctagccttacatcctccttcagtgaccacagagtgaagctgacagtgactgccatttag

SEQ ID NO: 141528 - DNA, 3258 bp, Homo sapiens; identical to SEQ ID NO: 122429

SEQ ID NO: 141529 - DNA, 566 bp, Homo sapiens
ggacctgtctgatgagcaggttgccaggcgggtgccatagtagtccatctgggcgtcgtgaatcatgtcctcatgggaggtatccacagtgttaattactgacaccttcttcacaaggctgttagcaggcggagattacgaacaatgctgagggctcggtatacagtagctcctctgctgttcctcgttttgttttcaattgttgcccgaaaagaaggaagggagactggcaggagacgcaggagcggcgcgccccgcaaagtcagggaggttcctcggcctcacctctggactcccctcggaatggtccgcaaggacggggccagagccccccaaatctttaagcggtggaggggagctgaacggctccagcttgggatttgggactcaggacggccgaggaacccgtgaaggccgcgaccgtggccttcaccctgctaggcctcctcagtaccaacactcaccatgattgcggcggtagctgaacaggtctcggacgtggcagctcccggcggcacgaaatcgtcgaccgggaattcgggcggtcgtcatggtacaaatatacg

SEQ ID NO: 141530 - DNA, 4979 bp, Homo sapiens
gggcagccgcggcagaggagccgcagccgcagcggggccgggccgggccgggcgcgcaccagcggcagcggcagcggcagcggcggcggcagcatctcgctctcggagccggcgcaggtttccctgtacttagagcgtggactgtgaacccccaagcagacgagctgaacttcgtcacccagtccctagagccagcaagacatgggccccagtttccagaccctgacacctctcatttaaccagaagacgtggaggggagccaccacccctgaccatgtagatgccagttccagggagcagcatgggccccactgaatggagactcctgggtctacagccctgagcccctccggcccctggacctcgtcccacaccggaggacacctcttggagctcaccaccactgtcaccagcccgcctcggccacccccaccccccgggacccggagtcggccgcctggtgccacagctgaccagtgagggtgtgctgaggacagccacaagcagccatcacccggcagcctcttgtccagcgctgacccttgggcccagcccgagcaaggaccgcagcaaacatgggtgacatgaccaacagcgacttttactccaaaaaccaaagaaatgagtcgagccatgggggcgagttcgggtgcacaatggaggagctccgctccctcatggagctgcggggcactgaggctgtggtcaagatcaaggagacttatggggacaccgaagccatctgccggcgcctcaaaacctcacctgttgaaggtttgccgggcaccgctccagacctggaaaagagaaagcaaatttttgggcaaaactttatacctccaaagaagccaaaaaccttcctgcagctcgtgtgggaggcgctgcaggacgtgacgctcatcatcctggagattgccgccatcatctccctggggctgtccttctaccaccgccccggcgagggcaacgaaggatgtgcgacggcccagggtggggcagaggatgaaggagaggcagaggcaggttggatcgagggggccgccattctcctctcagttatctgtgtggtcctggtcacggccttcaatgactggagcaaagagaaacagttccggggcctgcagagccgcatcgagcaggaacagaaatttaccgtggtccgggctggccaggtggtccagatccctgtggctgagatcgtggttggggacatagcccaggtcaaatatggtgacctcctccctgccgacggactcttcatccagggcaatgacctcaagattgatgaaagctccctaactggagagtctgaccaggtgcgcaagtccgtggacaaggaccccatgctgctgtcaggaacccacgtgatggagggctcaggacggatgttggtgactgctgtgggtgtgaactctcagactggcatcatctttaccctcctgggggctggtggtgaagaggaagagaagaaagacaaaaaagccaaacagcaggacggggcagccgccatggagatgcagcccctcaagagtgccgagggcggcgacgctgacgacaggaagaaggccagcatgcacaagaaggagaagtccgtgctgcagggcaagctcaccaagctggctgtgcagatcgggaaggcgggcttggtgatgtcagccatcacggtgatcatcctggtgctctacttcactgtggacaccttcgtggtcaacaagaagccgtggctgcctgagtgcacgcccgtctacgtgcagtactttgtcaagttcttcatcattggcgtgacggtgctggtggtcgccgtgcccgaggggctccctctggccgtcaccatctcgttggcctattcggtgaagaaaatgatgaaggacaacaacctggtacgccacctggatgcctgtgagaccatgggcaatgccacagccatctgctcagacaagacaggcacgctgaccaccaatcgcatgacagtggtacaggcctatgtcgacgacgtccactataaagagatccccgaccccagctccatcaacaccaagactatggagctgctgatcaatgccatcgccatcaacagcgcctacaccaccaagattctgcccccagagaaggagggcgccctgcctcggcaggtgggcaacaagacggagtgcggcctgctgggcttcgtgctggacctgaagcaggactacgagcccgtgcgcagccagatgccagaggagaagttgtacaaagtgtacaccttcaactccgtgcgcaagtccatgagcactgtcatcaagctgcccgacgagagcttccgcatgtacagcaagggggcttctgagatcgtgctcaagaagtgctgcaaaatcctcaatggggcgggagagcctcgtgtcttccggccccgcgaccgggacgagatggtaaagaaggtgattgagcccatggcttgcgatgggctccgcactatctgcgtggcctaccgcgacttccccagcagcccggagccggactgggacaatgagaatgacatcctcaacgaactcacctgcatctgcgtggtgggcatcgaggacccggtgcggccagaggtcccagaagccatccgcaagtgccagcgggcaggcatcacggtccgcatggtcactggcgacaatatcaacacggctcgggccatcgccatcaagtgtggcatcatccatcctggggaggactttctgtgcctcgagggcaaggagttcaacaggaggatccgcaacgagaagggggagattgagcaggagcgaattgacaagatctggccaaagctgcgggtgctggctcgctcctccccaacggacaagcataccctggttaaaggcatcatcgacagcacacacactgagcagcggcaggtggtggccgtgacgggggacgggaccaacgacgggcctgcactcaagaaggccgacgtgggcttcgccatgggcatcgcaggcactgacgtggccaaggaggcctcagacatcatcctgacagacgacaatttcagcagcatcgtcaaggcagtgatgtggggccgcaacgtctatgacagcatctccaaattcttgcagttccagctcaccgtcaacgtggtggccgtgattgtggccttcacaggcgcctgcatcacgcaggactcccctctgaaggccgtgcagatgctctgggtgaacctcatcatggacacgtttgcctcgctggcactggccactgagccgcccacggagaccctgctgctgaggaagccgtacggccgcaacaagccgctcatctccaggaccatgatgaagaacatcctgggccatgctgtctaccagcttgccctcatcttcaccctgctctttgttggcgagaagatgttccagatcgacagcgggaggaacgcgcccctgcattcgccaccctcagaacattacaccatcatcttcaacaccttcgtcatgatgcagctcttcaacgagatcaacgcccgcaagatccacggcgagcgcaatgtctttgacggcatcttccggaaccccatcttctgcaccatcgtgctgggcacctttgccatccagatagtgatcgtgcagtttggagggaagccattcagctgctctccactgcagctggaccagtggatgtggtgcatattcattgggttaggagagctcgtttggggccaggtcatcgccaccatcccgaccagcagactcaagttcctcaaggaggcaggcaggctcacacagaaggaggagatcccggaggaggagctcaacgaggacgtggaggagatcgaccacgcagagcgggagctgcggcggggccagatcctgtggttccgaggcctgaatcggatccagacacagatccgcgtcgtgaaggcgttccgtagctctctctatgaaggtttagaaaagcctgaatctcgaacctccatccataacttcatggctcatcctgaattccggatcgaagattcccagccccacatccccctcattgatgacaccgacctggaagaagatgccgcgctcaagcagaactcgagcccgccgtcatccctcaacaagaacaacagcgccatcgacagtgggatcaacctgacgaccgacacaagcaaatcagctacctcttcaagtccagggagccccatccacagcctggagacgtcgctttagctgaggaccctgtcgcctgcccgcccgccctcatggaccccgctgtcacccgctttccgggcacccatccatccaggcacccaactcacccaagcagcaacgagcaacaatcggaaaccaaatactggagagaaaaccaacgtttccacccacagaccctttctctggctgcgatgctgtttgaactctttttcacttcaaggcaaggggcgggatctccactgggggcttacgggagtgagcggttttcccaaaacaagcccttcctggctcccacccagacatggaccagccatgcacccgcccagtcaccacgtcccccgcatgaatgtactgtacactttcaatcctccccttgtttggtttttgggggttggggaggggtttttgtttgtttgtttgttttcttaggcgggaactgcaaacagactcttttctgagactatttatccaatccactggtctgtgagtttttgaaacgcttgcacagcatggtctcagttgtatagattaatttaataactttttgaaattgcagagcttaactcgcctagtagatttgcaccaatggaaccgaagaacttcatagacactcacaaggttatatccatttctttgtatctatatcaacgtatacttttccgagactgtatacgtccatatagataggtagatatatatatatatatataaatatatatacatggatatataaagtttctttgccggcatgttgccttgtttccgcttaaattgctctattttaacttatttatgtcctaaaagaagaatgtaatttgtttaca

SEQ ID NO: 141531 - DNA, 3085 bp, Homo sapiens
gtacccttctctcagccagcttgagggttaaagtggatgctgggtgcacagcaggccttgcagggtatccagtgccccacctggcccccgtggaggggaactgctctgagttttgcaggaaggatgatccgatgctgctggagattcctttccatggaaatggccgctccccaggtcccagaggaaatgaaggcctgggatgtgcgacggcccagggtggggcagaggatgaaggagaggcagaggcaggttggatcgagggggccgccattctcctctcagttatctgtgtggtcctggtcacggccttcaatgactggagcaaagagaaacagttccggggcctgcagagccgcatcgagcaggaacagaaatttaccgtggtccgggctggccaggtggtccagatccctgtggctgagatcgtggttggggacatagcccaggtcaaatatggtgacctcctccctgccgacggcctcttcatccagggcaatgacctcaagattgatgaaagctccctaactggagagtctgaccaggtgcgcaagtccgtggacaaggaccccatgctgctgtcagggtcggacaggcagacacgagcccatgtctggtgtatcttcaaacgggacagagtaaaaatattcagaaattgcaaactcatatgtctgcagggccagattggctgcaatgccgtcagctgggcccctgctgttgtacctggaagcctcatagaccacccatcggggcagaaccccaaaatacatcaagaggtttgcatcaggtggctgtgccaaacccttcaatcagctgtgaagaaggagaaggacggcccagtgaaagaaggagcagaagctaagaagccgcacagtggactgggttcgagatgtggcctgggcccccttcaatcggccctggccaccaagccacaattcgccagctgctcccaggatggtcgtgtgttccatttggaccctgtgatgatgccctcaagcaattaccgtggtccccctaaattgtttgcacaagttcaacgatgtggtgttgggcatgttgaactggggtccatcacagccaacatccctggctgtctctggtggagacaataaggaggagttacagatgcagcccacagattgatcatctgccttaacgtgatcggagatgctttgtaatctactgtccagctgaaagcactcatgttacgaggaagaaactacaagtgatgttcaaatctattttgggtcatttttatgtacctttgggttcaggcattatttggggggttttgtttccaaaggaactaaataaagtcatattgcttataaaaaaatgacccaaaatagatttgaacatcacttgtagtttcttcctcgtaacatgagctgtttccagctcggacagtagattacaaagcatctcagatcacagttaagggcagatggatcaatctgtgggctgcatctgtaactccctcctggggaaaataatccctgttgggagttggggggctcttcccaagttgtctggttaagttgggcccggggaaggggcaggtcctgggagctgggcgggtgggggagccagggccccaccctggtctttgttcacttgctcgtttcttgctgggccctctgttcacttgatgcttgatacgggagccctgggcccctttgtttgacatcactggatggcacaacccacttggcccatcaacttgactccttccacaggggtatctttattgtctccaccagagaacagccaggatgttggctgtgatggaccagctcacatgccacaccacatcgttgaacttgtgcaacaatttaaggggaccacgtattgcttgaggcatcatcacaggtcccaaatgaacacacgacccatcctgggagcagctgggcgatggtgctggtgggcaggcccgatggagggggcccaggccacatctcgaaacccagtcactgtggcgcttctagcttctgctcctccttccactggccgtcctcctcctccttccacagcttgaatgaggttgtccacagccacctgatgcaaacctcttgatgtaattgggtttctgaccccgatgggtggtctatgaggcttccaggtacaacagcaggggcccagctgacggcattgcagccaatggtgtgagcgttgttgatcttctttacttccccattggccttcccccggtgtaaagtccagccagggaagatggcccccatccgagactacccaacaggcccaggaatcaggaccgtaagtccatggggggcccagcaacacccgaagttcaacttgaggagtcgtgtccccgcattgctcgtggctcttctccccagggtgcccgttttccctctctcccaagaataaatgaactttccggtcaataaggaagcaacgaatgcccaggatgttgcccgtaacaatggggtgaacccccagccaacttgccacacaggacccctccatgacccctgaaggtcggcgaataaggatctgccctcccattgcgcacatcaaaagattttgacggacctgtctgatgaagcaggttgcccaggcgggtgcccatagtagtccatctgggcgtcaataaatcatgtactcatgggagcgcatccacagtgttaattactgacaccttctttctgccaagcactgtgctaggaactggatatacagacacaaataagaggaactttttgcccttgagaagctcgcgaataatgctagtgtcgcaagataaattatttaatggtggtttgtgtgtcctgtaggagcctgaggggctggggtggtagacacgaattgagccccaccagtcagggttgatgaaccacacttctctgggcatgctgaaccagatctcttcagtgaggttgatacagagggaatatgaaatggccgtcatttgtgtgtgtagtaaggctccattcaagcaagccgagccgttgttcccttccctcgtgtctgtggggtgctttgtgtgcccgcgtctgcacactgactcagccacatcctcgggcacgcatgcatgcactgacagcctctcacaggcactaaggcccat

SEQ ID NO: 141532 - DNA, 1497 bp, Homo sapiens
tcagatgcaaatcagtagaaagcctccatatttcagctcagacaagtagatgatccgtgagcctctaagactgggcatgcacagaagcagagaacccataaagcgatgtaggtgcattgccacagtttctcctgcccagtccctggctcttttgacctcagtgtgcaccagccactttccaactgccagtatctccatttctttgaccaagacctttttcagaagctgctgcgagatacattctgcccatacacctgctgcttgttgcaaggaacctggaaatttacgcatcttaagaggttgagaatgacgctgaatctgatgcctgtaccatggtaactgtgtagtgggagatgggaaatagccagatctttcagggagtattggctcctgaatataaatgaacacgatgcagaatgtcactgtgatgtatctggcagaatccgggaggagattaagacggagccagagaacccgatcaaccgtgagaaaacatgcctgctgctgctgcgcatcttcaccaccaataatggccaccaccaccgaacggacgagttttcccggggaaacgtacagtccagagagttgcagatctacgcttggatggatgcaaccttgaaagaactgacaagcttggtaaaagaagtctacccagaagctagaaagaagggcactctcttcaattttgcagtcgtttttacagatgttaaaagacctggctatcgagttaaggaagttggtagcaccaagtctggcagaaaggggactgatgattccatgaccctgccgtcgcagaagttccaggtagattacttggacatagcaattacccctccgcatcgggcaccacctcctgggtatgagagacctggcctgtgtataggccaatttctgttgattagtactaaaggctgctcctacgtgcacaggcagaacaggctctacaatgagatgcaggtgctggcagttgaaagtctgtctagcatacaccagggtactttgatacaaaggttgtactctcaatgccttgggtagctccctcatgggctggcgttgagtgtctgcagcttttccaggtgcaaggtgcaagctgtcggtagatctacatttctggagaagctccactaggcagtaccccagtgggaattctgtgagggagctccaaccccacatttcccttccatactgccctagcagaggttttccatgagggctccacccctgcagcagacttaggcctggacatccaggcatttccatacgtccgccgaaatctaggtagaggtttccaagctcaattcttgtcttctgtgcaactaactgcaggcccaacaccacgtggaagctgccaaggcttgcagcttgaaccctctgaagcaatggcccaagctgtaccttgaccctgttctcatggtagtgaataagtctcatgagatctgatggtttatcaggggtttctgcttttgcatcttcctgattttctcttgctgctgtcat

SEQ ID NO: 141533 - DNA, 781 bp, Homo sapiens
agacacagactgcctgggcgaaccggtgctggatttggcactttccgaaccctgcgaccctcccaagttcctatggggcagctttgggggtgcgtttagcgccgccacggcaaagcaggagccctgccagggttccccagccatgaatctcttccgattcctgggagacctctcccacctcctcgccatcatcttgctactgctcaaaatctggaagtcccgctcgtgcgccggaatttcagggaagagccaggtcctgtttgctgtggtgttcactgcccgatatctggacctcttcaccaactacatctcactctacaacacgtgtatgaaggtggtctacatagcctgctccttcaccacggtctggttgatttatagcaagttcaaagctacttacgatgggaaccatgacacgttcagagtggagttcctggtcgttcccacagccattctggcgttcctggtcaatcatgacttcacccctctggagatcctctggaccttctccatctacctggagtcagtggccatcttgccgcagctgttcatggtgagcaagaccggcgaggcggagaccatcaccagccactacttgtttgcgctaggcgtttaccgcacgctctatctcttcaactggatctggcgctaccatttcgagggcttcttcgacctcatcgccattgtggcaggcctggtccagacagtcctctactgcgatttcttctacctctatatcaccaaagtcctaaaggggaagaagttgagtttgccggcatag

SEQ ID NO: 141534 - DNA, 281 bp, Homo sapiens
atgcgcatgaaatttggtgctgtgactcggatcggggggacctcccttgggagatcaatcccctgtcctcctgctctttgctccgtgaaaaagatccacctacgacctcgggtcctcagacccaccagcccaaggaacatctcaccaattttaaatcagcacgcttcaaaaggattaaagcctgctattactcgcctgctacagcatggccttttaaagcctataaactccccttacaattcccccattttacctgtcctaaaaccagacaaggcttacag

SEQ ID NO: 141535 - DNA, 801 bp, Homo sapiens
tcaagcccaggctaactttgaactgtgttcaagggaaacggggctgcattcattcttaatgttgataatgttctgaagcagatcagcactgctctcctgtttgggttcattgagatgaacatcttccatgctctccccgggcgttggtgtttgaggtggtgtcaaaaattgggaatgcaacagagctggccttttgcaagcaggtccatcagacaacgaatcgggccctttccttttcccactgtatgatactgtgttcttcaattctctgaactgttctatgttcacaccttgtgtctgttctcccacagggccatcgggaaccaaatgcactggctgttcgttctccaagttccgagtacttgggtctgctcccttcctcatcaacaggcggacagcatctaattgtgtcaaccgatactgcaagctggcagcaacatggagggcagtgttgccattgtaagcctttgcattcacaaaagacaggcaactgggcagctccaaaaagaggcgaatgagttccagatttgcttcttcagctgccaaatgcagggctgtgcggccacttttgcgatccaggagattccctccagtgcctatgccaccagggccctgggtttcaagcacaaaactgggcagccgtttgggcagacaccaagccagctgcaggggctgaagccagagagccaggtgatctggcttgactggtcccacccacatggagcccaacaaggtaagatccactggcttgaaattcttgctaccagcacagcagtcataatgtcttcccatttcatccat

SEQ ID NO: 141536 - DNA, 915 bp, Homo sapiens; identical to SEQ ID NO: 133946

SEQ ID NO: 141537 - DNA, 1071 bp, Homo sapiens
atgttgctcacacaaagcctgtttggtggtctcttcacacggatgcgagtgaaatttggtgctgtgactcagatcaggggacctcccttgggagatcaatcccctgtcctcctgttctttgctcggggaggggcaagtaccctaaccccatatatctctgtgccccgatcccttatttctgtgccccaacctcttatatctctgtgccccaatcccttatttctatgccccgacctcgtatctctgtgccccgacccctttcccacttttctggaggcctcccacattattctggataccacacctgaccctcatgattgcatctctctgatccacctgacgttcaccccatttccccacatttccttcttccctgtttctcaccctgatcacacttggtttattgatggcagttccaccaggcctaattgccactcaccagcaaaggcaggctatgctatagtatcttccacatctatcattgaggctaccactctgcccccctccactacctctcagcaagccaaactagttgccttaactcaagccctcactcttgcaaaaggactacgcgtcaatatctatactgattctaaatatgcctttcatattctgcaccaccatgcggtcatatgggctgaaagaggttttctcactacacaagggtcctccatcatgaatgcctctttaataataactctactcaaggccgctttacttccaaaggaagctggggtcattcactgtaaggggcatcaaaaggcatcagatcccattgctctaggcaacgcttgtgctgataaggtggctagacaagcagctagctctccaacttctgtccctcacggccagtttttctccttcacatcggtcactcccacctactcccctgctgaaacttccacctatcagtctcttctcacacaaggcaaatggttcttagaccaaggaaaacatatccttccagcctcacaggcccattctattctgtcgtcatttcataacctcttccatgtaggttacaagccgctagcccgtctcttagaacctctcatttcctttccatcatag

SEQ ID NO: 141538 - DNA, 1650 bp, Homo sapiens
atgtggcccacacttctcatcatgaatgggtcttctctggaccatcaagccatgaagcaggaggagcatagcaagactggatccaatcttacagcacaaataagactgcaggatgtcaaggatcaatggacaagaaataaagtagggtatagagtgatggattctgctatggagtatgccagagagacagcttcagacatcaatgaggacttgcgagactcatgtgatcatgagactcacccagagtcttggttaaatgcacagatcagcaggccccaccccaaactttctgactcagaattacaagatgagcagcccagggtggcaagccgattttcatcagacatttatgaggagatcattttctctgaccacttcattcccaaggccagggctgatgggagcagccccaggaaggtacagtgcttggctaagatctcagagccaccaggtggggaagcacaaaagcagaccccagcagtatggcatgagagccagtgctcttccctgcactgcacaggctggagagaaacaggaggaggaaggaggattccgggtagtcatactgatatgatattgagcaacataccatctgcagcaacaacaggggcaaggggaatgggtgcccatgcctcctttgacctttccatgagccctgtcttccagctgtcacacacccacagcaataaacagggtgctccaaaaagagatgccctgcccagagagaaggaatctaaagaggcagtctggctacaaaggctttgccgagctgtggtgggctctgcccagttcaaacttcctggcagctttgtttacactgtgaggggaaaaccacatacacaagcctcagtaatggcagacactcctcccccgaccaagctggagcatcccaggggagtaaatggttctgtctcactggcgttccaggtgccactggggtatgagaaaaaattcctgcagctagcttggtgtctgcccaaatggctgcgcagttttgtgcttgaaacccagggccctagtggtataggcactaagggaatctcctggtctgcaggttgtgaagaccacgggaaaagtgtagtatctaggctagatagcaccatccctcatagcacagtttctcatggcttcccttggctaggggaggtagttccccgaccccttgtgcttcccaggactcagcccacctgcacccaggtgattaaaagctttattgcaccaaacacaaagcctgtttggtggtctcttcacacggacgcaagtgaaatttggtgccgtgattcggatcaggggacctcccttgggaaatcaatcccctgtcctcctgctctttgttccatgaaaaagatccacctacgacctcgggtcctcagacccaccagtccaaggaacatctcaccaattttaaatcggatcagctgcttccaccctgactcaagtacacaacatccacccactaattctgtctccatttctgagagaaagaatctaattggcttagcccagcccatgcatttgctagtccagggtcaggtgccctgttccaatgggctgaggacacctggctgtccaggcccacactttgctggggctcaggtggaaggcagtttcagaggagatggcatggactggacttgtacttccaactga

SEQ ID NO: 141539 - DNA, 708 bp, Homo sapiens
atggggtttcgccatgttgcccaggctggtctctttctcttgggctcaagtgatctgcctgccgtggccccccaagtgctgggattgcaggtgataaaaagctttattgctcacacaaagcctgtttggtggtctcttcacacggacgcgcatgaaatttggtgccgtgactcagatcgggggacctcccttgggagatcaatcccctgtcctcctgctctttgctccgtgaaaaagatccacctacgacctcaggtcctcagacccaccagcccaaggaacatctcaccaattttaaatcgggtttcagaggtgtcagaccacgcagggacgcctgccttggtccttcacccttagcggcaagtcccgcttttctggggaaggggcaagtaccccaaccccttctctctgtgtctctaccccttctccgcctttctggggggcaagaaacacccaaccccttctccttcaccctgagtggcaagtccgcttttctagaggagcaagtaccccaacctcgtatctctgtgccccagtcccttatttccacgccccgacctcttatctctgtggcccaatcccttatttctgcaccccaacctcttatatctctgtgccccaatcccttatttccatgccccgacctcttatctctgcaccccaaccccttatttccacgacccaacccctttcccgcttttctggaag

SEQ ID NO: 141540 - DNA, 273 bp, Homo sapiens; identical to SEQ ID NO: 117476

SEQ ID NO: 141541 - DNA, 591 bp, Homo sapiens
gtcaaagaatcaatggagacacactttggcagccatggccgaagggccatactctacaggcctcctttctacagcaaaacagagcttcagctacaccagcacattctgactcaacatggctatacggttgtcatcgctgaagaaaggctcaatgctggcctagggccggggctactagaacaaggtgatctgggctcttgggatctgctcatttgcctgtcttctaagaaagcagaaggaacaccctgtatatccaaggaagtcatgtgccagttaggtttacatcaaaaggatgcccaagaagaaggtcatgaagggaccatcaaggaagagcccaagaggagattggcgcagttgtcagctaaacctgctcctgcaaaagtggaagcgaagctgaaaaaggcagcagcgaaggataaatcttcaggcaaaaatgtgcaaacaaaagggaaaaggagagcaaagggaaaacaggccaaagtggcaaaccaagaaactaaagaagatttacctgcagaaaacggggaaatgaaaactgaggagagtccagcctctgatgaagcaggagagaaagaaaccaagtctgattaa

SEQ ID NO: 141542 - DNA, 1096 bp, Homo sapiens
  misc_feature (1)...(1096): n = a,t,c or g
aggaagagcccaagaggagatcggcgcggttgtcagctaaacctcctgcaaaagtggaagcgacccgagcaaaggcagcagcgaagtttagkgtgagaagtttgagcactcacagttcatacagaagaggacaagattaattcccctgacattagaggagttgttggataatcactaaatttgctccttgttaaataaagattcttcaaacacctaaatgaaagtgataaattcaaaactgatccttttagttcctcattatatgatatgaagggattaactgtagcaggatagtcaacctgacccgtacggcatggtgctttttttcaggataaatcttcagacaaaaaaagtgcaaacaaaagggaaaaggggagcaaagggaaaacaggcccgaagtggctaacccaagaaactaaagaagatttacctgtagattacaggggaaacgaagacttgaggagagtccaagcctcttgattgaagcaggagagaaagaagccaagtcttgatttaattaaccattttaccatgcttatcagtgggtccctgtctcccttcttgtacaattccagaggaatatttttatcaactattttgtaaatgcaagttttttaggtagctctagaaacatttttaaagaaggagggaatcccacctccatcccattttttaagtggtaaatgcttttttttaagaaggtgaaatcatttgcctggttgtttattttttgggtaccanccagagaatagtgtggggatattgaattatgggaggctctgactgtctccgggtgtccagcttaaccattcccacagatgggggggttagtttttataatcctataatacaaagcatatttaaatgggccatatggagtcagtcctgcatttaatgtcttgaacattttaaattncttctattagccatgttgttttttagtagaattgtttcctaaagaaaaccactctttgatcatggctctctctgccagaattgtgtgcactctgtaacatctttggttgtggaagtccggtttccnaatagccttgntacngtgctgtgaaagatnncngnttgaactgtaggtgacgtg

SEQ ID NO: 141543 - DNA, 438 bp, Homo sapiens
atgaagccgcggaccttcgcgctcagcagctcgggcggcgggaggagcggcagcggcaaggcagcccagtttcgcgaaggctctcggcgcgccgcggcccgcaggcacccggcacgcgccttccccgccgccaggatgcccaagaggaaggtcagctccgccgaaggcgccgccaaggaagagtccaagaggagatcggcgcggttgtcagctaaacctcctgcaaaagtggaagcgaagccgaaaaaggcagcagcgaaggataaatcttcagacaaaaaagcgcaaacaaaagggaaaaggggagcaaagggaaaacaggccgaagtggctaaccaagaaactaaagaagatttacctgcagaaaacggggaaacgaaaactgaggagagtccagcctctgatgaagcaggagagaaagaagccaagtctgattaa

SEQ ID NO: 141544 - DNA, 391 bp, Homo sapiens
  misc_feature (1)...(391): n = a,t,c or g
tcttggacagcgtgggtatcgaggcggacgacgaccggctcaacaaggttatcagtgagctgaatggaaaaaacattgaagacgtcattgcccagggtattggcaagcttgccagtgtacctgctggtggggctgtagccgtctctgctgccccaggctctgcagcccctgctgctggttctgcccctgctgcagcagaggagaagaaagatgagaagaaggaggagtctgaagagtcagatgatgacatgggatttggcctttttgattaaattcctgctcccctgcaaataaagcctttttacacatctctcnnnnnnnnnnnnnnnnnnnnnnnnnnnnnnnnnnnnnnnnnnnnnnnnnngggggggggcctcttttaaaaaaattt

SEQ ID NO: 141545 - DNA, 477 bp, Homo sapiens
  misc_feature (1)...(477): n = a,t,c or g
atccctaggacatcaagaacatcttggacagcgtgggtatcgaggcggacgacgaccggctcaacaaggttatcagtgagctgaatggaaaaaacattgaagacgtcattgcccagggtattggcaagcttgccagtgtacctgctggtggggctgtagccgtctctgctgccccaggctctgcagcccctgctgctggttctgcccctgctgcagcagaggagaagaaagatgagaagaaggaggagtctgaagagtcagatgatgacatgggatttggcctttttgattaaattcctgctcccctgcaaataaagcctttttacacatcnnnnnnnnnnnnnnnnnnnnnnnnnnnnnnnnnnnnnnnnnnnnnnnnnnnnnnnngggggcccctttaaaaaaaaaggcccccaaaaaaccccggggacccccctttgtggtttttttaaagccccccctttttgtttcccccct

SEQ ID NO: 141546 - DNA, 507 bp, Homo sapiens
atgaagccgcggatcctggcggtgttacagttcttaaagatggtgtgtccggagtttgttccttcagatgttcagatgtgcccagagtttattccttctggtgggttcacggtcttgctgtcttcaggagtgaagccacagacctttgcagtgagtgttacagctcttaaaggtggcgtgtccagagttgttcgttcttcctggtgggttcgtggtcttgctgacttcaggagtaaagccgcagaccttcacaacgccgcggcgatgcgctacgtcgcctcctacctgctggctgccctcgggggtaactcctcccccagcgccaaggacatcaagaagatcttggacagcgtgggcatcgaggaggattacgaccggctcaacaaggttatcagctctgcagcccctgctgctggttccgcccctgctgcagcagaggagaagaaagatgagaaggaggagtctgaggagtcggacgatgacatgggatttggcctctttgattaa

SEQ ID NO: 141547 - DNA, 585 bp, Homo sapiens
atcccccccccccgccttttcctccctgtcgccaccgaggtcgcacgcgtgagacttctcccgccccctcccccgcagaacgccgcccgcgatgcgctcacgtcgccttcctaccttgcttgggcctcccctaggaagcaaactccctcccccccagcggccaaggacatcaaagaagatcttggaacaacgtgggtatccgaaggcggacgacgaccggcctcaacaaggttatccagtgaagctgaatggaaatatacattgaaagacgtcattgccccaggggtattggcaagcttgcccagtgtaccctgctggtggggctgtagccgtctctgcctgcccccaggctcttgcagccccctgctgcttgggttctgcccctgcttgcagcagaaggagaagaaaagatgaagaagaaggaggaagtcttgaaagagtcagaatgatgaccatgggatttggcccttttgaattaaaatccctgcctcccctgcaaataaaaggccttttttacacatctagataaacaacaaaaagaaaagtcttgcccgtcaaccggccggcaatttagtatagtagtaa

SEQ ID NO: 141548 - DNA, 399 bp, Homo sapiens
atggctggagaatcccaaatagccataggatttcccagtaacaacttctgccgtggattcagggggatggtcgtgggtgaaggaaagaggcttctggtggcattcattgcccatggaattctaagtgttcgagagtgctatatcttggacttagagggtcagaggctgatgaagcttgtgaagaagcagaagcagctgacacaggatgatgatactgatgcggttgagattgctatcgacaacacggcttttatggacgagttcttttctgaggatttaaacaaggaagtgatgggctcagagtgtgttttagaaaattcactccgatggcagtttgtggagggtgcgaaagacctgaaatggaaagaccagcaagccagcgatggagccttgacctga

SEQ ID NO: 141549 - DNA, 398 bp, Homo sapiens
tgacctctggagctgtgagccggtcacatgctgggatgggtcatctcctctccaaccggtgaagcagctgacacaggatgatgatactgatgcggttgagattgctatcgacaacacggcttttatggacgagttcttttctgagattgaggaaactcggcttaacattgacaagatctcagaacatgtagaggaggctaagaaactctacagtatcattctctctgcaccgattccagagccaaaaaccaaggatgacctagagcagctcacgactgagattaagaaaagggccaacaacgtccggaacaaactgaagagcatggagaagcatattgaagaagatgaggtcaggtcatcggcagaccttcggattcggaaatcccagcactctgtcc

SEQ ID NO: 141550 - DNA, 705 bp, Homo sapiens
atggctggagaatcccaaatagccataggatttcccagtaacaacttctgccgtggattcagggggatggtcgtgggtgaaggaaagaggcttctggtggcattcattgcccatggaattctaagtgttcgagagtgctatatcttggacttagagggtcagaggctgatgaagcttgtgaagaagcagaagcagctgacacaggatgatgatactgatgcggttgagattgctatcgacaacacggcttttatggacgagttcttttctgagttctggaggctgaaagtccgagaccaggattccagcatgatcgggttctgcaactcggatggaactagaggccattatcatcagcgaagtaacccaggaatggaaaatcaaataccatatgttttcactttgtcagtaggatgtacttcctctatgttctgggttgtggctgaaccaactttacttggtcaagatcatattttgcattctgatgaagcatctctgggaactggctgtcctgtaaccaatgtaactgcgaagggatatgagtttaattaccctgccactcagtgtgggattcagaaagagccatgtgaagatactggaagaaggcagctgtctacaagccaggaagagggtcctcctcagacatcagatttgccagtggacttcctagcctccagtactgtgagaaatatatcctgtgtttaa

SEQ ID NO: 141551 - DNA, 1449 bp, Homo sapiens
atggcagagaaggagcgggtaagggatgagaaattacctaatgggttcaagatgaatctcaacaatgagtgtggcctgcagggccctttgggagctgcttctttccaccagctgtcacctgcctatagggttcttcccctagatcttcctgtggcagtatcttcttgcattcagcacatcaccattataaaattatctgtttgtccgttgcttattggtcttcgtcttccaggatgtggcctgatagcagaggcttgtctgtcttgttcactgttttatccccagtatctagaacaacgtgtggacattgaggtgtgtaaatggacacaacccactggtgcacacggccacacacctttacacacaggcccagggatgttcacatggtcaccagagagcccacagggctacatcactggaggcacactagctgcttccagtcccagagaatcactcgacactgagacccagcacccacagcctcagcctcctggaaacacagaagctgggctccgcagactctgggggcgggggcagggagtggaatatggaggccaaggtcatcatgggatttcccatcccagctcaggggaaaggcatggctgtgcctttcatccccagatcagcctatggcgaggctgccgtcttttggacactccgtgaacgtgcccacctgcctgctctggcacatctgacaaggctggaaagagttgccattttcggggagggtctatgtcttcctccatatatccccactgtccctacccacaaccccaacccaattccaccccagttttcctctgattatgaaattggaagctcacttctcaaggacacacattcctacccaaattctgggcttactggggctcagggtgcagcctctgaagtgaagaggcacatggcatcgaggtgccagcaacaagagcacacagggattcttcctcaggtccccctctgggagaatcagcccttccagtccccctgcactgtttggaggcccagtttatgtgatccccgactgacggaaacagatggcagggaaggggacctgtttagaccttggaagcctcccaggcacctcctgatgagcttggtagaaacaggtgcagctatggctttcaggccgtcccagagccacttcccaccagacaccgtttccaggcccatggccaagggcatgttctggaactacaccggaagactctacagaccagatatccctcagagactctgtcagcaagtgagggagagactgcaaagagaaagaagagcagggcaaagacaactggatgtgctggcccggaagaggagcagccacacagggacagagagtggaaacctggagatgaacaacgcagcagagaacagccaccctcccttccctggggtctgggcactacgaggcaaggtggcattaggcatgatttagggcaacccatcttttaa

SEQ ID NO: 141552 - DNA, 328 bp, Homo sapiens
caaagttgttaatagtttcctccagatgacgacttgttcggctagcatccattgcagctctctgtaattccgtttctgcctgtgaaataacatgtcgatcagatgggtttcgctgacgtgttctttctaactgagttaattgcttagcttctcgattccttgctgtgagtgttgctttgaggtcatcccgtttcattttcacaatggtcccataagttttcaagggttcaactactttggcttcaagtctttcaacctctgcttgtcgataatcctgaagtttggcaaactcatctgcaaagttcatcaggcccagctttactcgtgc

SEQ ID NO: 141553 - DNA, 1155 bp, Homo sapiens
atggtgatagtgatggatggagaaagggatagaggacagatcctggatatatattttgaacgtagaaccaataggcaggtctataccgcaattgcttcttgcctggaccactacaagagcctctttttggtctcttcctccctcgctccttccagtatgttctccgcacgcagccagagtgatcatgccattgctcttactcaactccagtggctttgtgtcactttcaagacacagcctggtgtctcactgtggcctccaaggccctcacagccaggcccatggctgcctccccatcatcgttacttcatctctcccctgcctgctgtctcaggtcttgaaatccccttctttgggcccccgcaaggtccccggccgtgcgcgaggcagcatgatgaggcgcaccctggaaaaccactaacagcccgagcccagctgcccagggccgcccataatggagggctggggaacgctcaaacgaaacaactgcaaacagctgtttcaaatgtggagaagcattttggagaactgtgccaaattttcgctgcctatgtgcggaaaactgccaggctgagagacaaagcagacctcctggtgaatgaaattaacgcgtatgctggtacagagaccccgcatttaaagctgggcctgatgaactttgcagatgagtttgccaaacttcaggattatcgacaagcagaggttgaaagacttgaagccaaagtagttgaacccttgaaaacttatgggaccattgtgaaaatgaaacgggcagaaacggaattacagagagctgcaatggatgctagccgaacaagtcgtcatctggaggaaactattaacaactttgaaaggcagaaaatgaaggatataaagactatattttctgaatttatcacaatcgaaatgttatttcacggcaaagctttagaggtttacactgctgcctaccagaatatacaaaacattgatgaagatgaagatttagaggaagcaatgaaaaacatggaaaagaaagaatttaaagcacaagaaggaaaagtacgtacagattggcaaggacataaggataaagggttaagaaataattataacagagttgggactgaccaccagatacttttctatgcaaacatatcaggtcctcttgaataa

SEQ ID NO: 141554 - DNA, 278 bp, Homo sapiens
caactgcaaacagctgtctcaaatgtggagaagcattttggagaactgtgccaaatcttcgctgcctatgtgcggaaaactgccaggctgagagacaaagcagacctcctggtgaatgaaattaacgcgtatgctgctacagagaccccgcatttaaagctgggcctgatgaactttgcagatgagtttgccaaacttcaggattatcgacaagcagaggttgaaagacttgaagccaaagtagttgaacccttgaaaacttatgggaccattaaaaa

SEQ ID NO: 141555 - DNA, 501 bp, Homo sapiens
gaatgggggaccccacgagggccatagtttcatcccctcagaatggcaggccaccgaagaaggaaaaatacttatgcctgcagctaaccaatggaaattacttaaaacccttcaccatatctttctcttaggcattaatagcacccatcagatggtcaaattattatttactagaccaggccttttcaaaactatcaagcagatagtcaaggcctgtgaagtgtgccaaagaaataatcccctgcattgcagcccatacatttcaatccctttatctttaacctccttgttaagtttgtctcttccagaatcaaagctgtaaaactacaaatagttcttcaaatggagccccagatgcagtccatgactaagatctaccatggacccctggaccggcctgctagcccatgctccgatgttgatgacatcgaaggcacccctcccgaggaaatctcaactgcacaacccctactacgccccaattcagcaggaagcagttag

SEQ ID NO: 141556 - DNA, 855 bp, Homo sapiens
atgcgtaagtacccggttgcccctaaaagattgcaagctctgtgggagcggaaactgtgtctcattcatctcctgcaggcactcaggaaggaggaagaaatggatgaagcctcttatgtcctaaggcctgctaagcgcgcacccaggcaccttagagtccccggctttggctcccctgggtcccctggttgtgcgccaggcaagatgttgagatgcacactggaaaaccggaacgctcaaaccaagcaactgcaagcagctgtctcaaatatggagaagcatttgggagaactgtgccaagtctttgctgcctatgtgcggaaaactgccagactgcgagacaaagcagacacagaattacaaagagctgcaatggatgcaacccgaacaagtcatcatctggaggaaactattgacaactttgaaaggcagaaaataaaggctataaagactatattttccaaatttatcacaatcaaaatgttatttcacagcaaagctttagaggtctacacagctgcctaccagaatatacaaaagattgataagcatgaagatttagatttacatgttttcctaaattccctgtatgcaccagattattcatctcgtttagatatgagggggatttggcagggtcatacgacaatagtggagggaagaatcaaagctgtaaaactaccaatcgttcttcaaatggagccccagatgcagtccatgactaagatctgccgtggacacctggactggcctgctagcccttgctctgatattaatgacattgaaggcacccctcccaaggacatctcaactgcacaacccctactacaccccagttcagcaggaagcagttag

SEQ ID NO: 141557 - DNA, 406 bp, Homo sapiens
agagggcaaatgtcatccgcccactgataatctctggagactttttcatatcattgatggcagcaatgggaagaccccagttggctactgggccccagaagtgtttaaataatcacgtgaaactcgtgagaacaaatcttcgtttccatcttgcaggtttactgggttaattgatggttaacatttaggtattggattgtccaagtgttcctgtaggaatcagcagttcttacagctgagcccagagctagaaagggtatggcagcttcccaaggtccctactggtttccacactacaaccaagtcatctctgattgtcctatttagaacatttaaaaataaaaataagattcacttcttacacaatacattgttaatataattcaaaccctgttagaactattct

SEQ ID NO: 141558 - DNA, 1844 bp, Homo sapiens
gaagttagcgggatgtttgcattgaatattctcaagttgatcaggtattctaaattaattttaacttctgagtctccaggaaagctttcagaatttatacttactacccaggtgagaagttgcagcacaatagaagtgaatctttcccaaacttgtggaatattagagttggaacaggccttagaaattccagtgcttcatttgccacatgagaaggctgatatgtgaaccaaacagataacttcagaacctctggataccaaacttgggaagctaaaacagaaatgtcaacttgggaattaaaggaaaatagtaatgcatgagacctggttttgaaaaaaaaggtttagatatttttgtgctccatgttttcctgcatatgtctcccttttctctgccaaactgcttttcacacccggtccttggactctttgagcacttccctgccatataattgactttcagaaattgaatgaagctggaaatgttgaagcaggactggccataagaatctcttaatatctggatagtccagtcacaaagatctttactgtcattcagctgacttttggctcactaaatatagctgaatatcacaaattctaattgtcaaaaccctccctcattttaatttgaactagaaaactagacaaaatttggtaagaataaatttcagcaaactgtagaattatgatctaaaatatctcaaaattttatcccattttactttgaataatgttagaaatatactatgctaggctgtcaagttggatccttttagtactacataagtaagttaataaattacttaaaattgctcctcaagtactttcagagaaagctaacattacccataattttggaaaaattagactgacctaaaagcagctcctctgctccttttcaaatctcctccctggttcagcctgcctgcctccacttctgcctccaccatgtccatcagggtgacccagcagccctacaaggtgttcaacttctggcccctgggccttcagcagctcctcctacatgagcaggcccagtgcccacatcagctccttgattgtctcccaattgggcagcagcagcaccagcttccagggtggcctgggtgccggcatgggtctgccactgcactccagcctggctaacctgtatgtggatttttatagaggttttattcataactgccaaaatttggaagcaaacaagatgtcctttggtaggtgaatggcaaaataaattgtggtacacctggttccaactacacaacgttctggaaaaggcaaaattatggagctagtcgaaagatcggtggttgcaagggttgaggtggggcacagaggatttttagagaggggtcttcccattgctgccatcaatgatatgaaaaagtctccagagattatcagtgggcggatgacatttggtaagaatgcagatttggataattgggccttgtcggccagcccaggtggaagcctgcagtgcaccagggaccaggagcagatactgcaggtgattcgagcaggaacaggccctgataaaaaccaaggcaacagtttggttcagtggacttttctggtactcccgaggagagaatatggagagatagaggccagtaaggtcattcctgctggccaaaacttggccaataggacacacccaaatgagacttcagtttggaagtgtcacaaggaagcaggctctctgtggaacatcccttttgccggtctacctgcagcttctgtgatggagaagcggtggttctttccagcagcagaagtccaggcattaactgggggacagcagcagtgagggcaggttcagtcccacagcatgga

SEQ ID NO: 141559 - DNA, 732 bp, Homo sapiens
ttatgggaaaaggaaggtaaaatattttaattacttggtaaggccagcagaggagttggggtttaggaaactctccagctatttcctattaaaaaatagaatggtttagtaaaaaatagcattcaggtgtattttccttagggaagcctaattaataatgaaaatctgtgaactcagcagcaacctgggcaaaggctgtccccttcaaagaccttgttcttcccttttccccattggttaatgccagatgcccgttttaagtccatcctcgtgtttggaataagccgcccctccccctggatgaagctgggcctaacttcatttgttgcgtggcatgcaaaacaagaagcccaagttcccgaaggctgtaaccttgtaaggcaaaatctccatgaatgtcaaaagaatagcaaacagagggcaaaatgtcatccgccccactgaataatctcctggagactatttcatatcattgatggcagcaatgggaagaccccaagttggctactgggccccagaactgctacaaaaaatgatgaggaaaagaatgaatagaggaaaaagttaatacagaactataaacagctgaaatttcccttactttaaataatcacgtgaaactcgtgagaacaaatcttcgttttcatcttgcaggtttactggggtaattgatggttaacatttatgtattggattgtccaagtgtttcctgtaggaatcagcagttcttag

SEQ ID NO: 141560 - DNA, 2457 bp, Homo sapiens
atggccctgcagaatgccctctacaccggggacctggcaaggttgcaggagctgttccccccgcacagcacagccgacctgctgctggagagccgggccgcagagcctcgctggagcagccaccagagggcttgcccaatagcctacaccttggcccaagaacacagtcatgtggagcccagaatagctcctgctggatgcgtggccaggctggtggagaagcccagcagagggtctgaggagcacctcaagtctggcccgggacccatcgtcacccgcacagcctcaggacctgcccttgccttctggcaggcagtgctggctggggacgtgggctgtgtctcccgcatcctcgcggactccagtactggcctggctcctgattccgtctttgataccagcgacccagagcgatggagggatttccgcttcaacatccgtgctctgagactctggtctctgacatacgaagaggagctgaccaccccactgcatgtggcagccagccgtggccacacggaagtcctgcggctgctgctgaggcggcgagcaaggccagacagtgcccctgggggccgcaccgccctgcacgaggcctgtgctgcaggccacactgcctgtgttcatgtgctgctggtggcaggagccgaccccaacatcgctgaccaggatgggaaacgccccctgcatctctgccgggggcctggcacccttgagtgtgcggagctgctcctcaggtttggagcgagagtggatggtcggtccgaggaagaagaggagacccctttgcatgtggccgcccggcttggccatgtggagctggcagatctgcttctaagacggggggcatgtcctgatgcccgcaatgccgaaggctggaccccactgctggctgcctgtgacgtccgctgccagtccatcaccgatgccgaggccaccaccgcccgctgcctgcagctgtgcagcttgctgctttcagctggagcagacgctgatgctgcggaccaggacaagcagcgacccctgcacctggcctgccgccgtggccatgcagctgtcgtggagctgctcctgtcctgtggtgtcagcgccaacaccatggactatgggggacacacgcccctgcactgtgctctgcagggcccagctgcagccctggcccagagccccgagcacgtggttcgggctctgctcaaccatggcgccgtccgtgtctggccaggggccctccccaaggtgctggagcgctggagcacgtgccctcggaccatcgaggtcctgatgaacacctacagtgttgtgcagcttcccgaggaggccgtcggcctggtgactcctgaaactctgcagaaacatcagcgtttctactcctccctcttcgccttggtgaggcagcccaggtcgctgcagcatttgagccgctgtgcgctccgctcccacctggagggcagcctgccccaagcgctgccccgcctccccctgccaccgcgcctgctccgctacctgcagctggattttgagggcgtgagccccgggatctgtgagcagtcacagctgcttggggtccagggatgtgtggaaggcaagagaagggttggggagggccctagccagaaccggcccgtccccgaaccaccagaagcctctgaatccaaacctctccttccagatgtccatggccttttgagagggcctgaaagcagatgccccagcctgcagagggcgcgcctctgcactaactcaggccaggtagccctggcagcaggaggcccagctccgcaggcaggtgtggatgctgcaattcccaatgcagagaagcggaccgacagcggcagccggccgttccagggcctgctgcgttcaggcaccgcgcacgggggcaaggactgccctccaggcccccaccaggtccgcttggcgggtagccggagcgcggcgcacaggaggaagcggcagttgtgcgctgctgccaccagagggcacccgcggccaggcccgacgctgcccaccatgagaggactttctctggccaatgagtggattggagcctctttcgccggccgccttaccaacaccttctgcgcggggctgggtcaggctgtgccctcgatggtggcgctgaccaccgcgctgcccagcttcgcggagccgcccgacgctttctacgggccccaggagctcgccgccgccgctgccgccgccgccgccactgccgcccgaaacaaccccgagccaggcggccgacgcccagagggtgggctggaagctgatgagctgctgccggcccgggagaaagtggcagagcccccaccacctccgcctccgcacttctcagagacttttccaagtctgcccggggtagacaagctacaaggatgggatttccgggggcaccaagatgggggtatgttgaagcagctgtcaattcagcaatggagggcacgttctggcttctaa

SEQ ID NO: 141561 - DNA, 408 bp, Homo sapiens; identical to SEQ ID NO: 134303
  misc_feature (1)...(408): n = a,t,c or g

SEQ ID NO: 141562 - DNA, 1255 bp, Homo sapiens
tagacttcataacaaaaaacatttattaagtagccacaatctaacaagccctgctcacctgcctcttctccttcctgtctgggagggggctccttggtgtgcagagccacaaggtgggggtccaagttggggagctcccagttcttccccataggccttgctgtcagtcagccatgggtcccttttggtaccagagacttgtgaccctggactcgaacctcttctgcccaagcactcgcttgcttggcaaacttctgggcttggaggctttggccccagcttctggccccacagccccctgaggtccatgcagccctgtgccagccaggcctacttgagcacgagcatggcctctgtgccatccttggcggtcaagtagaggccatgtgtgaggtagtactcccgccgcaggaaggcatagaagtaatcagagatgagcaggatctgcccaacgttgaaggtcagtgtgatgccttaaaagaaattagagttggcacttcctgcataaatccagaggtgccacaggacagggaagagcagggaacagacgatgatgatgcaggtgaggacaaagatgtttctcaggaatctgtagagatggttccacacggggaagaaggccatgtagagcgccacgtcccccactgtcgggtaggacttaaagatggcgatgacagcgatctggataaacatgaagaagatggggtgctcctttagctttatggctaaggggatggtgtagaagaagacgttgatctgaaacacacatacaaagaagaggctgaagtgctcaaacatctctgcaaagaagtaccagaaaatgaccaatgtttggagtgagatctggaacagaaagtataaagccatagactgcggggatgaaatcccaagagctgagaaggaagaaggagaggcaaatgattaccactaggcttcccacatacatcatggcatactcccaagaaaagatccagaaggctttgctcttcattttcacaggtatgtactgccgggggtaatttcccctagtgtctgctactgtctttgaaagaaaataaaggcctcaaaccatccaagggaatccaaggctttaggaatcccaagcaaaaggaagatgggaactagaaacttcccagactgcaccatgagcatctcggtaagcctcgcctggtctccctcgaagccttacagcttcagcttctcggtcctgtgcactcggctttccttcactggagcctcctgcccctgagcatgt

SEQ ID NO: 141563 - DNA, 1737 bp, Homo sapiens
tttcgtatggcggctcccttggtcctggtgctggtggtggctgtgacagtgcgggcggccttgttccgctccagtctggccgagttcatttccgagcgggtggaggtggtgtccccactgagctcttggaagagagtggttgaaggcctttcactgttggacttgggagtatctccgtattctggagcagtatttcatgaaactccattaataatatacctctttcatttcctaattgactatgctgaattggtgtttatgataactgatgcactcactgctattgccctgtattttgcaatccaggacttcaataaagttgtgtttaaaaagcagaaactcctcctagaactggaccagtatgccccagatgtggccgaactcatccggacccctatggaaatgcgttacatccctttgaaagtggccctgttctatctcttaaatccttacacgattttgtcttgtgttgccaagtctacctgtgccatcaacaacaccctcattgctttcttcattttgactacgataaaaggtaaggccctgcccaacgttgaaggtcagtgtgatggcataaaagaaattagagttggcacttcctgcataaatccagaggtgccacaggacagggaagagcagggaacagacgatgatgatgcaggtgaggacaaagatgtttctcaggatgtgggtctccatggtgccacagtcctgggtcttaggaacacgttttccattctccttaactggtgtcttaggacccctgcctcgctcttcaaacattcccaactctcccttcatcttagtttctgctgagaccccccaaggcatattctctgggccgattgccacgtagaggagcaggaccagcagcagcctggactgtgacaccaggtggtcccaagcgagctcacacttctgctgggaatgtggtctataaaggagctggaggagatagaggagtcctgggacaaacaaggtgagtgggtacagagactggtatgtcgctaaggcaagaaaaatagcactgaggaaagcactgcatctgtagagatggttccacacggggaagaaggccatgtagagcgccacgtcccccactgtcgggtaggacttaaagatggcgatgacagcgatctggataaacatgaagaagatggggtgctccataaagccatagactgcggggatgaaatcccaagagctgagaaggaagaaggagaggcaaatgattaccactaggcttcccacatacatcatggcatactcccaagaaaagatccagaaggctttgctcttcattttcacaggtatgtactgccgcatttccgaccgatccggtagccccgcgtagcgaacacttagcgagtcctgtgcctttctgcgcctgcgcaaaggtttcctgatgtaagaggtggcctcccatggccttgggcaacactgcccttggggctttgcagggtatagccccccaccggctgctttcatgggctggcgttgagtgtctatggcttttccagtctcatgctgcaagctgttggtggatctaccattctggggtctagaggacggttgccctcttctcacagctccactaggcagtgccccagtagggactctgtatgggcctccaacttcacatttcccctccacactgaccatttccgaccgatccggtagccccgcgtagcgaacacttagcgagtcctgtgcctttctgcgcctgcgcaaaggttt

SEQ ID NO: 141564 - DNA, 867 bp, Homo sapiens
atgcatgcagaaaaagcacttggcaaaatccagcatcacttcatggttaaaagcctttgcaaaattgacatagaagagacataccttatggtttctcccctgaagttgctttctcagcaccagcccccaggagcaggttcaccttctgtgcccagagtggggcttgcacagctgagtggagaaggccagatttacaagaatgtcctgtgtctgcccatgttgctaagaactgatgggacgttcaccagggagagcatcccttggcagaaagggggccatgggcatccttgtcctgtatgggagacactgctcagcctgggggaacctctgttcatgaaggtatcctggagggaagagctccctatcgacccagcactgcagaatccacagaggaaggacagctctggccaccagggagcagccacacgagaggagaggacccggtgtccccacagaccaagaatcactgtgtctgtgtctctcctgcttccacggtcctgggcccagtctgtgttgacgcagccgccttcagtgtctgcggccccaggacagaaggtcaccatctcctgctctggaagcagctccgacatggggaattatgcggtatcctggtaccagcagctcccaggaacagcccccaaactcctcatctatgaaaataataagcgaccctcagggattcctgaccgattctctggctccaagtctggcacctcagccaccctgggcatcactggcctctggcctgaggacgaggccgattattactgcttagcatgggataccagcccgagagcttgcacagtgctccaggccaatggggaactgagacaagaacccccttcctcctccgccaggaggaaataa

SEQ ID NO: 141565 - DNA, 452 bp, Homo sapiens; identical to SEQ ID NO: 119067
  misc_feature (1)...(452): n = a,t,c or g

SEQ ID NO: 141566 - DNA, 428 bp, Homo sapiens
  misc_feature (1)...(428): n = a,t,c or g
ccctgacaaattatgctgcagcgtattgtactggcctgctgctggcccgcaggcttctcaataggttaggcatggacaagatctatgaaggccaagtggaggtgnctggcaatgaatacaatgtggaaagcattgacggtcagccaggtgcctttacctgctatttggtcgcagaccttgccagaactaccactggcaataaagtgtttggtgccccggagggagctgtggatggaggtttgtctaaccctcacagtagcaaacgattccttggtttgtctatccctcacagtaccaaatgaatccttggttatgattctgaaaacaaggaatttaatgcagaagtacgccggaagcacatcatgggccagaagtttgcagatgacctgcactgcttaatagaagaagatgaaaatgcttccaaaaaa

SEQ ID NO: 141567 - DNA, 431 bp, Homo sapiens
gtataaatagactagactggcctccacttaaggcgttttcagatttgtcctttgacagttcttcaggcagagtcaacgtattatttttctgaaatgatgtttgacaatcttttggcttatgaactccgctctctttgtctgagataaaattgttgtcatctaggagttcttctttagcaccagtaatatcggtgtttatcttcaaatcatccatattgttggcaagcccatttaacacatttagtctagattttgtcttattaacatcttgctgcaagaacgatctcatccaaaattaaatcaaacagtttggtgccgtgtgcgtcaaaccggggcgacgttgggagcacgcggcgtccccgcgtcacacgccgctctgtacgctactcggctccagcggcccccctccgctccccgcttttcgcacgaaa

SEQ ID NO: 141568 - DNA, 1950 bp, Homo sapiens
atgtgcgaactcgatattgtacacgactctgtttaccaatactgccccgaattacacttaatacgactcaacagcttaacgttggctggccacgccttactggactgtacaactctcactcttaccgaacttggccgtaacctgccaaccaaagcgagaacaaaacataacatcaaacgaatcgaccgattgttaggtaatcgtcacctccacaaagagcgactcgctgtataccgttggcatgctagctttatctgttcgggcaatacgatgcccattgtacttgttgactggtctgatatccgtgagcaaaaacggcttatggtattgcgagcttcagtcgcactacacggtcgttctgttactctttatgagaaagcgttcccgctttcagagcaatgttcaaagaaagctcatgaccaatttctagccgaccttgcgagcattctaccgagtaacaccacaccgctcattgtcagtgatgctggctttaaagtgccatggtataaatccgttgagaagctgggttggtactggttaagtcgagtaagaggaaaagtacaatatgcagacctaggagcggaaaactggaaacctatcagcaacttacatgatatgtcatctagtcactcaaagactttaggctataagaggctgactaaaagcaatccaatctcatgccaaattctattgtataaatctcgctctaaaggccgaaaaaatcagcgctcgacacggactcattgtcaccacccgtcacctaaaatctactcagcgtcggcaaaggagccatggattctagcaactaacttacctgttgaaattcgaacaccccaacaacttgttaatatctattcgaagcgaatgcagattgaagaaaccttccgagacttgaaaagtcctgcctacggactaggcctacgccatagccgaacgagcagctcagagcgttttgatatcatgctgctaatcgccctgatgcttcaactaacatgttggcttgcgggcgttcatgctcagaaacaaggttgggacaagcacttccaggctaacacagtcagaaatcgaaacgtactctcaacagttcgcttaggcatggaagttttgcggcattctggctacacaataacaagggaagactcactcgtggctgcaaccctgcttactcaaaatctattcacacatgccccggttcccacggcgcaggcgcgctgctttcccgcctctgccgggctgcgggccgcgggggtggccagcgaggagctcccgggaagcttcgcgctggtggagcgtctgggccaattagacaaacgagggcagcggaaacagtgcaccactgttctcgggtgccagaaaccaaacaaggatgatagttcgtggaacaaacagagtatcatttgtcagattgcttatgcccgtacagagggggatatgatagtctgcacagcatatgtacacgaactgccaaaatatggtgtgaaggttgacctgacaaattatgctgcagcgtattgtactggcctgctgctggaccgcaggcttctcaataggtttgacatggacaagatctatgaaggccaagtggaggcaactggcgatgactacaatgtggtaagcattgatggtcagccagaagtacacaggaagcacatcatgggccacaatgttgcagattacatgtgctacttaatggaagaagatgaagatggttacaagaaacagttctctcaatacatgaagaacagtgtaactccagacatgatggaagagatgtgtaagaaagctcatgctgctatacgagagagtccagtctgtgaaaagaagcccaagaaagaagttaaaaagaagaagtggaaccgacccaaaatgtcccttgctcagaagaaagattgggtagctcaaaagaaggcaagcttcctcagagctcaggagcgggctgctgagagctaa

SEQ ID NO: 141569 - DNA, 990 bp, Homo sapiens
atggtaaaaccctatctctactaccgaaagaaaaaaaaaaaaaatcagccaggcatgatggcatgcacctgtagttccagtcccgccgctgccacagcccagaggcccgaaacccactcgggtcccagcgaatctgaccaaataacccctgaaactcacagtttggtgccgtgtgcgtcaaaccggggcgacgttgggagcacgcggcgtccccgcgtcacacgccgctctgtacgctactcggctccagcggcccccctccgctccccgcttttcgcctccagccccggttcccacggcgcaggcgcgctgctttcccgcctctgccgggctgcgggccgcgggggtggccagcgaggagctcccgggaagcttcgcgctggtggagcgtctgggccaattagacaaacgagggcagcggaaacagtgcaccactgttctcgggtgccagaaaccaaacaagagggggatatgatagtctgcacagcatatgtacacgaactgccaaaatatggtgtgaaggttgacctgacaaattatgctgcagcgtattgtactggcctgctgctggaccgcaggcttctcaataggtttgacatggacaagatctatgaaggccaagtggaggcaactggcgatgactacaatgtggtaagcattgatggtcagccagaagtacacaggaagcacatcatgggccacaatgttgcagattacatgtgctacttaatggaagaagatgaagatggttacaagaaacagttctctcaatacatgaagaacagtgtaactccagacatgatggaagagatgtgtaagaaagctcatgctgctatacgagagagtccagtctgtgaaaagaagcccaagaaagaagttaaaaagaagaagtggaaccgacccaaaatgtcccttgctcagaagaaagattgggtagctcaaaagaaggcaagcttcctcagagctcaggagcgggctgctgagagctaa

SEQ ID NO: 141570 - DNA, 1954 bp, Homo sapiens
  misc_feature (1)...(1954): n = a,t,c or g
gagagaacaaggatgaacaagcagcataactctaccttggccaagagcaggccaggcaacacggggcctgagcccctcatgccccaggcctccccagggcccccaggacccctttcccagactcctcctatgcataggccggtggagccccaggagggaccgcacaagagcctggcggcacaccgggtcccactgaagccatatgcagcacctgtaccccgatccacagtccctgcaggaccagcccacccgaaacctggctgccttcccagcctcccatgaccccgaccctgccatccccgcacccactgccacgcccagtgcccgaggagctgtataagaaagctcatgctgctatacgagagaatccagtctatgaaaagaagcccaagaaagaagttaaaaagaagaggtatgtcgtctttttttttgtcttttcaagaaaacggttgggaatggttcccacgtggggcagactgttggtgtaattgtgcaaactcgatcactagctctgcgtgatgtggcagaagcgaagggaaccaggtttgcaaaagtaactgtggggatggaatgtgttacctcagacataacggaggnggttctttctatcttagtacagtctaagtactggttactgcatttttttattggctgacaagttgctttttgttgaattttcatgttttgaatctttaaatggaatagaaagtaataattaatgaacatgtaagcataaagtgatgtgatggcccacaaatacaatgtatagtaattaaatcaatgtatttaacatatcacctcaaatacttaacactttgtggcaacaacatttgaaatttattctcttaattgtgaaatgtacgatattctatattcatcatgctgcgcaatagaactaaaaacaaaatcatactcctccctactcctcctgttggagattttatacttgactatcatctgcccattctttgcacccaccagcctctgtaaccaccattctgctctctgcttctgtgagttccattgttttagattctatatgaatatgaagtatttgtctttttgtgcctggcttatttncactgagcacaatattctccaattcattcatgttgcaaatgacagaatttccatcatttttaaagactgggtaataatccattatgtatatgtataccacatttcctttatccatttatctgttgctattaatatatagtgctgcaatgaacatgggagtgccactctcttggacaaactgatttcaaaacatttgggcaaatacctagaagtggtattactgaatctaacatgtcttctatttgacttttggccctatggtagtaggacatcacagaagttggggtttgggaaagttagcttaagatcatacataagtaaatgtatttgaacttggattatttaaccttctgattgcaaagtcttaaatattctctatcaaaattaaattttattaaaattttaaattaaatattctattctcttcagttatagtttaaaaaatatatattcctatcttttgtaggtggaaccgtcccaaaatgtcccttgctcagaagaaggatcgggtagctcaaaagaaggcaagcttcctcagagctcaggagcggggctgctgagaagctaaacccagcaattttctataaagatttttcagatatagataataaacttattgaacagccnnnnnnnnnnnnggggggggccctttaaaaagatccctgggggggcccaattttaccggggcttgcaaggttatagctctctccttatggggagccttattatatcctatctggggatttttgggaaggacccttactttgggggggggacatcttggtccaaccttcctcgggagattaatcgcttaggggaatcctaaatttttaaaggggttagggggataatatattgattttttctggggggg

SEQ ID NO: 141571 - DNA, 614 bp, Homo sapiens
catcctatcccgtgtggtggaattcccgctgactgctgaggtgccacccgagctgctggctgctgccggcttcttccacacaggccatcaggacaaggtgaggtgcttcttctgctatgggggcctgcagagctggaagcgcggggacgacccctggacggagcatgccaagtggttccccagctgtcagttcctgctccggtcaaaaggaagagactttgtccacagtgtgcaggagactcactcccagctgctgggctcttgggacccgtgggaagaaccggaagacgcagcccctgtggccccctccgtccctgcctctgggtaccctgagctgcccacacccaggagagaggtccagtctgaaagtgcccaggagccaggaggggtcagtccagccgaggcccagagggcgtggtgggttcttgagcccccaggagccagggatgtggaggcgcagctgcggcggctgcaggaggagaggacgtgcaaggtgtgcctggaccgcgccgtgtccatcgtctttgtgccgtgcggccacctggtctgtggctgagtgtgcccccggcctgcagctgtgccccatctggcagaagcccccgtcccgcagccgg

SEQ ID NO: 141572 - DNA, 444 bp, Homo sapiens
  misc_feature (1)...(444): n = a,t,c or g
gtactgtcctgtattgtgcccccggcctgcagctgtgccccatctgcagagcccccgtccgcagccgcgtgcgcaccttcctgtcctaggccaggtgccatgggcggccaggtgggctgcagagtgggctccctgcccctctctgcctgttctggactgtgttctgggcctgctgaggatggcagagctggtgtccatccagcactgaccagccctgattccccgaccaccgcccagggtggagaaggaggcccttgcttggcgtgggggatggcttaactgtacctgtttggatgcttctgaatagaaataaagtgggttttccctggaggtaannnnnnnnnnnnnnnnnnnnnnnnnnnnnnnnnnnnnnnnnnnnnnnanannnnggggcgccgctatagataaaaagggcccattaaaccccgttaaacaacctcgggg

SEQ ID NO: 141573 - DNA, 1809 bp, Homo sapiens
gccagcagccatgtggagacccgggcccacgccgaggagcggctcctgaagaaactcttctccggttacaacaagtggtcccgacccgtggccaacatctcggacgtggtcctcgtccgcttcggcctgtccatcgctcagctcattgacgtggatgagaagaaccagatgatgaccacgaacgtatgggtgaagcaggagtggcacgactacaagctgcgctgggacccagctgactatgagaatgtcacctccatccgcatcccctccgagctcatctggcggccggacatcgtcctctacaacaatgctgacggggacttcgcggtcacccacctgaccaaggcccacctgttccatgacgggcgggtgcagtggactcccccggccatttacaagagctcctgcagcatcgacgtcaccttcttccccttcgaccagcagaactgcaccatgaaattcggctcctggacctacgacaaggccaagatcgacctggtgaacatgcacagccgcgtggaccagctggacttctgggagagtggcgagtgggtcatcgtggatgccgtgggcacctacaacaccaggaagtacgagtgctgtgccgagatctacccggacatcacctatgccttcgtcatccggcggctgccgctcttctacaccatcaacctcatcatcccctgcctgctcatctcctgcctcaccgtgctggtcttctacctgccctccgagtgtggcgagaagatcacgctgtgcatctccgtgctgctgtcgctcaccgtcttcctgctgctcatcaccgagatcatcccgtccacctcactggtcatcccactcatcggcgagtacctgctgttcaccatgatcttcgtcaccctgtccatcgtcatcacggtcttcgtgctcaacgtgcaccaccgctcgccacgcacgcacaccatgcccacctgggtacgcagggtcttcctggacatcgtgccacgcctgctcctcatgaagcggccgtccgtggtcaaggacaattgccggcggctcatcgagtccatgcataagatggccagtgccccgcgcttctggcccgagccagaaggggagccccctgccacgagcggcacccagagcctgcaccctccctcaccgtccttctgcgtccccctggatgtgccggctgagcctgggccttcctgcaagtcaccctccgaccagctccctcctcagcagcccctggaagctgagaaagccagcccccacccctcgcctggaccctgccgcccgccccacggcacccaggcaccagggctggccaaagccaggtccctcagcgtccagcacatgtccagccctggcgaagcggtggaaggcggcgtccggtgccggtctcggagcatccagtactgtgttccccgagacgatgccgcccccgaggcagatggccaggctgccggcgccctggcctctcgcaacacccactcggctgagctcccacccccagaccagccctctccgtgcaaatgcacatgcaagaaggagccctcttcggtgtccccgagtgccacggtcaagacccgcagcaccaaagcaccgcccccgcacctgcccctgtcgccggccctgacccgggcggtggagggcgtccagtacattgcagaccacctgaaggccgaagacacagacttctcggtgaaggaggactggaagtacgtggccatggtcatcgaccgcatcttcctctggatgttcatcatcgtctgcctgctggggacggtgggcctcttcctgccgccctggctggctggcatgatctag

SEQ ID NO: 141574 - DNA, 3782 bp, Homo sapiens
  misc_feature (1)...(3782): n = a,t,c or g
atgcggagggggcggggtcgaggctgcggcgcgtgtggagcgggcggagcgggggcgggggccaagcgcggggcacccgggggcctcctgtataggcgggcaccaatgggctcctgctccggccgctgcgcgctcgtcgtcctttgcgcttttcagctggtgagtggcgacccctccgcgagcctcctggagcccccggtgcccgacccacggcggctgtggggtcccgaagcgtccctccgccccggggcccgttcgctgggtcccgcgccagctccgaggggggatgcctcggaccccgggctgctacggccgaaggtggcgtcgcctgcggggcgtggggagtcgcggcgccgggtcccgtccccggtgtgcgtgcgcggggggcggccgcgggtcggagcggcggggacagccagcagccatgtggagacccgggcccacgccgaggagcggctcctgaagaaactcttctccggttacaacaagtggtcccgacccgtggccaacatctcggacgtggtcctcgtccgcttcggcctgtccatcgctcagctcattgacgtgtggagatgtggtcctgtggttgtggtcctgtgggaatgtggtcctgtggagacgtggtcctgtggggacacggtccgtggagacgtggtcctgtgggaatgtggtcctgtggggatgtggttctgtggggacgtggtccgtggagatgtggtcctgtgggttgtggtcctgtggggacgtggttctgtggggatgtggtccatggagatgtggtcggatgagaagaaccagatgatgaccacgaacgtatgggtgaagcagcgagccgttcaggactctctgtccgcctgcagcccccgccttccctggtacctccgcagagacccaagaggcgtccagaggggagcccaggcgcacggtccccagggaggggccccgccctcaggcccaggcttccacagggtcaagcggtctcaagccggcggctctccctggtggattcctgcagatgtagggcacagccgctggggtgatagtgggagacggaaaggttggctgagaggcctgattccttccacgcatcacaacctgaaaatcgccaaaggtcttccttgttggggaggagtgaatggcagcaccggaagccaaggcccctcaccaccaagaagccagcagctcatccccaccttctggaccaaagacacgaagcagagaccaagccgagccaaggtcactgacacagaaaagccctttgtcccagccagctggccgcctgctaatgacatccagcctgcaccttccaaggccacctctgcatccagaaaggacagtggcggctccagccggggaggaacaagggccacagcttccctggggtcaggggtggggagggtcaccttgccctctcccgtgttccccagccagacccccagtagagaggagacccctgcagttgtggatgtggctttccccagtgtccacgagacccctggagcctggcccctctgggcccgtagaagctcccatgagattctgatgcacagcgagggcctgagccctgggccagctcttgggggcagccctgggctcccatcgtttaatttgcttcctccgcgctggaagcccacgtttggtgatgtatgtgttatgatggccacgtgtccttcccccatcagcgacggggtctggggaggccggggaggctcctcattacgctcccagcacaaagcccaatcacagacatcgcacacggatacactagaccctgcctgcggggagagtggctgccagccggggcacccagacgtccctgcgtgccctgtgctggcgcaaggcagctcttccgtgcctccgtggtgcctgcgtctcattaaacgcagcaaacgtcttctggacgtgccgccagtcccacagaaaaccaaagcaaggcagactcaccgctcctgcatcccggagctcagagtgggacgaacaacgcccagtgctcagtgtgatattagaagagcccaagacagtggagggctcagcacagatgccgccatccgtccgcagaatcgcgctgagagcagctccttcaagggagcccgggacgtcccggggaagccaccctcagtgactggccccagacaaaggctgaacgggccgggctgggctgagggacactgccggggactcggagccagtgttccctccatgggacctaaagacagtgccaagtgcctgcaccgtggaccacagccgagccactgggcagccggtgatggtcccacgcaggagcgctgtggaccccgctctctgggcagccctgtcctaggcctggacacctgcagagcctgggaccacgtggatgggcagatcctgggccagctgcggcccctgacagaggaggaagaggaggagggcgccggggccaccttgtccagggggcctgccttccccggcatgggctctgaggagttgcgtctggcctccttctatgactggccgctgactgctgaggtgccacccgagctgctggctgctgccggcttcttccacacagctgcagaccatgtggtcagacctgagttcaggtcccagctctgccacttcctggctgaaggacagggcagcagggcccaccgagggctttacaaatactggcacagccatggtcattgtcagcagtgggctctggcggggcaccatcctggccatcaggacaaggtgaggtgcttcttctgctatgggggcctgcagagctggaagcgcggggacgacccctggacggagcatgccaagtggttccccaggtaccggctgcccctgcggggccccgggtctgatcatggctgtcagttcctgctccggtcaaaaggaagagactttgtccacagtgtgcaggagactcactcccagctgctgggctcctgggacccgtgggaagaaccggaagacgcagcccctgtggccccctccggagccagggatgtggaggcgcagctgcggcggctgcaggaggagaggacgtgcaaggtgtgcctggaccgcgccgtgtccatcgtctttgtgccgtgcggccacctggtctgtgctgagtgtgcccccggcctgcagctgtgccccatctgcagagcccccgtccgcagccgcgtgcgcaccttcctgtcctaggccaggtgccatggccggcgcgggtgggctgcagagtgggctccctgcccctctctgcctgttctggactgtgttctgggcctgctgaggatggcagagctggtgtccatccagcactgaccagccctgattccccgaccaccgcccagggtggagaaggaggcccttgcttggcgtgggggatggcttaactgtacctgtttggatgcttctgaatagaaataaagtgggttttccctggaggtactgaacctgaatgaatgcttatgaataaaaataaagaggaatttacctgaaagtgcggggcccttttattttaaagggccccttaaaacccctttaaaccccccgggggggttttttttggccccccccnnnnnnnnnnnnnnnnnnnnngggtttttttttggcnnnnnnnnnnncccccccctgtttttttttnnnnnnnnnngaaaaaatcgcccccttttcggggagggggttttcttttattttatgggggtncccccattttnttnaaaaaannnnnnnnnnnnnnnnnnntcataatnatttcatattcaaccatattatcaataacaaataaataaatntcttncctttttanaatcaatataatatcg

SEQ ID NO: 141575 - DNA, 452 bp, Homo sapiens; identical to SEQ ID NO: 140771
  misc_feature (1)...(452): n = a,t,c or g

SEQ ID NO: 141576 - DNA, 427 bp, Homo sapiens
aactggtagttttgaaatagcaaaggatgtgcttgatttgttctgcagccccttcttaatcaatacggaggctaaccactccacattaccttcttttcaagggcctgtttcccttccctccataactgttgtgagtattgacagccaggcttctaaacctcttaaaactccccaactctggtgccaacttagacaatactcttttaagcactcctttttagttgtccccacctgcccagttcccttattaggctgagacactttaactaaattatctgcttccctgactattcctggactacagccacatctcattgccacccaccttaacccacaagtagaagatacctctattccctccttggcaacctatcatgcaccccttaccatctcattaaaacctaatcactcttacccctctcaatgc

SEQ ID NO: 141577 - DNA, 377 bp, Homo sapiens
agacaaaagagacacattttatccgtggacccaaaactccggcgccagtcacggactgggaaggcagccttcccttggtgtttaatcattggagggacgcctctctgattatacacccacgtttcaagggtgtcagaccacgcagggacgcctgccttggtccttcacccttagcggcaagtcccgcttttctggggaaggggcaagagcttgctacaagtgccagaaatctgaccaccaaggcaaggaacgcctgcagcccaggattcctcttaagccgtatcccatctgtgcgggaccccactggaaatcggactgttcaactcacctggcagccactcccagagcccctggaactctggcccaaggctctctga

SEQ ID NO: 141578 - DNA, 184 bp, Homo sapiens
atgcccgaaccgcagcggccaggcgttcctccagaacctcctcccccaggagcttgctacgcgtgccggaaatctggccactgggccaaggaatgcccgcagcccgggattcctcctaagccgcgtcccatctccccctggaccatcacggacgccgagcttcgggtaactctcacagtggaag

SEQ ID NO: 141579 - DNA, 381 bp, Homo sapiens; identical to SEQ ID NO: 127041

SEQ ID NO: 141580 - DNA, 437 bp, Homo sapiens; identical to SEQ ID NO: 114503
  misc_feature (1)...(437): n = a,t,c or g

SEQ ID NO: 141581 - DNA, 1485 bp, Homo sapiens; identical to SEQ ID NO: 114306

SEQ ID NO: 141582 - DNA, 3762 bp, Homo sapiens
atggtggcagctgctcacaaaatggctgcaagccctttgttctctgacctggggttcttggcctcatggattccaaggaatggaaccttgggccatgcgtgtacaatggcccctgcttttgctaggatgtctctccctaacaaaggatttgggctttcaggcataattagaaaagcatgtgaagacagcaaagttctccagtcacaacttagtggctgggagaagtatctagtgactgcctgtcgtgggacgcctcagatagtgacagatctggaggacagttgtccaagacaaaagaagacaaaggagacacgttttatccatggacccaaaactccggcaccggtcacggactgggaaggcagccttcccttggtgtttaatcattgcagggatgcctctctgattatacactcacgtttcaagggtgtcagaccacacagggacacctgccttggtccttcacccttagcggcaagtcccgcttttctggggaagggacaagctgctcattgccaggccgagctaagtcccaattcttcctcagcctccactcctccaccctataatccttctatcacctcccctcctcacacccggtccggcttacagtttagttccgcgactagctcttccccacctgcccaacaatttcctcttagagaggtggctggagctgaaggcatagtcagggtacatgtacctttttctctatcagacctttctcagatcagtcaatgtttaggctctttctcatcagaccccactaaatatacacaggaattccaatgtctaactctgtcctacaacttaacctggagtgacttaaatgtcatcctgacttctaccctctccccagatgaatgggaaagagtttcttctctagcccaatctcatgctgataaccgccggcttcacgagccagacctccaggaaggcattagagcagttccccgagaggatccccaatggaaccatcaggcaaattccccaggtatagctaggcgagattacatggtttcctgcctagttgaagggcttaaaaaagcagcttacaaagctgttaattatgacaaacttaaagaaactacccaaggtgaagatgaaaacccagcccaggtcgtggcccgcttagcagcaacccttagacgctttaccgccctagacccagaggggccagaaggccgccttattctcaatatgcattttatcacccagtcagctcctgacattacaaaaaaacttcaaaaattagaatctggccctcaaaccccacaacaggaattaatcaacctcaccttcaaggtgcacaataatagggaggaagcagccagacggcaatgcatttctgagttacagttacttgcccctactcatgggcttctaaaacctataaactctccttacaattcccccattttacctgtccaaaaaccggataagtcttacagattagttcaggatctgcgtcttatcaaccaaattgttttgcctatccaccctgtggtgcccaacccgtacactcttttgtcctcaataccttcctccacaactcactattccatgcttgatcttaaagatgcttttttcactattcccctgcacccctcgtcccagcctctctttgctttcacctggactgaccctgacacccatcagtcccagcagcttacctgggctgtgctgccgcagggtttcagggacagccctcattacttcagccaagctctttctcatgatctactttccttccacccctccgcttctcaccttattcaatatattgatgaccttcttctttgtagcccctcctttgaatcttctcaacaagacacacttctgctccttcagtgtttattctccaaaggatatcgggtatccccctccaaagctcaaatttcttctccatccgttacctacctcggcataattcttcataagaacacacatgctctccctgccgatcgctggccatcatgtctccgtgcagccgctgctgctgccctaatacttgtagaggccctcaaaatcacaaactatgctcaactcactctctacagctctcataatttccaaaatctattttcttcctcacacctgacacatatactttctgctccccggctccttctgctatactcactctttgttgagtctcccacaattaccattgttcctggcctggacttaaatgcggcctcccacattattccggataccacacctgaccctcatgactgcatctctctgatccacctgacattcacatttccccaaatttccttcttccctgtttctcaccctgatcacacttggtttattgatggcagttccaccaggcctaatcaccactcaccagcaaaggcaggctatgctatagtatcttccacatctatcattgaggctaccgctctgcctccctccactacctctcagcaagccgaactagttaccttaactcaagccctcactcttgcaaaaggactacgcatcaatatctatactgattctaaatatgcctttcatattctgcagcaccatgcagtcatatgggctgaaagaggtttcctcactacacaagggtcctccatcattaatgcctctttaataaaaactctgctcaagaccactttacttccaaaagaagctggggtcattcactgcaaggggcatcaaaaggcatcagatcccattgctctaggcaatgcttatgctgataaagtggctagacaagcagctagctctccaacttctgtccctcacagccagtttttctccttcgcttcagtcactcccacctactcccccacggaaacttccacctatcaatctcttcccacacaaggcaaatggttcttagaccaaggaaaatatcttcttccagcctcacaggcccattctattctgtcatcatttcataacctcttccatgtaggttacaagccgctagaccgtctcttagaacctctcatttcctttccatcatggaaatctatcctcaaggagatcacttctcagtgttccatctgctattctactacccctcagggattgttcaggccccctcccttccctacacatcaagctcggggatttgcccctgcccaggactggcaaattgactttactcacatgcctcgagtcagaaaactaaaatatcttagtctggacataattcctcggtttggccttcccacctctatacagtctgataacggaccagcctttactagccaaatcacccaagcagtttctcaggctcttggtattcagtggaaacttcatatcccttaccatcctcaatcttcaggaaaggtagaacggactaatggtcttttaaagccacacctcaccaagctcagcctccaacttaaaaaagattggacagtacttttacctcttgctcttctcagaatcagagcctgtcctcgagatgctacagggtacagtccatttgaacttttatatggacgcactttcttgcttggccccagcctcatcccagacaccagccctctaggtgactatcttccagtcctccagcaggctagacaggaaattcaccaggcttctaatcttctcttacctactccagatcgccagccatatgaagacaacctagctggacgatcagttgttgttaagaatctgacccctcaaactctacaacctcgatggacgggaccctacttagtcatctatagtccccgactgccgtccgcctgcaggatcctccccactgggttcaccattccagaataa

SEQ ID NO: 141583 - DNA, 441 bp, Homo sapiens; identical to SEQ ID NO: 127060

SEQ ID NO: 141584 - DNA, 692 bp, Homo sapiens
cgggaatctgaagacctgagctttggctccagttctgctaagacccgttttgttacaatgacaatccactcagctactctaagctttggtgtctgaaaagccaggatgatggagaagacattctctaagtttccttccagttctaaaattctctttctcctttcaatcttggcgccacacttcaatctctcccttctcttaatttcaattcctttcattttctggtagagacaaaggagacacgttttatccgtggacccaaaattccggcgccggtcacggactgggaaggcagccttcccttggtgtttaatcattgcagggacacctctctgattatacactcacgtttcaagggtgtcagaccacacagggacacctgccttggtccttcacccttagcggcaagtcccgattttctgaggaagggacaaagggggatgtgtcagggtcacaagacaattgtggggagagggtcagccgacaaacacgtgaacaaaggtctttgcatcatagacaaggagcttgctacacgtgccggaaatctggccactgggccaaggaatgcccgctgcccaggattcctcctaagctgcgtcccatctgtgtgggaccccactgaaaatcggactgttcgactcacctggcagccactcccagagcccctggaactctggcccaaggctctctga

SEQ ID NO: 141585 - DNA, 2910 bp, Homo sapiens
atggcatgggcagcagaagtggagttctattctcagggaactccacaacaagctctagagctcaaggagagcccaacaggggaccacaagggtgccacatgtgagctcaggggtcaacagacacttcatacaggagagctccggctgcatctggtgggtgcccctctgggacgaagcttccagaggacggaacaggcaacaatctttgctgttctgcagcctctgctggtgatagccaggcaaacagggtctggaatggacctccaacaaacgccagcagaccggcagcaaaggggtctgactgttaaaaggaaaagtaacaaacagaaaggaatagcatcaacatcaacaaaaaggacattcacacgaaaactccatctgaaggtcaccaacatcaaagaccaaagacatttgtcacaggagttggaggagaggtctggggtgaacaaggcctctgaagatggggaagatctggacagggatgtgagtgttgccagcaatatagagccttggactgggtggtgtagggctgctcctctccaggccgatctaggtcccaattcttcctcagcctctgctcctccaccctataatccttttatcacctctcctcctcacacctggtccggcttacagtttcgttccgtgactagccctcccccacctgcccagcaatttactcttaaaaaggtggctggagccaaaggcatagtcaagcatgctttaaaaagattaaagcctgttatcactcgcctgctacagcatggccttttaaagcctataaactctccttacaattcccccattttacctgtcctaaaaccagacaagccttacaagttagttcaggatctgcgccttatcaaccaaattgttttgcctatccaccccgtgctcggcataattgggctcacttcctccgtccgtcgggatgccgggcaggacctgaagcgtgaccgcgcggaatttcttcttggtgatgaagttcatcacccgcaccgtcggcggatagccgaagcgcgccgcctcctgctcgggcagcacttcgatccgctccatcgcctcatagggcaggttctggaactcggcgaagcccgatatgcgccgcccgttgagcagcatcaccggctcgcccccgctcgccgaactggtcagcgacttcacccgcttgagcagttcggccaggctgggcgcgcccagcgccgcaatcgcctcggcatcgagcaccgcgaccggctcgaccgccccgatgacggagccgggaatgcgcttgccggtgacggtgacttccgcagggggtgcctgttcgccgggatcggaattcgccctcggtactgtcggtatcgccagtcccaagacgaccgccgaccatcccacgccgcccctcggccgcgcgcgctccccataccgcatcgtccagccactcccatcgccgacgtgatggtgatgtttagtgtggcaatcatgtcacaattaaggctcgtgcttcgccatatcgacggaatatcgcggtggccgcctgccgtggttttcataactgacgtgaagatatggcttgtttacccgtccgacgattgtcgaataaggtcaaacgatcgcgacgacatgcagggagaagcgcccgcgatgagcatgaatgccgccgccagagtgggcgatccgatcggccacagctttagccagggcctgttcggcgaggcgctggatggtttgttctttgcccgtcgcagcgaggtggacatgcgcgcgggcaatctcggccggctgatcgcgcgcgggctgagcggcggacgctggacgccggccgatggccagctgacgctcggatcgcgcgacgtcttcatcaatggcccccccgccaccatgacgatccggtcgaccggccaatgccgccagcatagcggtctgcgcaccgtcacccgcaccgaaaccgattcgatcggcccgatcgaagtccccgccgacgcctattggggcgcgcagaccgaacggagtcttgagaatttccccttcggcgcgcgcgagcagatgccgatcggcatcgtccatgcgctcgccatcgttaaaaaggccgcggcacggatcaatcgcggccatggcctcgcgggcgaaaaggccgatgcgatcgaatcggcggcgcatgatgtgatcgaggggcggcatgacgaccagttcccgctggtcatctggcagaccggctccggcacccagtccaacatgaacgccaatgagtcctccaacgataccttcccgactgcgctccatgtcgctgccgctctggcggtgacgaagcagcttttctccgcgctcgaccggcttcacgccgcgctcgatgccaaggccaaggaatgggattcgatcgtcaagatcggccgcacccatttgcaggacgcgaccccgctgactttgggccaggaattctccggctatgtccagcaactcgccaatgcccgcgaccggatcgaggggacgcttcaccgcaacatcctgccgctcgcgcaagggggcacggcggtcggcaccggtctgaacgcgccgcatggttttgccgaggcgatcgcagccgagatcgccgacgcgaccgggctcgacttcgccaccgcgccccacaagttccaggagcaggcgagcaatcacgggctggtcgatcgtgcacggcacgctcaacgtgctcgcggccttttcctagacgtatttgttctgagcatggtggcctctggggacgaaaagcactgggtcaccctccttgctgctgctactgtgacaagctggcacaaagagaaaggcagtccatggggatctggactaattcactgtggcaatccagcaaacgttgtcagaaaggatttcagcttccctgttggctgtgatcctgaatcaaggaggaaagccactgagtgctcagagtga

SEQ ID NO: 141586 - DNA, 1542 bp, Homo sapiens
ctggttgtcctgatgtctgctctgctctggctgatctcagggcttttatgggcctcagaggggaggaagtgtgtgccgattggtccatgggtggccatgggagtggggagtgcaggagggggactggtgggcagagggctgtggttcctaaatctccagttcaagaaaaaggcaaagagcccttgagtcttctacagtatttcatggtggatgaaaaagaaagatttctcagaattacctcagaacatgaagacaatgataatagcaacaatagtagtaatcatagcagtatcaatgagacaaaagagacatgttttatccatgaacccaaaactccggcgccggtcacggactgggaaggcagccttcccttggtgtttaatcattgcagggatgcctctctgattatacactcatgtttcaagggtgtcagaccacacagggacgcctgccttggtccttcacccttagtggcaagtcccgctttcctggggcaggggcaagtacccctcaaccccttctccttcacccttagcggcaagtcccgctttcctagggggcaagaaccccccaatcgcttatttccgccgcaccccaacctcttatctctgtgccccaatcacttatttctgcaccctgacctcttatctctgtgccccaatcccttatttccctgccccaaccccttctctgctttcctggagggcaagaaccctccgccccttctccctgtctctactcttttctctgggcttgctccttcactatgggtaagcttccaccttccattcctccttcttctcccttagcctgtgttctcaaaaacttaaaacctcttcaactcacatctgacctaaaacctaagcgtcttattttcttctgcaacaccgctgggccccaatacaaactcgacaatgattccaaatagccagaaaacggcactttcgagttctccatcctacaagttctagataattcttgtcataaaatgggcaaatggtctgaggtgcctgacgtccaggcattcttttacacattggtccctccctagtctctgctcccaatgtgactcatcccaaatctttcttctttctctcctttctgttccttcggtctccaccccaagttccgagtcctctgaatccttcttttctatggactcatctgacctccccccttctccccaggctgctcctcgccaggctgagccaggtcccaattctcacttagcctctgctcccccaccctataatccttttatcacctcccctcctcacacctggtccagcttacagtttcgttcctcgactagctctccccgatctgcccaacaatttcctgttaaagagatggctgactatcctgacttcatcagagcaggctggtgcctggccttcctggaatgagtgggtgttctgacaggcccccagtttgtcccatctgcaccgccaagaggtctccgggcggccagaggagcaaagttgccttccaagtgcctgttggtgcctgggagaacacagcaggagtgtcgtgcggcccaca

SEQ ID NO: 141587 - DNA, 974 bp, Homo sapiens
cctacctgcacccaggtgaaataaacagctttattgctcacacaaagcctgtttggtggtctcttcacacggacgcgcatgaaatttggtgccatgactcggatcgggggacctcccttgggagatcaatcccctgtcctcctgctctttgctctgtgagaaacatccgcctacgacctcaggtcctcagaccgaccagcccaagaaacatctcaccaatttcaaatccggagcttgctacatgtgccggaaaatctggccactgggccaagcgaatgcccgcagcccgggattcctcctaagccgtatcccatctgtgtgggaccccacttgaaaattcggacttgttcaactcaccttgggcaagccactcccagagcccctggaactccggcccaaggctctctgactgactccttcccagatcttctcggcttagcggctgaagactgacactgcccgatcgcctcggaagccgcctagaccatcacggacaccgagcttcgggtaactctcacagtggaaggtaagcccgtccccttcttaatcaatacggaggctactcactccacattaccttcttttcaagggcctgtttcccttgcctccataactgttgtgggtattgacgggcaggctttctaaacctcttaaaactccccaactcatggtgccaacattagacaatacgtcgttttaagcactcctttttagttatccccatcgtgccaggttcccttattaggctgaggacactttaactaaattatctgcttccctgactattcctggactacagctgtatctcattgccacccttcttcccaatccaaagcctcctttgcgtcctcctcttgtatccccccaccttaacccacaagtataagatacctctactccctccttggcgaccgatcatgcaccccttaccatctcattaaaacctaatcacccttaccccactcaacgccaat

SEQ ID NO: 141588 - DNA, 1610 bp, Homo sapiens
  misc_feature (1)...(1610): n = a,t,c or g
tttggtgccgtgactcggatcaggggacctcccctgggagatcaatcccccgtcctcctgctctttactccatgagaaagacccacctacgacctcaggtcctcagaccaaccagcccaagaaacatctcaccaatttcaaatccggtaagcggcctctttttactctcttctccaacctccctcactatccctcaacctctttctcctttcaatcttggcgccacacttcaatctctcccttctcttaatttcaattcctttcattttctggtagagacaaaggagacatgttttatccgtgtacccaaaactccggcgccagtcacggactgggaaggcagccttcccttggtgtttaattattgcagggacggcctctctgatcattcagccacatttcaagggtgtcagaccatgcagggatgcctgccgttggtccttcacccttagcggcaagtcccgctttcctggggcaggggcaagctgctcctcgccaggccgagctaggtcccaattcttcctcagcctctgctcctccaccctataatctttttatcacctcccctccctcacacctggtccggcttacagtttcgttccgtgacttagccctcccccacctgcccagcaatttactcttaaaaaggtggctggagctaaaggcatagtcaaggttagtgctcctttttctttatcccaaatcagatagcgtttaggctctttttttatcaaatataaaaacccagcccagttcatggctcgttcggcagcaatcctgagacgttttacagccctagaccctaaaaggtcaaaaggccatcttattctcaatatacattttattacccaatctgcttcccgacattaaataaaactccaaaaattaaattccggccctcaaacccccacaacaggatttaattaacctcgccttcaaggtgtacaataatagagtagaggcagccaagtagcaacatatttctgagttgcaattcctccttgcctccactgtgaggacnaaccccagccacatcttccagcacacaagaacttccaaacggctggaccggcagcagccaggcggttcctccagaacctcctcccacaggagcttgctacacgtgccggaaatctgggcactggcacaagggaatgccggcagcccgggattcctcttaagccgcgtccccatctgtgtgggaccccactgaaaatcggactgttcaacttcacctgggcagccactcccagagccccgtggaacctctggcccaaggctctcttgacttgactccttcccaagatctttgggcttagcaagctgaagactgacacttgcccgatccgccttcggaagccccggagaccatcacggatgcccgagctatggggtaactctcacagtggaaggtaagccctttcccttcttaatcaatacggaggctacccactccacattacctttttttcaagggcctgtttcccttgcctccataactgttgtaggtattgacggccaggctcgnacgcgtgggcggacgcgtgctcgtcccggnnttgcnttctntagggcttcgaggacttacggattttnnccccttgcaaccg

SEQ ID NO: 141589 - DNA, 452 bp, Homo sapiens; identical to SEQ ID NO: 125787
  misc_feature (1)...(452): n = a,t,c or g

SEQ ID NO: 141590 - DNA, 681 bp, Homo sapiens; identical to SEQ ID NO: 125789

SEQ ID NO: 141591 - DNA, 1593 bp, Homo sapiens; identical to SEQ ID NO: 125790

SEQ ID NO: 141592 - DNA, 1567 bp, Homo sapiens
ctggggttgagctcgggttgggttcctcctggggcaggagggaaaggcgggagccagggcgtcagggcctgcggacgatgtgtgtgtgaaagggcgcgtcagccataagaagccatatgcgtgcgagccggtccccaccgtccccgcggcgttgtcaccatcatcatgaggccactggagcagcctcaggcgctgctgccggggggccgggcgcggggtgcgtcgggctctgcaggttggcactcacacccagcacgaatcatggcaggcaagaatagcacatttcaaacctacaagaaagaagtgtgcctcccccgtcattcgatgcaccctggcccctgggcgatccctgctgtgaatgccagaccagattcgggggccgcctgcctgtgtccagggtggaagcagcactgccttactgggtccctctgtccctgagaccccgaaagcagcacccctgctggatgcatgctgctggcacaactgctggcggatctgcggtgatgagtgcctgttgtccaagttccagcagctcccaggcccccctaccaggaccagctaccggctcctgcagcgcgtctgctggccctcggcctcctgaccctcctccaggccatcccgagggtcatcatggccattcgccagtgttttggggtttgaagttgggaatcttcagctactggtccaaaacagccccacaaaaatgtgtcacgattccaagatctttgagagtccacccaatcaggaggcgtctgtgacagtcagctgtcttctcagaacagaatccacacccaggattcaacccaaatgatttctcatcaggtgattcttggttgtagcaaagttcatgtgaatgtgggtgagtttctgttatgaatgtggtcaataaatgttatttgtgaaactctaaactggccacctcttaaatgatgacctctgatttcccttcattaaggggggacttgtccccatgtccgtgtccctgggggagggcagctatttccgagtgtctcttcagggacagcagacccactggatgagggcccgaaaatggtttcagcacctgtgtcagggcttcctgcatcacctcccccagaaaacacttgcgctcaatccttgcctcaggctctgcttttggggtgaactcaagataagacaaggtgagcagatcccatctcaccagtcagggaggaagcgccatcggagcagagacctgaagacaattccaggaaacctggcaatgaaagtggcaagggaggacaggtcaaggcagcggccacagcagcccgtgaccacaggctgcattttggagaaaccactccagctgaagagtgttggatggaatagagtggcaagagtggacacgggaaaccagcttggaggctgcagcaggaaacctggtgggggacgatggtgtctggacctcggtggtggtggcagtggctgtgttccagtcagagctgtagccatcgaatcaaatgacggaggccggaagtcgccgaccagaactgccaggttactcctggtgtctgacgatcctgttacgggctacaatagatcaagttaa

SEQ ID NO: 141593 - DNA, 1892 bp, Homo sapiens
  misc_feature (1)...(1892): n = a,t,c or g
ctgcaactcagctgatggcatgttcaagcttccagttgcccaagtcccaaaaacctacagagtttagggaaaagttgaagtgtgaccccacaatgccagctacctagaaactaaggtagatcctaggtactgggattaaagatatcataaaatcattaaaatgttttctgaaatgtttgaagtttaactcattttatttctaggatttggatttcaacattttaatttctttggaatataagtcactttttgcaagctaaaaaatagaatcaaactaaggtgatctagtcctctaggcatccaggctgatccttcggaatcatcgagcagaatgatcgacatactacaaggtgctagcaatacggctataaactctaaataataaccacctacatgtttcattagggaaacagccaaaagtccggcccgttaaagggaataatctggcaggaacatcttgatttacaaggggacaaaatggatggcaaattatatggctggtcccacctactggggtgaactgggatccaggaatgggtcccaagggacctgttttaaaccgaggggaggtattttaccatttttggaaaaactttgctctgcagggataaaaaaaattcctgggttggctgtcagtaagaaagccagtaaaaaaaatattaccagatggaactcactgatccttggattttactaaggtcttccactggaacatgaaggtagggataagtgtacaggataatatactcagatatttttaaaataaactacttaataataagaaattaagccaggccacattgttccattagctacaagagcaagataggcaatgaaggctatgtaaaagaaatgctcagctttacagagggtggtggcagggcaacaacttttccattacaagaataaaccctctattccttccatgatacatattccctgtgggaaaaaacttgtccagggccccccnggatgaaaaaaatagagcttgtccctaaattagctaaactgtaggttcaacttaaacatctttggggaaggaccccaaaaaatctggcccattattttccttaaaacatcctgcaagctgcaagaaattcccttagtccctccagctaatagtttctgcctagatatccttaaagctgggaacagttcccactgtgaactcctcctcagctatggggtgggtgctagtcattcaaaagtctggaatgttcatccataggaataaaccacggtaaccctttggaatgccataattaaccgaatgccgccaggtgggtaaaatcccgggtaggaacaccagaatgcccaatgatcagcaactggaacggcccggtctgccccccctttgctgatgtagcctgacagcaggagggagccctataataatgaagaaaggcgcccaatcaaaaacagcacagtggcaagtgcgatggcccttataagggatccttaaggaggggttttcctttaaactgaaaggtcaaatgttacccatcgtctgtgctggagagccttgaaatatttcactttactactggggattccagtagcccaggttggtacgggacggcatcataacacgctgacacaggttattctcctacccgtcttcagaccttgcccagggagagaaataagaaccgacgcgaatttagacgtaaaacaaacaaaacgggcttctggaaagaggccaactgtgccaggggggacgaatgccccacacggatgactcggagcttgatttcggcggggagcgcggtctcggacacgcccagagcccgagaggacggttctgtccccgccctgccgcacacacgccttaccggcagcgccgcgccaggccgcccgcacacccagagctcgcccacggttggcagacgaaa

SEQ ID NO: 141594 - DNA, 1751 bp, Homo sapiens
atgaggaaaagccagcgccaaaaggctgaaaattccaaaaaccagaatgcctcttctcctccaaaggatcacaactcctcaccagcaagggaacaaaactggatggagaatgagtttgataaattgacagaagtatgcttcagaaggtgcataataacaaactcctctggaggaagctaaaggagcatgttctaacccaatgcaaggaagctaagaaccttgaaaaaaggttcaatgaattgctaactagaataacaagtttagagaagaacataaatgacctgatagagctgaaaaacacagcacgagaactttgtggagcatatacaagtatcagtagccaaatcaatcaagtggaagaaaggatatcagagattgaagatcgacttaatgaaataaagcaagaagacaagattaaaaagaatgaaaaggaaaaacaaagcctccaagaaatatgggactatgtgaaaagaccaaatctacatctgattggtgtacctgaaattgatggggagaatggaaccaagttgggaaacactcttcaggatattctccaggagaacttcctcaacctagcaagacaggccaacattcaaattcaggaaatacagagaataccacaaagatactccttgaggagagcaacctcaggacacataaccatcaggtttaccaaggttgaaatgagggaaaaaatgttaagggcagccaaagagaaagaaatacaaactgccatcagagaatactataaacacctctacacaaataaactagaaaatctagaagaaacggataaattcctggacacatgcactctcccgagtctaaaccaggaagaattcgaatccttgaatagatcaataacaagttctgaaattgaggcagtaatagactaccaaccaaaaagagtccaggaccagatggattcacagccgaattttaccagagggatgcaagactggttcaacatttgcaaatcaataaatgtaatccatcacataagccgaaccaatgacaaaaaacacatgattatctcaatagatgctgaaaaagcttttggtaaaatccaatatctcccaacatactgcagtatgtttactgtggcaggagcctgtgggcctcctgccactgttgacggtgcccaggctgttcctgccaagaggcacctgcaggccagcgccaagctgccctcagcagcaccccctccagcctccctcccttgcttactggtgcccaaagcccagagggggctgaggggctccacggagcgcacagccacacctgcatctcccctactacagccggcatcacagtccagatgggtttcagctgccatcaattacactgggcctttgaatttttgcagaggagaccacagaggttcatgggtatatgtgcaggtttgttatacaggtaaactgcgcatcacaggggtttggagtacagataatttcatcatccaggctgaaaattccaaaatccagaatgcctcttctcctccaaaggatcacaactcctcacgagcaagggaacaaaactggatggggaatgagtttgacgaattgacacaagtaggcttcagaaggtgggtaataacaaactcctccaagctaaaggagcatgttttaacccaatgcaaggaagctaagaaccttgaagaaaagatagaagacttcctaactaaattaatcagtttagagaagaacataaatgacctgatggagctgaaaaacagcacgagaactttgtga

SEQ ID NO: 141595 - DNA, 1238 bp, Homo sapiens
aaaggaatagcatcgacataaacaaaaaggacgacaacgcaaaaaccccaactgaaggtcaccaacatcaaataccaaaggtagagaaatccatgaagaggaggaaaaaccagcgcgaaaaggctgaaaattccaaaaaccggaattcctcttctcctccaaaggatcacaactcctcaccagcaagggaacaaaactggatggagaatgagtttgacaaattgacagtaggcttcagaagaaaaagcccacggattctcataaagaaaggcttttttaagacggtcaggctccaatgtgcccgatcctttgcagatgattggacctgcatagggaacttcatcatcatcaagtttgtgtcatcagaaaaattaaatgaacaccggccccatctgaaagcaggtgaagtgatgtatcccctcaacggcgtgctctgccaagcagggcaccgcacgcacacctacgtggcttgcattccacgagacatgttgacccccagcttgatcttcaggttcgacctctatgttccagacctagagagccaactctttactgcatccaccaccgatatgttccttgccattgtacatgtccatgtctgcatctccatcttctctgccctctgctccttcttattttccttgaatgaggtcagcatccacccaactggcaaggtccaagcacacgcctcgggaatctcctggtgtgctttccccaacaccaagctgaacatgatgaaaatgggcatcaaagctgctttcctgggatctgagcctccccaaggtcctccatgggaccctaagtccaccagcgaccacacctgcctagaggccaattgcaacagacagggcagtcccatcaaaccttggtcaggccacctcactcctcgactcaaaccttccagtcacgtcatctctctggaggaatcatcaagggatgccatcaccctcaccctcctcatgccatcacaggagttcctacgatgtaactggaaatataccagacactcacattgtggagccaaagtaaaaatcaacagttacccctgtttgtatgagcgtgggaagtgtttctaccttgccatcgagtcatcatcactgactctacacaccgtgtccttacctctagactcccactcaggaccgtatcggttgaaccagatcaatagtgcccttgggttgctgggcctgacgtgcaaagccgtcggctctgataggcttcctgttcccatgcagtag

SEQ ID NO: 141596 - DNA, 5180 bp, Homo sapiens
taaatatggtacaaatatattctcaaaactctgtcatctcagttctttttttttttcctttttccattttgttttttctttctttttcttttttttttttttaatgtcctagcttggtttggtcttgaaaagattcataatcactccaaatgaaatgctcctcccttggccaccaatgtgaagggagggtagaaacctgaggctagacttctgacacaagaagaatctgtcgagagcacagtctcccagtcaataagaaggaaggagagagggggatgagctcgcacccttgagaagaaccttcatgagccaattcccaaagcatcaactccgcatggatactttgcacacacgtcagccgtgtctaatggacacacacacgtgcatacacacgtgagcacacgccgggaccacagacccttatccaaaatatgaaagcagcagctattggtcaatttgaggaactcattttgtaaagaaaaaaaaaatccttcagcctggatgagagaaaaaaaaaaaaccaaaaaaaccatcttgaagctcaacctgtaaaacttgaaattctcctggaacagggctgggtgtttttgttttgttttttctttcgaacttttgttccacaaacaggaagttttgtcttttatactgaagctcagacaccagcaaaaaaaaaaaaaaaaaaaaagaatttgtaaaaacaggtgctttctttccatctgctgggggcgggtggggggaacgaaaaaacacaaaatcctggtttgaaaccgtcgttgccccaaaggagcagcaactgtggaaaccccttgccctccaggttcacagttaaatcctctgcaggactagttaaattggtaaccaaacgagtccaccttaagatgaacagaaatgtataggaacgatctctgaactccattggacatggtagagtcgtgagaatcctgagttttccagaggctttcaaaccagaggaaagcgaaaatgggaacccctgcccgcccccgccacggtaggcactgttaggaaggattggaccgaggcaaggtcagaatccgcccgtttttcttgcctccgttcatgtgtgtgtaagggatgtgttcctcgtagctccgcttgaaacccagcgaggaccctccatcccggccccccgcctcctccctctgacagtgcgaggaacggtccaggggcacattctccatgtcctcaaactccatctccagctcctcactctcgggagccttgttctcctcgctgtggaagaacgacacctctggaaagctggggtgcaggtcgtccttgagcaggttgacaatctccaggaaggttggcctcatgttggggttgaattgccagcacatgcgcatgaggtcagtgactctctctggacagttgtcgggttgatccagataccctccatccatgacaaatttcaacacctgttcattagacaggccttggtaaggctgttctgccaagctggtgatttcccaaaggaccacgccaaaggaccacatgtcagaagaagtggtgaagaccccatccttcagggactccggtgccatccaccgtacagggagcagacccttgccccctttccggtagtaatccgtttcatagatgtctctggtcattccaaagtctccaattttgacagtaaaatcatgggcgaccatgcagtttctcgctgccaggtcccgatgcacaaacttcttggcgttcaggtaggccatcccgtcagcaatctctgccgccatctgaatcatctcttgaagggtagggggagggcggccaggattattctcagcctctggccgcagagaacggaggtagctcttcaggtctccgtgagccatcagctccatcaccaccagcgtgggctggcccttggacaccactcccaggaggcgcaccacgtgatggcaggtgaagcccttcatgaccgaggcctcattgaggaactcaatccgctctcggagactggctgactcgttgaccgtcttcaccgccacgcgggtctctgcctcacccttgatgatgtccctggcattgccctcatacaccatgccgaaggagccctgccccagctctcgaaggagggtgatcttctctcgagacacctcccactcgtccggcacgtacacagagcatggaaacacatcactggcactgagatactcagggtttgaagaagcgtaaagcggtcccagcggcccatctggctgcctctttctcaggaatagataaatacttccaatcacaacactgaagagaaagacaaagatgagggggccgatgataatttttgcaatatttgacgggacgtctaaatagtctgtcacgtagaaataggtgggttccgtccaagagccgttgcccgcaagggaggtggcccggattcgcacgctgtagttccccggtgacagcccacgcagcctgcagccccgttccagagcgaagtgcttgcgggagacgcagagatgcagctcctcatcaccatatcgccgataactcacttcatacagcacgatcagaccattgggctccttcggctcctgccacatcaagtggacgacgttgttctcaaagatttcatgcgtcacagggccaacaatgtcatcagccttggcttcaggcatggtcctcgcactgacgtaggctgccacactgcaccgttcctcaggggtgtcctggttgcaagcctgcagctcgatgcgatagcccgtgaagtgtcgcaagccggagatgaccagcgactccttgttcaccaccttctcaaaaggcctgtgctcctccggactcgtgggcacgctggtcgaggaagtgttggggaaagctgccaccgtgggcacggccaccgtcacattcccaacatcgccaagggacctgcgtttccgagatggcctggggacgaaaaccacgttgtgcaggtaatcctcaaacgtcttcctaaacgaggactcctccagctccttcaggatctgagagtctgtctttggacaggagcagcattcgccggccgaatcctcatactcactctggttgtgcttctgagaatcttcagactcgaatggtggagaccaggtcctcgagggcagcttcagccctttgaggcaataatccagctcgaacagctcactgtcttccgcctgcctctcccagaaaaccaggtagtgggtgatgttgccattggggtcggagggtggtttccacttcagaataatctgggatgatgagttagacactgagattggatccaggggcacagaggggttggtggcatctgtctggacataaatgatgtcactcttggccccataggtccggcgttcatccgaaaaggtgaccagggtcttcacaaagatggcatactgggtccagggcttgagaccccgcatcagccaccctgggtggttctgtgatttggggtcgttggacctcaggggtgggtcaatgtctaccaccgtccaactgttggaaccacatgcatcctgcccgtcgaactccgtcacattctgataaggggcctctttgtagaacagcatgaaccccaagaggtctcggaagtcggggggccagtacggctcccatctcagcaagatcttgtcaaaagatgtccgaatgtaagaaaatttaagtaactcattttcacaggatgcctggtccccattggtcttcagggcaatgtcgtttctctcctggcgccccttggttcctgaaacttcttccatcttgtggatttctgacaagcagagtttggggttatagtggaagaagagtttcccctgagtgatggtgaggttgtgtttgctccagtcccagagctgccttaggttctggttgtccaaggcatagaaggagtagttcccaatttccaaggtctctcctcgaatcagacgtaacttccggaagaaggaaagtgacaccagagcgtaggatcggcggatttttagataccctgaaatttcttcaatgaggccgaggttggcttctagctcagctgccagattgttgcctcctcgaatgttgatgatcagactcccgttgatgacggtgcatcctcggagctcctgggcagacgtcaccgagtcgatggtcttctcgccttctaggaggtggcacaccttgggacagggacccaggcatggggtgcacagcaagttgctggaattcatcgtgtacccggagggacactcagggatgcacttgttgttgtgaatgacgtactggtggcagccctgcctccgcgagttcttgcatttgtggtgcaggtcctggcagaagctgaagttcacacagcgccagtcctggaagtggtagtacgggggcgggcaggtctccacacacctgccgtccaggtagaagttgcggcaggccacgcacttggtggggtcgtcgggctgagaacagttgcccaggcactcgctgtggcaacagaggccttcggcggtgcagccgtgtgacttacagatggtcgggcaaactttctggcagtgactatgagtccaacatcgttcgacaaactgcccgttgatgacggtggcggggcagttggtcttgcccttcgcggtacccggacagatgtctccacactcctcgttgtcatctttgttcaacacgatgtaattatcctccacggaatccaggatacgggaccagtcgatagtggccaagtaacagagctcattgttcttctcgatgcggacagaaccccgggtgatgttcatcaggttgtagaggccgagttccttgaggtgaaccatctcgaagatgaccagcgcgtagttaaagaacagtcgtgatccccggatgaccgtgaggttggggaacaggtccttcaggctctcgagcccatagacccggaagagcagcaagtaatcagtgatcatgatgagtttggggaaactgaggtctcggaaatcttcgggcctcgttttgaacatcaagagtatctgcaagtgtccttcgatgacagagcaattctccagctcatgcaacctagtgaggttgttccggatatccatgccgggacacacctctccggggtacaggtggcccgcggcgcccagtagcagcgcggccaccgccaccagcagcggcgcggccgccgccccccgccggcccccggtgcccatggctgcgggagcgcggggtctcctcggatcagagcgcgcgctcccggt

SEQ ID NO: 141597 - DNA, 6242 bp, Homo sapiens
ctgtggtggttctttttgcaaagagaagaaacggtggattcacgcccattcggaagttcttggtggtgtgtaaggtctttttcacggtttctcctccagactctactctcttagggattgcaacactgtaagcacctgagcattcagctcaggcaccacacctggcccagatgaggtcaccgggctcagagcagcttccgggagttcagtactgaggaccgtcaaatgctttcagggtggaggggacccaagacgtactctcagtgcacctctcttttatattgcttagatgttcccaaagtccatccaggttgttgtgctttgggatctgacgttcttgggtttgcacaataacggttaggatgttcacacccgggagaggaaacgccacaagaggtacacacagagaatcagaggatgaaacacaggtgttcttgaaggcaggctcagagctaggtagctaccagcttatccgaacaggaaccttccagcagacctggtacctgaaccagaccatccataaaacctagtctctcacacactccacgtggcctcacaacatccaaaagtgttagcagcgaacatggcttcattcccagaaatggatgcctttaagaccaaacaaagaggccacttgtgcctgactccctccccttcccggccccacaacaggcagaccaactcatgtccccactccccgccaaccccggggaatagtcaataacttatgaggctaataccagagactttaaaaattaaatatggtacaaatatattctcaaaactctgtcatctcagttctttttttttttcctttttccattttgttttttctttctttttcttttttttttttttaatgtcctagcttggtttggtcttgaaaagattcataatcactccaaatgaaatgctcctcccttggccaccaatgtgaagggagggtagaaccttgaggctagactttctgccaccagaaagaatctttcggagagcacagtctcccagtcattaggaaggaagttagagagggggatgagctcgaacccttgagaagaaccttcatgagcccaattcccaaagcaatcaactccgcatggatactttgccacacacatcagccggtgtctaattggacacatcaccacgtgccatacaccacgtgaagcacacgccggggaccacagaccctttttccaaattttggaaaggcaggcagcttttgggtcaatttggagggaactcatttttgtaaagaaaaaaaaaaatccttcagcctgggatgagagaaaaaaaaaaaaaaaccaaaaaaaccatcttgaagctcaacctgtaaaacttgaaattctcctggaacagggctgggtgtttttgttttgttttttctttcgaaattttgttccacaaacaggaagttttgtcttttatactgaagctcagacaccagcaaaaaaaaaaaaaaaaaaaaaaaaaaaagaatttgtaaaaacaggtgctttctttccatctgctgggggcgggtggggggaacgaaaaaacacaaaatcctggtttgaaaccgtcgttgccccaaaggagcagcaactgtggaaaccccttgccctccaggttcacagttaaatcctctgcaggactagttaaattggtaaccaaacgagtccaccttaagatgaacagaaatgtataggaacgatctctgaactccactggacatggtagagtcgtgagaatcctgagttttccagaggctttcaaaccagaggaaagcgaaaatgggaacccctgcccgcccccgccacggtaggcactgttaggaaggattggaccgaggcaaggtcagaatccgcccgtttttcttgcctccgttcatgtgtgtgtaagggatgtgttcctcgtagctccgcttgaaacccagcgaggaccctccatcccggccccccgcctcctccctctgacagtgcgaggaacggtccaggggcacattctccatgtcctcaaactccatctccagctcctcactctcgggagccttgttctcctcgctgtggaagaacgacacctctggaaagctggggtgcaggtcgtccttgagcaggttgacaatctccaggaaggttggcctcatcttggggttgaattgccagcacatgcgcatgaggtcagtgactctctctggacagttgtcgggttgatccagataccctccatccatgacaaatttcaacacctgttcattagacaggccttggtaaggctgttctgccaagctggtgatttcccaaaggaccacgccaaaggaccacatgtcagaagaagtggtgaagaccccatccttcagggactccggtgccatccaccgtacagggagcagacccttgccccctttccggtagtaatccgtttcatagatgtctctggtcattccaaagtctccaattttgacagtaaaatcatgggcgaccatgcagtttctcgctgccaggtcccgatgcacaaacttcttggcgttcaggtaggccatcccgtcagcaatctctgccgccatctgaatcatctcttgaagggtagggggagggcggccaggattattctcagcctctggccgcagagaacggaggtagctcttcaggtctccgtgagccatcagctccatcaccaccagcgtgggctggcccttggacaccactcccaggaggcgcaccacgtgatggcaggtgaagcccttcatgaccgaggcctcattgaggaactcaatccgctctcggagactggctgactcgttgaccgtcttcaccgccacgcgggtctctgcctcacccttgatgatgtccctggcattgccctcatacaccatgccgaaggagccctgccccagctctcgaaggagggtgatcttctctcgagacacctcccactcgtccggcacgtacacagagcatggaaacacatcactggcactgagatactcagggtttgaagaagcgtaaagcggtcccagcggcccatctggctgcctctttctcaggaatagataaatacttccaatcacaacactgaagagaaagacaaagatgagggggccgatgataatttttgcaatatttgacgggacgtctaaatagtctgtcacgtagaaataggtgggttccgtccaagagccgttgcccgcaagggaggtggcccggattcgcacgctgtagttccccggtgacagcccacgcagcctgcagccccgttccagagcgaagtgcttgcgggagacgcagagatgcagctcctcatcaccatatcgccgataactcacttcatacagcacgatcagaccattgggctccttcggctcctgccacatcaagtggacgacgttgttctcaaagatttcatgcgtcacagggccaacaatgtcatcagccttggcttcaggcatggtcctcgcactgacgtaggctgccacactgcaccgttcctcaggggtgtcctggttgcaagcctgcagctcgatgcgatagcccgtgaagtgtcgcaagccggagatgaccagcgactccttgttcaccaccttctcaaaaggcctgtgctcctccggactcgtgggcacgctggtcgaggaagtgttggggaaagctgccaccgtgggcacggccaccgtcacattcccaacatcgccaagggacctgcgtttccgagatggcctagggtcctcggcaccagtgcctgaagaggtttttctggggacgaaaaccacgttgtgcaggtaatcctcaaacgtcttcctaaacgaggactcctccagctccttcaggatctgagagtctgtctttggacaggagcagcattcgccggccgaatcctcatactcactctggttgtgcttctgagaatcttcagactcgaatggtggagaccaggtcctcgagggcagcttcagccctttgaggcaataatccagctcgaacagctcactgtcttccgcctgcctctcccagaaaaccaggtagtgggtgatgttgccattggggtcggagggtggtttccacttcagaataatctgggatgatgagttagacactgagattggatccaggggcacagaggggttggtggcatctgtctggacataaatgatgtcactcttggccccataggtccggcgttcatccgaaaaggtgaccagggtcttcacaaagatggcatactgggtccagggcttgagaccccgcatcagccaccctgggtggttctgtgatttggggtcgttggacctcaggggtgggtcaatgtctaccaccgtccaactgttggaaccacacgcatcctgcccatcgaactccgtcacattctgataaggggcctctttgtagaacagcatgaaccccaagaggtctcggaagtcggggggccagtacggctcccatctcagcaagatcttgtcaaaagatgtccgaatgtaagaaaatttaagtaactcattttcacaggatgcctggtccccattggtcttcagggcaatgtcgtttctctcctggcgccccttggttcctgaaacttcttccatcttgtggatttctgacaagcagagtttggggttatagtggaagaagagtttcccctgagtgatggtgaggttgtgtttgctccagtcccagagctgccttaggttctggttgtccaaggcatagaaggagtagttcccaatttccaaggtctctcctcgaatcagacgtaacttccggaagaaggaaagtgacaccagagcgtaggatcggcggatttttagataccctgaaatttcttcaatgaggccgaggttggcttctagctcagctgccagattgttgcctcctcgaatgttgatgatcagactcccgttgatgacggtgcatcctcggagctcctgggcagacgtcaccgagtcgatggtcttctcgccttctaggaggtggcacaccttgggacagggacccaggcatggggtgcacagcaagttgctggaattcatcgtgtacccggagggacactcagggatgcacttgttgttgtgaatgacgtattggtggcagccctgcctccgcgagttcttgcatttgtggtgcaggtcctggcagaagctgaagttcacacagcgccagtcctggaagtggtagtacgggggcgggcaggtctccacacacctgccgtccaggtagaagttgcggcaggccacgcacttggtggggtcgtcgggctgagaacagttgcccaggcactcgctgtggcaacagaggccttcggcggtgcagccgtgtgacttacagatggtcgggcaaactttctggcagtgactatgagtccaacatcgttcgacaaactgcccgttgatgacggtggcggggcagttggtcttgcccttcgcggtacccggacagatgtctccacactcctcgttgtcatctttgttcaacacgatgtaattatcctccacggaatccaggatacgggaccagtcgatagtggccaagtaacagagctcattgttcttctcgatgcggacagaaccccgggtgatgttcatcaggttgtagaggccgagttccttgaggtgaaccatctcgaagatgaccagcgcgtagttaaagaacagtcgtgatccccggatgaccgtgaggttggggaacaggtccttcaggctctcgagcccatagacccggaagagcagcaagtaatcagtgatcatgatgagtttggggaaactgaggtctcggaaatcttcgggcctcgttttgaacatcaagagtatctgcaagtgtccttcgatgacagagcaattctccagctcatgcaacctagtgaggttgttccggatatccatgccgggacacacctctccggggtacaggtggcccgcggcgcccagtagcagcgcggccaccgccaccagcagcggcgcggccgccgctccccgccggcccccggtgcccatggctgcgggagcgcggggtctcctcggatcagagcgcgcggcgctggcccgcgggggtcatgctccgaggcggccacccaagaggcgctgggggccgcgcgtccttctcttccacgcccgcgacccgcgggccgcagcccccctgccggggagggcccagaggcagccccgggaagggcgcgcgcggcttcgccagctacaaatactgagcggaggcccttgcggtggtggccccgaccccccggccgctgcggcccgggccccgtcccaggatctcggggcc

SEQ ID NO: 141598 - DNA, 570 bp, Homo sapiens
ttagggataagtctgctcagcaggaaccaagcagactgcctggtgggagaaggccagggtggacgggcctgctgtcctgctctcagtcacttctgctggatgagagcttctgagctgccgcttttgttcaggaccaataagcacagtgagaaaaggtgatgagtgaacaggcggaaggggcatcagcttcccataggagtgaacctctttgggtcccctccctttgtatgggagctctgttttcactctattaaatcttgcaactgcccactcttctggtccctgtttgttacggcttgaactgagctttcgttcaccgtccaccactgctgtctgccgccatcgcagacctgccactgacttccatccctctggatccagcagggtgtccgctgtgctcgtggaaagccataatggaacaaaatggcagatcaaatctgagttattcttgttggcactactgtggcatgcatacagtggtccccccttatccgcaggggataattccaagacccccactggaggccattccccaaacactcctgggtgcttcttcacatttctagccat

SEQ ID NO: 141599 - DNA, 500 bp, Homo sapiens
ctgcacaacccctaccatgccccatttcagcaggaagcaggtagagcggtcgtcagtcaacctccccagcagcacttggggttttccctgttgagagggggtacctgagagacagggactagctgggatttccctaggccgactaagaatcccctaagcctagctgggaaggtgaccgcgtcccacctttaaacacggggctggtaactcagctcacacccgaccaatcaggtattaaaaaaagggctcactaaaataccaatcaggctaaaagcaggaggtaaagaaatagtcaatcatctatcgcctgagggcacagggggagggacaatgatcaggatataaacccagggcattccagccagcaacggctaccctctttgggtcccctccctttgtatgggagctctgtttccactctattaaatcttgcaactgcactctcttctggtccgtgtttgttacggcttgagctgagcttttgcttattgtccaccatt

SEQ ID NO: 141600 - DNA, 444 bp, Homo sapiens
atggtggacacccctctcccagccaggctgccgccttgccattcaatcttggacagctgtgctagcagtgagcaaggctccgtggccgtgggacccactgagccaggcacgggatataatctcctggtatgccatttgctaggactgttggaaaagcacagtattcgggtggcaatgtcccgtttttccagctacctcgctggctttgagcacaacccaggaagaagtttgaaaccaagaaaatggtgtgccgccaaaactgtaaccaaaggagccattatgcttctggaaaaatctcaaggaaaagtattggcagccacagtagtagctgttggatcaggctctaaaggaaagggtggagagattcaaccagttcgtgtgaacgttagagataatgttcttcttccagaatatggaggcaccaaagtagatgacaaggattag

SEQ ID NO: 141601 - DNA, 633 bp, Homo sapiens
atgactctttacgtctgtacccgtattgcctggtacaagggatataacatagtagtggatatgacgttcgatgtggacacagccaacaactatctcatcatttctgaagacctgaggagtttccgaagtggggatttgagccagaataggaaggagcaagctgagaggttcgacactgccctgtgcgtcctgggcacccctcgcttcacttccggccgccattactgggaggtggacgtgggcaccagccaagtgtgggatgtgggcgtgtgcaaggaatctgtgaaccgacaggggaagattgtgctttcttcaaaacacggcttcttgactgtgggttgcagagaaggaaaggtctttgctgccagcactgtgcctatgactcctctctgggtgagtccccagttgcacagagtggggattttcctggatgtaggtatgaggtccattgccttttacaatgttagtgatgggtgccatatctacacattcatcgagattcctgtttgcgagccctgtcgttcattttttgctcataaacgtggaagtcaagatgatcagaacatcctgagtatctgttctgggatcaatccatccgctgccagtgccccaattttttttggaggaagataa

SEQ ID NO: 141602 - DNA, 1257 bp, Homo sapiens
atgctgttggtggccaccatattggacagcccgggtctagaccctttttaccacttcaactctatgtcgaataatgaacgatattcttcattccagctagcatgtgaaattcagaagtcagcagccatgactcttcacgtctgtacccgtattgcctggtacaagggatatcacatagtaggtaaaaacctgtccaatagtaacaatctcaatgatggcagaatgaaatcagaatctgattggattaaaaaggagggaaagggtgtggctaaggtgggtggagacaccctctggtataaaagcccctggcaggcagctctcactccagatctgagctgtccgcagaagcagctggaggccaggggagaaactccagaaggagagacatttgccatggctgagcacttcaaacagatcattagatgtcctgtctgtctaaaagatcttgaagaagccgtgcaactgaaatgtggatatgcctgctgcctccagtgcctcaattcactccagaaggagcccgatggggaaggtttactgtgccgtttctgctctgtggtctctcagaaggatgacatcaagcccaagtacaagctgagggcgctggtttccatcatcaaggaactagagcccaagctgaaatctgttctaacaatgaacccaaggatgaggaagtttcaagtggatatgacgttcgatgtggacacagccaacaactatctcatcatttctgaagacctgaggagtttccgaagtggggatttgagccagaataggaaggagcaagctgagaggttcgacactgccctgtgcgtcctgggcacccctcgcttcacttccggccgccattactgggaggtggacgtgggcaccagccaagtgtgggatgtgggcgtgtgcaaggaatctgtgaaccgacaggggaagattgtgctttcttcagaacacggcttcttgactgtgggttgcagagaaggaaaggtctttgctgccagcactgtgcctatgactcctctctgggtgagtccccagttgcacagagtggggattttcctggatgtaggtatgaggtccattgccttttacaatgttagtgatgggtgccatatctacacattcatcgagattcctgtttgcgagccctggcgtccattttttgctcataaacgtggaagtcaagatgatcagagcatcctgagtatctgttctgtgatcaatccatccgctgccagtgccccagtttcttctgagggaaagtaa

SEQ ID NO: 141603 - DNA, 408 bp, Homo sapiens; identical to SEQ ID NO: 115609
  misc_feature (1)...(408): n = a,t,c or g

SEQ ID NO: 141604 - DNA, 398 bp, Homo sapiens; identical to SEQ ID NO: 115610
  misc_feature (1)...(398): n = a,t,c or g

SEQ ID NO: 141605 - DNA, 740 bp, Homo sapiens
ttttgtcagtttaggaaggtcacatttatagacaaatccaaacaaggtactttgctatcctctcttttgttcacagacagacaagataaacctaggcagagagaaaacttgcctcaatcttggattaaatgcagaggtctgcttgaacattccaaggtcaaactaaaagtctacaagagcaggagacttgattcaaaacagctcggctctgactgggtttcatgtgggcagaggggactctctcgacactaagatgaccacagctcacatagaggtgtcagctgaaatatggaggattaccactactgtagaagatgtcctggatcccttggcccatggtctctcacaggctacagtaaaggtagccctcagttccttgccatgtgggcctctccgtggtgcagctctcaggatggcagcagaatttatcagagcaggtaagtgaataaagccagaaaaagagtatgagcaagacaaaatccacagtctttgtcacctaatctcagtgacattccatcatgtttgccataccctatttgtcagaagcaagtcgtttgctccatcccacactcaaagggaggggattgcacaaggctgcgtattcctggagatggggtcattgagggccatttcagaagctgcctgccatacttccctccacatgtacctgcccattcatgtgtgacccaatagagatagttgacctgcacactctaatgaagttacatgggtacttactt

SEQ ID NO: 141606 - DNA, 2745 bp, Homo sapiens
atgatgtcattcaatggagttggaaagcaacgtacagaagcacatggttatacagtgcatccaccacacagatgcagcaaatccccacctccgaatgccatcacattggggattagggcttcaatgcatgaatttggaaggacagtccataacacactctctgccttgtcatcaagtaggggaagtgagagtgagagggaaggagccaggactgagagtgccaatgagcaggtgatacgggacattggcagtgtctgcaacaagctacttcagaatcctgaggggagctggccctgtgggtcttggtggactggatgcatggacagcattcctggagggatctggatcacagtagtgttttttctaagtgtggcatatggatcacaggtggtacaaaagaatttgcacggaaataataacaacaaagcaaatgcaataaaggggtctcttttcaatgcagataggaactataagggttggctatttgcagaagaggtcactggaggagcaggtcattatgttttaatatcacacagaaatgcagtaaaggagtctggcatgtcagggagaatcatcaggaatgcttccaagaagccgggagaattcggaggctccatcccggaggcactggggtccgggacgcgggaaaggcttggaaatgtgcgacgcggctgtgtgcgaacgcgtggactaggtcttggctcgctgggagggaagggctgggccggcgctggggaggaggaagggagggaacgggtaggaggaggggaagcgcagtataaaagtcccggccggactgagcgtccgctactccgagtcacttcggtttctaaagcagcccaggcaccaccccacccacccacagccccgagcctcagtgtgcacaagggctctacccgcgcccgtcacagcgacctcggcagcgggcacttggtacagcccggcaggctgacgctgccgccgagggcgccccggctaccgccaaaccgtgacaacctcgctgcggcgccgcggccacatctggggcgcccatgtgcgctcgggggctcggctgcgcccgccccgccgccgaccccgcagccccctgccagcagggtggcctccggcccggcccgggtcccgggctgtcccgggacccagtctccgtctccgccgccgccgccgccaggcagcgccggggcttgctccgcagccggcttggacacccccggcctcgcggtggctccgccgtggtgcggcggcggcggcggcggcggcgccggcagctcctgctcccccggccccgcacaccccgccgcgcccagcgccagccccgcgggcccgggaagcggagccctggcgggagccgaggcgggagccgcgctgccgggctcccgggctcctactcctcctcccccggcgtcaccgccgccgccgccggccgccgcgccgggtcctaaagccgcgcgtctcaaaaggatggtgcgcctggcggccgagctgctgctgctgctggggctgctgctgctcacgctgcacatcaccgtgctgcgcggctcgggagccgccgacgggcccgacgcggccgcgggcaacgccagccaagcccagctgcagggcctgcttctaggaaaacccacactaagtgaaccacacccaaatggtagtcatggtaataatggatactcctctaggaggaaggggaagaaaaagtcaggagttagccatggaaccaagaagatccaggagaaggttgaggggatgttcagagaagtggaaaatgagagattgattatcatggaggaaaagcccgagaagaagggagtgtttgtctattaccacatctccagtgtaggcactggtgattcatctgcaggtcagaaagagagccctgttagccagtttaggaaggtcacatttatagacaaatccaaacaagaacttccatgggtccggaattcagacacagcttacctggatcccttggcccatggtctctcacaggctacagtaaaggtagccctcagttccttgccatgtgggcctctccgtggtgcagctctcaggatggcagcagaatttatcagagcagagatcaatccagtcatttttggcctgcaaagccctggggatttctttcacccagtagttgaatggtggacctttttggagaggctggcaatggtggtgttggtcctttctctgtattctgagcactctctttacactgagattgttggaagaggtattcactctccccgacagctgtttacacccctagaccctcacaggaggacaaacccaagggaagtcctgctcacaagccgtggttctccatactggttccggcttgtcagtgcattagaccaacatccggataggggcctcttaaagaagggagacacagaatcactgcaggagatgttcgccttctggtgtcctgttcgacacccgttccctctggtcgtaggaggacttagatacttgggccttttaggtgcactaatgatctggtgcctcttcaaattgggtcctggaaaccgagtcctagacagttaccactctgttttctttgccggtaatggagaaagcacaacttggaaaatcaccaataatccacactcattaaatatttgctcaaagtttgacttaaaggggtggctgaactctaacagggctgaagaggagggatggaagccccctggtggccactggtggcctggcctttatagccctgagctggttagctgcagcctggaaggctga

SEQ ID NO: 141607 - DNA, 747 bp, Homo sapiens
atgaaagaccaccccaaggcccccaccgccgctccagcgccacgcagccaccgccgccgcagcctctccttagtcattgccatgatgactgcatccaactcgcaggtgcgccagaactaccaccaggactcagaggccgccatcaaccgccagatcaacctggagctctacgcctcctactttaacctctccatgtcttactactttgaccgtgatgatgcggctttgaagaactttgccaaatactttcttcaccaatctcatgaggagagggagcatgctgagaaactgatgaaactgcagaaccaacaaggagggagcactggaatgtttaattcggacaatgccaatacaagtttacagagaagagagaactttccattgggttttgaaggttctgctgattttcaatgggcagaggtggaggaacagtctgagcagagagaacatcataaacaaaggagtgaatgtgagaaaggctgctcagtcaacctggtcactgtgatatcctcagtgctaaggacactggaagcgggagtcagaaagcatttacctggaagcagtctggagccacaaactctagagcccacaagatccacacagggagtacgagtgagtggaatggtccaggggatggtggatgagtcctcccagaaagcaatatcaggagagcagcagcctcacctgtgtttcaattgtgtctttactcagcaactagaacagtgccatctacatagtccatcataa

SEQ ID NO: 141608 - DNA, 2183 bp, Homo sapiens
catcaaaagaatgaagaacataagaaaaggtaactacatcagtaaatatattgcttttttcttcttatttaaatgctttaaaagagaattgattgtttaaataaaaatatcaatgtaggctacatgcagtggctcacacctataatcccagcactttgggaggctgaggtgggtggatcacttgaggtcagaatgttcaagaccagcctggccaacatggtgatctttgtgtctattaaaaaatacaaaaataagccaggcgtggtggcgggcacctgtaatccagctactctaaggctgaggcaagagatcacttgaatccaggaggcagaggctgcagtcagccaaaattactccactgccctccagcctaggcaacagagtgagaatctgtctcaaaaataaaaataaaaataaatcaatgtagtatcagacttatatgtagaaattaaatatttgacaaaataacatgaaattataaggagagaaattaaaatttattattttaaggttcttaatatacaaactagtatattatcagttgaagatagtctgcaataatttaaagctatatactataaacactaaagcaaccattaatatagcaaaattgaaaatatgaagttaatagggcaacaaaggagataaaatgtaattttaagaaatatacaaataattacaaaaagacagcataatagtaaaagagaatgaacagataaaacaattataaaacaaacaccaagctgagagacttaaacctaatcacacgataatcacactaaatgtaaatggtccaaatacccccatcaaaaaggagagactttcaaatagataatgaaaattcaagacctaaccacaaaaaaaacacacttagaatataaagtcacagatagggtaaaagtggaagaatgacaaaagaagagacattcttcaccaagagtcctcggggtttcctgcttcaacagtggcttggacggaacccggcgctcgttccccaccccggccggccgcccatagccagccctccgtcacctcttcaccgcaccctcggactgccccaaggcccccgccgccgctccagcgccgcgcagccaccgccgccgccgccgccgctctccttagtcgccgccatgacgaccggggtccaccttgcaggtgcgccagaactaccaccaaggactcagaaggccgccaatcaaccgcacagatcaacctggaagctctacgcctcctcacgtttacctgtccatgtcttacttactttgaccgcgatgaatgtggctttgaagaactttgccaaatactttcttcacccaatctcatgaggagaagggaacatgctgagaaaacttgatgaaagcttgcagaaccaacgaaggttggccgaattcttccttcaggattatcaaagaaaccaagacttgtgatgactggggaagagcggggctgaattgcaattggagtgtgcattagcattttggaaaaaaaatgttgaatcaagtcactactggaacttgcacaaacttggccacttgacaaaaattgaccccccatttggtgtgactttcattggagacacatttaccttgaatgagcagggtgaaaggccatcaaaagaatttggggtgaccacgtgaaccaaacttttgcgcaaagatgggaagcgccccgaatcttggctttggcgaatatctcttttgacaaagcacaccctggggagacagtgataatgaaagctcaccctggggctaaatttccccatagcccgtggggtgacttccctggtcacccaaggcagtgcatgcatgttggggtttcctttaccttttctataagttgtaccaaaacatccacttaagttcttttgatttgtaccattccttcaaataaagaaatctggtacccaggtgttgtctttgaggtcttggatgaatcagaaatctatccaggctatcttccagattccttaagtgccgttgttcagttctaatcacactaatcaaaaagaaacgagtatttgtatttattaaactcattagtttgggcagtatactaaggtgtggctgtcttggattcagatagaactaagggttcccgactctgaatccagagtctgagttaaatgtttccaatggttcagtctagctttcacagtttttatgaataaaaggcattaaaggctg

SEQ ID NO: 141609 - DNA, 547 bp, Homo sapiens; identical to SEQ ID NO: 141242

SEQ ID NO: 141610 - DNA, 825 bp, Homo sapiens
  misc_feature (1)...(825): n = a,t,c or g
gggggttcccatatcttttattaacagtctcccctccagaagcagtgagtgccacagagaaataaaactgagactgaatctccagcagccagatgggcccaggtgtctcatcttctccaggcctgggtgtcagcccagcttgataaacagcagcaaagtggcaagaattcctggcaactgtatcactgcagctcccagagagctcccactcagggtgaagctctgagtcttggtgatttttaggagtttatcgaaacagcccttctggtggatgacgtttggagacacatcgcgtccgtcacaggacacacttccgatggatttacagcaactcctggggtaggtgtggcccgttgtcatttcgaaggaagagccagaaaaatctgtgtagttattcaccccacagcactttagcttctccatgaccaagttccactgtgtagaatagtcgtctggctcgttgtaacctctgtaattcttcctcagggtcacgaaggtgtgttccaaggccacatctccaacaaacaagagcgtgcctctgctctctntagtcgctccataccacccggcacagccaagcagtaccgtgatgcatcccatcaccaggcacaggttgccaacgtgaaggatgtatgcggaggacagnccgatgacattcgtcagagaagcccctgcacatttaccaccgatgcgcagccnanctaggatgatgccagacacagccacgcaagccattgagtaaacgatacagtntcttccaggacgaatacngagtgtggatttcagacatgctgaacagactggggcaccctngaccattaagta

SEQ ID NO: 141611 - DNA, 570 bp, Homo sapiens
ctagttggcctgggcattggtggtaaatgtggaggggcctctctgacgaatgtcctcgggctgtcctccgcatacctccttcacgttggcaacctgtgcctggtgatgggatgcatcacggtactgcttggctgtgccgggtggtatggagcgactgtcccggatctcctgggccagcagctgcaggcagcgagtggtgcgggcccgctgcatctcctcactgtcacgcagggtcttctccagcccctgaaggccttgggtcagggccccatacagctcctgccggccctgctccatgccccacttgtgctcctccttctctccctggcggcctgtggggctcagcacctcttcaagctgctgaatcttgatttgctgcaagcagctctccttctccaacatggtcactgagtggttcaggaactcgaaagccttggtctgggcctgtaactggctcttgagtgactcaagttcacatcgcaggagcttctgggagtcgggaatcatcacaatggtcttggctgaggtcaggagttcgagaccagcctggccaacatggagaaaccccat

SEQ ID NO: 141612 - DNA, 1014 bp, Homo sapiens
atggcatcagctggagacacccaggcaggcccacgggatgcagcagatcagaacttcgactatatgttcaaactgctactgataggcaacagcagtgtgggcaagacttccttcctgttccgatacgcggacgactccttcactcccgccttcgtcagtactgtgggcatcgatttcaaggtcaagaccgtctaccgccatgacaagaggatcaagctgcagatctgggacacagcgggccaggagcgctaccgcaccatcaccacggcctactaccggggagccatgggcttcctgctcatgtatgacatcgccaatcaggaatcctttgccgctgtgcaggactgggccacgcaaatcaagacctactcctgggacaacgcccaggtcatcctggtggggaacaagtgtgacctggaggacgaacgtgttgtgcctgctgaggatggccggaggctcgccgacgaccttgccgcatctacagcctcgcgcgtctcctggcggcggcccgtggaagcgcggccctacgtgccggggctgggccaggactctccctgccaaacacgtccaaatgtgcccgggtgccccagggaccccgcccagccgctaaagtgctgtggggtgaataactacacagatttttctggctcttccttcgaaatgacaacgggccacacctaccccaggagttgctgtaaatccatcggaagtgtgtcctgtgacggacgcgatgtgtctccaaacgtcatccaccagaagacctgcggcaagtccttcaagaggaagaaccacctggaggtacatcggcgcacccacaccggcgagacccccctgcagtgcgagatctgtggctaccagtgccggcagcgcgcgtcgctcaactggcacatgaagaagcacactgcggaggtgcagtacaacttcacgtgcgatcgctgcgggaagcgcttcgagaagctggacagcgtcaagttccacacgctcaaaagccacccggatcacaagcccacctga

SEQ ID NO: 141613 - DNA, 974 bp, Homo sapiens
ctcagatccctatcatcttgggaaacagtagcccagaggttcaggaagatgttaacttaaattttcggggtgccccagtctgttcagcatggctgaaatccacactccgtattcttccttgaagaaactgttatctttactcaatggcttcgtggctgtgtctggcatcatcctagttggcctgggcattggtggtaaatgtggaggggcctctctgacgaatgtcctcgggctgtcctccgcatacctccttcacgttggcaacctgtgcctggtgatgggatgcatcacggtactgcttggctgtgccgggtggtatggagcgactaaagagagcagaggcacgctcttgttttgcatcctgtcaatggttattgtcctcatcatggaagttacagctgccacagtggtccttcttttctttccaattgttggagatgtggccttggaacacaccttcgtgaccctgaggaagaattacagaggttacaacgagccagacgactattctacacagtggaacttggtcatggagaagctaaagtgctgtggggtgaataactacacagatttttctggctcttccttcgaaatgacaacgggccacacctaccccaggagttgctgtaaatccatcggaagtgtgtcctgtgacggacgcgatgtgtctccaaacgtcatccaccagaagggctgtttccataaactcctaaaaatcaccaagactcagagcttcaccctgagtgggagctctctgggagctgcagtgatacagttgccaggaattcttgcccctttgctgctgtttatcaagctgggctgacacccaggcctggagaaaattagacccctgggcccatctggctgctggagattcagtctcagttttatttctctgtggccctccctgcttttggaggggagactgttaataaaagatttgggaaacccctgaaaaaaaaaaaaaaaaaaaa

SEQ ID NO: 141614 - DNA, 411 bp, Homo sapiens
atgggcttctctagccctggcccttcccgcgggacgtccagcctcctcctctcggcgtggctgattgctcttcctccttcgtctgttgcacgtggaaggtcggagggcgtggctgtgaagctcccgttcctcctcatggcattgattgctgtccccttcgcacccgctgaccgcgcccccgccgcgcccgccgcgcccgccgccgaccagggctcctggtgcctgtgccagctcaatggggccgccgacctcgaagtttccgaaggacctcaccctgcccggggacgcggccctcgggtgcgggactcccgcgactggaggagagggcgcgtcttcgcgggccagaagcgagactcagagagcccgggcaccgaccccggggcggtcctggggcagggctggctctgctag

SEQ ID NO: 141615 - DNA, 888 bp, Homo sapiens
atgagccccacaagagaagcaccttatcttacactctattgtaccctcagtgcttatggcagtgcctggcccatggtgggcctcagtaaatacctgcagaaggagaaattcctgaatgaacacagagaggactttagcaacgcattcggccttggagaagataaaggaggaaattttctaaggctctcacctccctctagcggccgccaaggacatcacacacgccgagcggaagccctgctgggcggtgctgccggctccaaccccggaaaggccacgtccgagagagctcacctactttctcctggaggggctgcgctggtaagtgaagagtctaatgctgataagcgtgtggaaaattggcctctgatgcagtctccttggcctacactaagtataagcactctttatctcctgtttgtgtggctgggtccaaaatggatgaaggaccgagaaccttttcagatgcgtctagtgctcattatctataattttgggatggttttgcttaacctctttatcttcagagagttattcatgggatcatataatgcgggatatagctatatttgccagagtgtggattattctaataatgttcatgaagtcaggattcaattccatgtgaccattgggcacacggcactgtctctttacactgactgccccttccccaaatggatgcactgggctctaattgcctatgcaatcagcttcatatttctctttcttaacttctacattcggacatacaaagagcctaagaaaccaaaagctggaaaaacagccatgaatggtatttcagcaaatggtgtgagcaaatcagaaaaacaactcatgatagaaaatggaaaaaagcagaaaaatggaaaagcaaaaggagattaa

SEQ ID NO: 141616 - DNA, 1203 bp, Homo sapiens
cactgtgctggcggctgggccttctccacctcctcgtctttctgccgggaaccttgacgacgccttccgcttggccctgccttctgccgcatccccgccgccgcggcgccttgaggagcaggagaagacgcagccgggccgccgccgttagaggggttcccggccgccgctcgccccgtcggccgccaccgcctccggggtcagccctctctctgggtctccgctttctcctgccgccagcgcccgctcatcgccgcgatggggctcctggactcggagccgggtagtgtcctaaacgtagtgtccacggcactcaacgacacggtagagttctaccgctggacctggtccatcgcagataagcgtgtggaaaattggcctctgatgcagtctccttggcctacactaagtataagcactctttatctcctgtttgtgtggctgggtccaaaatggatgaaggaccgagaaccttttcagatgcgtctagtgctcattatctataattttgggatggttttgcttaacctctttatcttcagagagttattcatgggatcatataatgcgggatatagctatatttgccagagtgtggattattctaataatgttcatgaagtcaggatagctgctgctctgtggtggtactttgtatctaaaggagttgagtatttggacacagtgttttttattctgagaaagaaaaacaaccaagtttctttccttcatgtgtatcatcactgtacgatgtttaccttgtggtggattggaattaagtgggttgcaggaggacaagcattttttggagcccagttgaattcctttatccatgtgattatgtactcatactatgggttaactgcatttggcccatggattcagaaatatctttggtggaaacgatacctgactatgttgcaactgattcaattccatgtgaccattgggcacacggcactgtctctttacactgactgccccttccccaaatggatgcactgggctctaattgcctatgcaatcagcttcatatttctctttcttaacttctacattcggacatacaaagagcctaagaaaccaaaagctggaaaaacagccatgaatggtatttcagcaaatggtgtgagcaaatcagaaaaacaactcatgatagaaaatggaaaaaagcagaaaaatggaaaagcaaaaggagattaa

SEQ ID NO: 141617 - DNA, 1365 bp, Homo sapiens
ctagtcaaacacctccagcctgtggctgcctgcactcaatccggtagggtctgggactcctccaatgtctgctgacctaagtgttggctcatctctggggctgttgccaacctgtctctgatcaaggctcttcccactacaactgtactgctccccaccctcatcttttgccactgctgcccaagctgcagcgtcttgctcggggcctgcctcatcactgctgacagctgctgttgccgcgactgctcctggtaatggatctgctctcttgctgctggaaggagccaactctcctgctcccgccgtccctccgctgaagaccgtgcgccccggagtgggtctaacgcaaccctgagctcgggttctgcagaggaccgggtcccctgcccctgcctgcaggtctccagctccctcagtccacagcatcattatcttgtctgcagctgggtagtctggctcttcatttattcttccaaacatggctagcatcacagatcccttgcagttgtacagggcctcacactcagaagggcccaggtttgttttaatactctgccgtgctatcttgaaagtcttaattttacttttgaacctatgatttgtaggtgatgtctgctgggacaatggcgcacaagcagaggagatattcatcagctgtacatctgctgttccttgctgccccacaagcccagaattctggttgtggcttccagcctcctcagatcccagcacacagccccgccggacttcccccggagcggtctccaagagtgggcactgcgtgatctgattcactccaaatctggctgtcccccgggagtggggtttggccgtaggggctccccggcagcgccaggcagagtctgagcagcagccgccgcctgcacgcagagttaggagccagcctccgccgccgcctcctccgtcctgtactcgagtgacgcacagacaccccccgcccacagcccagacgccccctccctcgctgccaccccgacccgtctcggagctggactgggtgccgacttcttcgcagaagggtgagtgctgtgctgggttgggtgaggaggatctgaaaaaatgtggtggccggtccacttgccgtgatgtgtaagtcttgtatgggaaacgtttattcatggctgtgcagttgaccatactcattgctggatcagggtgtattcttgtcttcagacaatcaagcaggtaaaaaccagtcgagactaagcagttggactgactcaatttctctttttcgtctctgttgagaaatgttttaactgtgtttcttgcccctacttcttggtctaccaagcagttaagcagttttgttgttttagtgccgctgaacgtgaactggtgcat

SEQ ID NO: 141618 - DNA, 401 bp, Homo sapiens
gcggaggcgacttccatctcccgggcaggatgcgtgcggttttctgccgtccccgggagcacatgacgcctgggaagcagtggccgggaggtgattcatccgggcgagcggggcctggaaaacaatgtctgtcttgaagctccgggaaccaggaaaatgagctggaaatgaacaagactgccaatggagactgccgcagagacccccgggagcggagccgcagccccatcgagcgcgctgtggcccccaccatgagcctgcacggcagccacctgtacacctccctccccagccttggcctggagcagcccctcgcactgaccaagaacagcctggacgccagcaggccagccggcctctcgcccacactggaccccgggggagcggcagcagaaccggcc

SEQ ID NO: 141619 - DNA, 504 bp, Homo sapiens
aattttactttcagtttgggggtacatgtgcaggtttgttatataggtaaacttgggttgtgggtgtttgttgtgcagattatttcatcacccaggaattaagcctagcacccattatttatttttcctgatcctctcccacctcccaccttccaccctctgataggccccagaatgtgcttttcccctggtttagctctgtgtccccacccaaatctcatcttgaattgtagctcccataattcctacgtgttgtgggagggaccaggtgggaaataatttgaatcatggggtcggtttccccatgatactgttcttgtgatagtgaataagtctcacaagatctgatggttttatcaggggtttccgcttttgcatcttcttcattttctcttgccaccaccatgtaagaagtgcctttcacctccctggtcatgattctgagatctccccagccacatggaagtatatgtccaatgaaacctctttttcttcccagtctca

SEQ ID NO: 141620 - DNA, 402 bp, Homo sapiens
tttttttttttagtttataaaggaaagaggtttaattgattcacaggtttgtagggctggggatgcctcaggaaacttacaatcatgacagaaggggaagcaaacatgtccttcacatagtagcaggaaggagaagtgccaagcaaagggggaaaattcctttataaaactgtcagatcttatgagaactcactatcatgagaacagcatgggggtaactgccccctgtgatttaattaactcccattgagtccctcccacaacacgtggggattatgggaactacaattaaagatgagatttgggtggggacacagtcaaaccatatcaccatacatctggcaaagggttaatatcccaaatatataagggactcaagtaacccaatagcaataaaacaac

SEQ ID NO: 141621 - DNA, 855 bp, Homo sapiens
agcttactaatggtactcaacaagagactatcaaatactctaaaagctcaatgtgacagtgaaaaatatcctggaggggaccagcatccccagaagatgttaaaatggattttatttgaattattgctggaccagggaactcagaacactcctgaacttgtggcgtttgtggcccatcaggaaataaggattaagatgctcataaaatatttgttggccacctactatgaggactgcattgcccaatgcatcttgggggatgcacaagactgccccctgctgccagtccagagagcacgtgcactgccccatgacacccactgctccggggttccaggaacaaggttaaggttctactacaaagacagtcatggccaaggcggctgggcttttggggtcaacatcagagagagggagaagaggaggaggaaaactggagagctcagagttccaggaaatgccaccaaccttccgtcaggttccctgtggccctcaggaacatctgtcagccctggggtccacatatctcctagccagctggacaacaggggtcatctggaatccctcttctacattcagggccagatctcggccaggtaccactttggctctgtggcattgggtataaaggaaacagcactggacttggggcaagacgctcccaattttggatccgggctctaccagccaccagctctctgtgggctagctcgtttctcaggactcagtttccccgcaggaaaatacatctctccattttaccaccaaccatacagaggttatcaaggatacataaaacaactggaaagcacagacccagaacctggcaccgagcagggcctcaggaaatgttaa

SEQ ID NO: 141622 - DNA, 491 bp, Homo sapiens; identical to SEQ ID NO: 134161

SEQ ID NO: 141623 - DNA, 1350 bp, Homo sapiens
atgctgaagtactacagcacgcatttaccaccgtctccccgggacctggtggaggcgtctgtcacagtccctggtgaaggacacctggagtgccttcatggggcctgtagccccagccctggtcccacccccacccgcgaagctgctctcaggggagaacccagaatacagaccctgccggtggcctctgccctcagcagtcaccgcaccggccctcccccaatcagccccagcaagaggaagttcagcatggagccaggtgacgaggacctagactgtgacaacgaccacgtctccaaaatgagtcgcatcttcaacccccatctctccagcgtcctcgcattccgctcgttccagtcagcttggactgttgtgttcagtcataagacactgacagagaaaagtcttaagaagatgaatgtctgtttggaagttgaaaagtactctgtgtttggaaagagtggattaaaggatgggaagaggtggagtgggattcatcttgtggaaaaatcactcctcactctggatttcagctgcgtggcactctattacctgcatgcatcaaagctcatccaaccagtcccctgtgtttggacattttggcaatttcaggctttgcagaactttcagcggtataccggcatacagcatgtgcatcgcataggaatggcggaacgtatgtggtgtgaccggaacagagaacgtcacaccgtcagcagcagcggcggcaaccgcctccccaatccagaacattttgaggcatttcagtcagttgctcaatgtacctataaccagaccgttcagctggatattacggcctttttaaagaccgtaaagaaaaataagcacaagttttatccggcctttattcacattcttgcccgcctgatgaatgctcatccggagttccgtatggcaatgaaagacggtgagctggtgatatgggatagtgttcacccttgttacaccgttttccatgagcaaactgaaacgttttcatcgctctggagtgaataccacgacgatttccggcagtttctacacatatattcgcaagatgtggcgtgttacggtgaaaacctggcctatttccctaaagggtttattgagaatatgtttttcgtctcagccaatccctgggtgagtttcaccagttttgatttaaacgtggccaatatggacaacttcttcgcccccgttttcaccatgggcaaatattatacgcaaggcgacaaggtgctgatgccgctggcgattcaggttcatcatgccgtttgtgatggcttccatgtcggcagaatgcttaatgaattacaacagtactgcgatgagtggcagggcggggcgtaa

SEQ ID NO: 141624 - DNA, 451 bp, Homo sapiens
ctgggtaatttgtaaaggaaaaaagtttactgtgactcacagttcagcatggctggggagacctcacaatcatggcagaaggcgaaggaggagcaaaggcacatattacatggcggcaggcaaaaggcacgtcttacgtggcagcaggcaggagagtgtgtgcacagaaactcccctttataaaaccatcagatcttgtaaagacttattccagtacccatgaagaacagtatgggggaaaccaccccccatgattcaattatctcccactgggtccctcccacaacatgtgggaattatgggagctacaattcaagatgagatttgggtggggacacagacaaaccatatcactgtagtatgaagtgccttggctatgtggcagttgggcagagccaaaggaagatgacacctcttagacaggatgatgtgtctgtcctgatgaagtcct

SEQ ID NO: 141625 - DNA, 3583 bp, Homo sapiens
cgtgtgcgcgtgtgcgagtgtgaagtgcagcgctggagtgcaacatgctgtaatgggaggaaacccagcggcgtcggagcgcccgggaccgccgcggccgttctgagcgcagtggcgccgagcagcccctcccgcagccggtgtgacctgtcccttcaggctccaaccaggaatggagacgccattggatgttttgtccagggcagcatctctggtgcatgctgatgacgaaaaacgcgaagctgctctcaggggagaacccagaatgcagaccctgccggtggcatcatgccctcagcagtcaccgcaccggccctcccccaatcagccccagcaagaggaagttcaagcatggagccaaggtgacgaggacctagactgtgacaacgaccacgtctccaaaatgagtccgcatctttcaaccccccatcttgaacaagactgccaatggaagacttgcccgcagagacccccgggagcggagccgcagccccatcgagcgcgctgtggcccccaccatgagcctgcacggcagccacctgttacacctccctccccagccttggccttggagcagcccctcgcactgaccaagaacagcctggacgccagcaggccagccggcctctcgcccacactgaccccgggggagcggcagcagaaccggccctccgtgatcacctgtgcctcggctggcgcccgcaactgcaacctctcgcactgccccatcgcgcacagcggctgtgccgcgcccgggcctgccagctaccggaggccaccgagcgccacctgtgtctgactgcctgccttcctgcttgcctgcagctgccaccacctgtgaccccgtggtggaggagcatttccgcaggagcctgggcaagaattacaaggagcccgagccggcacccaactccgtgtccatcacgggctccgtggacgaccactttgccaaagctctgggtgacacgtggctccagatcaaagcggccaaggacggagcatccagcagccctgagtccgcctctcgcaggggccagcccgccagcccctctgcccacatggtcagccacagtcactccccctctgtggtctcctgaagggagcgcctcctccaacaacacgtggatctgcatggtttgcctgagctttgaacagtcagtacttaaaaaaaaaaaaatcatgggggtggggtggggggaagggaagggatggtttatttgcaaaaaccatgttgttgggatttgtgttctgtttttgtacttgcttggtatccgtacaagggggccctcaaacatgatagcaggaactacgcgtggaacatctgtctaatgtagcatccttacttcctgcctcagttaccaaagaaacctctgatgcaggtctgctgccccgacggggccaggactccacagcgctttctcagtcacaagccatgatgaattggtgactcagacgctttgtgctttttcctttgcttcttgagaccggggtgtgtgtggctcagcttccacggcgtgtttggttcggtccatgtgtgtgcgtgtgtatacttgaagagaactgtcgtgtctgatttgcactattggaggaggactaaagttgcgtgacaactttatgtgttatgccagaactctgagggcaaactgctgaaaaacaaagggtttaaggatgacatttctgaccatttgtgtgtttgttgttgttactgtttttgttttttttaatgtagacaatacagctttggaaggggaagtctcatacaggttataggtctttctctctctagatttcaggtgcttgcaactggactgcagactctaccaatcacgggcattttatcttctctgaacactgcagtttgttagactagagctgaggttggaggattccatagtgctttaaacgtgatgcatgttttaatggagaaaaaatagctggtttctattaattatatagacagtaaacaaaaaccttaatacttactatcttcttttcagaattagtttatttttgtcagttacagtcctagatatacttactgctggtacagttgtactctaagattggtatttgatattcactttactcacaagtagtgcgggaggccagctcctggcaggccctcgcgatgagcagtgggtcagctgcggtgtgggatgctggagtttggctgcaggctgacatcatttatttttgcatccctgtctgctttgttacaagctcccaggggaggtggggtttgtgtcttccaacttccctacatgcagaaactgctccctttgaactctcttggctgaacagcagattactgacagacaatctgtgatatggtgttttatacgcttcctcgtacgctggggccaaggcagtatacattcctctgactttatactgttattactgcatttattatttgctatattaatagctactaactagaaattagatgaagcaagcatgacagacacagctgtggaggtcacagctgctcctttttggtcaatgagcgtttctatcccctccccctggggtgtgctgtgtcccacctggcccaccagaggctcacgacgatggcacctgaccaggtgacgtgggcgtggtcacctcacctgcaaggctttgtggactctgcacaccgtatgacccccggttttacagtttttagctgttgaattttggaaattggcactgggtgaaaaggtcggaggactggctcttgtagtcacagagtggctgcaggcctttgaaaagtggaggaaagaaaagcccttctccttgccccgcacacatttcactcccactgtactgggcttccaagctttggcattcaggcccctatattttctgtaggaaaaatcgttgagaacacttttctatatgggtgattttgagaccatcgttacgctgtgcgtaaagaatgtacagagaaatttgtaggtattttttgaagaacattaatttgttaatgatatgtagctatttaatttttccctttcctattgtaatcattcattttttttgttgttcggaaaaaaaaagttgatctttttttttgtcgtagatttgtctgtaaaagtgcaggaacagttattctatgagaacactgcatctgcattcatagccacgagtttgttattgctacaggctactgagcgtcgtaacaggaaaaccacccacagctgaccggctcggtggaggacactcctgggacaggtctctttgtcagtgaacaagggcgtcactctgggaggggtcggcggtgctggcggccgggtccctggtgcactgacctatctgggataggcagtaccctggaggggggcctggggcagaggaggcagcagaaaaccaaacatttcactgagaaagccccctccctgctctaagaaggggctccgtgaagttcttcccagagccgcgctgcctgcagtgcgctctgaccttctcttcatgtgtgtaaatctgtaatataccattctctgtggcctgtttttcctggaagaagaaaaaaaaaggtttggcaggccatctttttttgtacttaaaagtagccttaagaacaataataaagtgctcttaaacc

SEQ ID NO: 141626 - DNA, 1689 bp, Homo sapiens
atggccatgctgtgtccggagttggttccttctggtgggttcttggtctcgctgacttcaagaatgaagctggggaccttcgcgcaagctgagatgctgaagtactacagcacgcatttaccaccgtctccccgggacctggtggaggcgtctgtcacagtccctggtgaaggacacctggagtgccttcatggggcctgtagccccagccccggtcccacccccacccggctggaccatgggaaggcggctggcattcaggcagttgtgaccatgctccggaacaagactgccaatggagactgccgcagagacccccgggagcggagccgcagccccatcgagcgcgctgtggcccccaccatgagcctgcacggcagccacctgtacacctccctccccagccttggcctggagcagcccctcgcactgaccaagaacagcctggacgccagcaggccagccggcctctcgcccacactgaccccgggggagcggcagcagaaccggccctccgtgatcacctgtgcctcggctggcgcccgcaactgcaacctctcgcactgccccatcgcgcacagcggctgtgccgcgcccgggcctgccagctaccggaggccaccgagcgctgccaccacctgtgaccccgtggtggaggagcatttccgcaggagcctgggcaagaattacaaggagcccgagccggcacccaactccgtgtccatcacgggctccgtggacgaccactttgccaaagctctgggtgacacgtggctccagatcaaagcggccaaggacggagcatccagcagccctgagtccgcctctcgcaggggccagcccgccagcccctctgcccacatggagtctgtcctgaagacacacctccactatacgaaaggatattatcccctgctgcatgatctcttacaggaaaagactgggaacaggcccaagaggccctcagcggggaaccagctgactaaaccatttgatgcacatccacacctggactactgtggccctgaaacacaccccctgctgccagtccagagagcacgtgcactgccccatgacacccactgctccggggttccaggaacaaggttaaggttctactacaaagacagtcatggccaaggcggctgcgagacgctactcagcgacagaaaggcaccaagcgctgacacacgcaatgatgcaggtgaacctccaggcggctgtgcagggcaggacaggccagacagacctgctcgatgtcgccgaactgtgctggttccacaagcgagaacatctgtcagccctggggtccacatatctcctagccagctggacaacaggggtcatctggaatcccacactgggacctatgccctcttccctccacctttccctggcctcttctacattcagggccagatctcggccaggtaccactttggctctgtggcattgggtataaaggaaacagcactggacttggggcaagacgctcccaattttggatccgggctctaccagccaccagctctctgtgggctagctcgtttctcaggactcagtttccccgcaggaaaatacatctctccattttaccaccaaccatacagaggttatcaaggatacataaaacaactggaaagcacagacccagaacctggcaccgagcagggcctcaggaaatgttaa

SEQ ID NO: 141627 - DNA, 1779 bp, Homo sapiens
atgctgaagtactacagcacgcatttaccaccgtctccccgggacctggtggaggcgtctgtcacagtccctggtgaaggacacctggagtgccttcatggggcctgtagccccagccctggtcccacccccacccgcgaagctgctctcaggggagaacccagaatacagaccctgccggtggcctctgccctcagcagtcaccgcaccggccctcccccaatcagccccagcaagaggaagttcagcatggagccaggtgacgaggacctagactgtgacaacgaccacgtctccaaaatgagtcgcatcttcaacccccatctccccctgctgccagtccagagagcacgtgcactgccccatgacacccactgctccggggttccaggaacaaggttaaggttctactacaaagacagtcatggccaaggcggctggtctggcagtctagaagaagggggggctgtgcagggtacccagccaaggcagagtccagaggaagtcaaggaagagtatgaatgtccctcccacaacacgtgggaattatgggagctacaattcaagatgagattgggtggggacactgccaaaccatatcagatgtccaacatcgtcagccatcaaggaaatgcgaatcaataccacaaagagataccactaacacctgttaggatggctatgatcaaaagacaatacaaaagtgttagcaaggatgtggagaagctggaacacgtgtacgctgctgttccactccacgatacctgcctttcttacacggtcacccatatgctgcttctcttcattcacccgttaagtctctgtgcacccctggtagcaagcgtaatgagacaggagggactcgacgccctcagaggctgccgtgtgaacaagactgccaatggagactgccgcagagacccccgggagcggagccgcagccccatcgagcgcgctgtggcccccaccatgagcctgcacggcagccacctgtacacctccctccccagccttggcctggagcagcccctcgcactgaccaagaacagcctggacgccagcaggccagccggcctctcgcccacactgaccccgggggagcggcagcaggcagaacctggctctctggccattgccactgctgttggggagtccctgaaggacacgggaacatctgtcagccctggggtccacatatctcctagccagctggacaacaggggtcatctggaatcccacactgggacctatgccctcttccctccacctttccctggcctcttctacattcagggccagatctcggcccaggtacccactttggcctcctgtggccattgggttataaaaggaaaacagcactggaacttggggcaaagacgctccccaattttggatccgggctcctaccagccaccagctctctgtgggctagctcgtttcctcaggactcagtttccccgcaggaaaatacatctctccattttaccaccaaccatacagaggttatcaaggatacataaaacaactggaaagcacagacccagaacctggcaccgagcagggcctcaggaaatgttaagcctgagttttaatctgaggtcacagggcagatgatgaagtgtggagtgagagccctcttgggattgactgaggagttcgtgttgcatgtgtagtttgttttataatcactctcattgtgacccctggatctttgagagaaaatgggaactgagactaagaaatcaggaaggaaaatggggctctatgaaggaagtc

SEQ ID NO: 141628 - DNA, 366 bp, Homo sapiens
ggggtggaggacgagctggtgcctccagagtcgcagtggctggtgctcccgctgccgctggggctcccgctggcggagggtggcgactgtgaggacagggacggggagctgtgctggtttatgcactgggccacggcgaagcctgcaagacaaagtaccagtctctccttcattgacttaggagcctgctctgtcacttctcccaagatgatttatgacctgttcagaaagcgcaaagtcatctcctttggaggctgcatcgctcaaatcttcttcatccacgtcattggtggtgtggagatggtgctgctcatagccatggcctttgacagttatgtggccctattaagcccctccactatctga

SEQ ID NO: 141629 - DNA, 1730 bp, Homo sapiens
atgaagtttcatgacagaggccaaatccagcccaaacccagcccagcagaggctgtcaactcagcgccccagcgagagccggaaggttccatcctcagagctgcagaccctctcgtgtgggctgcaaaggccatgtctgcatcccgggcgccctgggcccgacccctactacgcctctgcctcgacgcgaacgcggagcccgagcgcgcgtcacgccgtgtggggccgaagaggctgctacccagaggcggagtgcgggctcgcgagggtccccaccccactctcgctcccgccagcacctacggactcgcgtccccgccgcgcgccgactcgggagcagcaccgcccccggcacaggagcctcacgcgcctcttacctaacaggaagttgggtggaagcagcgcggacccacggcacaccgaacgcactccaacagaacccgacgcagacacgggcccctctgctgtttgcctgtgtacagcctagggacttggtgctctgtgtcccagctgctccagccacagctaaaaggggtcaaggtacagctcaggccatggcttcagagggtgcaagcctcaagctttggcagcttccatgtggtgttgagcctgtggattcacagaagtccagaatcgaggtatgggaacctccacctagatttcagagaatgtatggaaatgcctggatctccagacagaagtttgctgcagggatacttgtgaaaggatattgtggaggaggagctgggggtattctcataattttagccacagcccagttggctggaccaatggatggagagaatcactcagtggtatctgagtttttgtttctgggactcactcattcatgggagatccagctcctcctcctagtgttttcctctgtgctctatgtggcaagcattactggaaacatcctcattgtgttttctgtgaccactgaccctcacttacactcccccatgtactttctactggccagtctctccttcattgacttaggagcctgctctgtcacttctcccaagatgatttatgacctgttcagaaagcgcaaagtcatctcctttggaggctgcatcgctcaaatcttcttcatccacgtcattggtggtgtggagatggtgctgctcatagccatggcctttgacagatatgtggccctatgtaagcccctccactatctgaccattatgagcccaagaatgtgcctttcatttctggctgttgcctggacccttggtgtcagtcactccctgttccaactggcatttcttgttaatttagccttctgtggccctaatgtgttggacagcttctactgtgaccttcctcggcttctcagactagcctgtaccgacacctacagattgcagttcatggtcactgttaacagtgggtttatctgtgtgggtactttcttcatacttctaatctcctacgtcttcatcctgtttactgtttggaaacattcctcaggtggttcatccaaggccctttccactctttcagctcacagcacagtggtccttttgttctttggtccacccatgtttgtgtatacacggccacaccctaattcacagatggacaagtttctggctatttttgatgcagttctcactccttttctgaatccagttgtctatacattcaggaataaggagatgaaggcagcaataaagagagtatgcaaacagctagtgatttacaagaggatctcataa

SEQ ID NO: 141630 - DNA, 8452 bp, Homo sapiens
gagaaaggctctactaaaaggccaactgaaatccaaaaagaactacttcagtaactctccatgggatatagaggagaaaggcactggaggcttcggtgccagcagtttaaagactgactggagagagggcggaggtggagcaagatggctgaatagaaccccccccgagatagttctccacacaggaacaccaaatagaacaactatccacgcaagacagcaccttcataaaagccataaaatcaggctgcacagcaggaaagagaatccgtgtgcttggaggagagagagcaaagtactgatgcttggggagagattccttctgcttggggaaagaagagagaagagcacagaggactttgtcttgcaacttgggtatcagcttagccacaatacgataaaacatcaaacagattcccgaagcccccgattccaggctttgttcctggatagtgtttctaggcccatcctgggtcagaagggaatccactgcccggttggcaaaggttcaaatgcacaaggtgggaataaatgtgacataattgaatacctagtctggcttatgtctggttctcccttcctcaatagagctggagcaagactggctgaaatgaccaccaggcagatggcagattgggaagacaaactgaaaagtgccaccatggcaactgcaccatacaactactcttacatctttaaatatattattattgttatggctgattgtcctcacacaattggtgttgaatttggtacaagaataatcgaagttagtggccaaaaaataaaactgcagatttgggatacggcaggacaggagcgatttagggctgttacacggagctactacagaggagctgcgggagctcttatggtctatgatatcactagaagaagtacatataaccacttaagcagctggttgacagatgcaaggaatctcaccaatccaaatactgtaataattctcataggaaataaagcagatttggaggcacagagagatgttacatatgaagaagccaaacagtttgctgaagaaaatgcgtgccatgtttctctgggacatgtttctctccttggcttggcattcaaggcccttcacaatcagcccaatacggagagaactgtcacaatggcagttaaattcaacatgagctttggaggggacactaaaaccatagcactatcttttggaagaaaggaggggaatgagagggagaggtatggcaaaagtgagctccaagatataagcaagttgaaaccgcttcaagatttgatttctctgatcctagttgaaaatccagttgtgacccttcctcattacctccagtttaccattttccacctccgttcattggaaagtttggaaggtcagccagtaaccactcaggatagacaggaggcttttgagagattcagtttagtgttggaaattctggccagggcaatcaggcaggagaaagaaataaaggatgttcacttaggaaaagaggaagtcaaattgtccctgtttgcagatgacgtgattgtatatttagaaaaccccattgtctcagcccaaaatctccttaagctgatacgcaacttcagcaaactctcaggatacaaaatcaatgtgcaaaaatcacaagcattcctatacaccaatgatagacagacagagagcagaatcatgagtgaactcccattcacaattgcttcaaagagaataaaatacctaggaatccagcttaaaagggatgtgaaggacctcttcaaggagaattacaaaccactgctcaacgaaataaaagaggacacaaacaaatggaggaacattccatgctcgtggataggaagaatcaatatcatgaaaatggccatactgcccaaggtaatttatagattcaatgccatccccatcaagctaccaatgactttcttcacagaattcgaaaaaactactttaaagttcatatggaaccaaaaaagagcctgcattgccaagacaatcctaagcaaaaagaacaaagctggaggcatcacactacctgacttcaaactatactacaaggctacagtaaacaaaacagcatgggacatggttgaagctggaaaccatcattctttgcaaactgtcacaaggacagaaaaccaaacaccgcatgttctcactcataggtgggaactgaacaatgagaacacttggacacaggaagaggtagaaagactggaaagagacctagaaaaaaagatgatagaaactgaagagcttaagagcaaacaaacaaggttccttgaggaaattaaaaatcaagataaattgaataaatcattaaaagaggaggccatgttacagaaacagagctgtgaggaactcaagagtgacttaaacacaaaaaatgaattgtatgctgaaattgataaagccccagatgaaagcccttacattggcaaatccagatacaagagaaatatgtttgccacagagagttatattattgacagtgctcaggcagtacagatcaagaagatggagccagatgaacaacttagaaatgatcacatgaacttgagaggccacacaccactggacacgcaactggaagacaaagaaaaaaaaataagtgcagcacaaactcgactatcagaactgcatgatgaaatagaaaaggcagaacaacaaattttgagagctactgaagaatttaaacaactggaagaagctatacaactaaaaaaggaggctgttgttcagtacaggcaagagatgatactagcaccaaccaggaaggtgctggtggatgtggagagaaagccagctgattccaggaaacactggacagtagaactgacaggacttaatgatgggttgaaagtaggagatgagttgagtggtagactacaacttgtaaataaattacgccaggaagctctggatctagaactgcagatggaaaagcaaaagcaggaaattgccggaaagcagaaggagattaaggacctgcaaatagccatagatagcctggattccaaagacccaaaacattcccatatgaaggctcaaaagagcggtaaagaacaacagcttgacattatgaacaagcagtaccaacaacttgaaagtcgtttggatgagatactttctagaattgctaaggaaacggaagagattaaggaccttgaagaacagcttactgaaggccagatagcagcaaatgaagccctgaagaaggatttagaaggtgttatcagtgggttgcaagaatacctggggaccattaaaggccaggcaactcaggcccagaatgagtgcaggaagctgcgggatgagaaagagacattgttgcagagattgacagaagtcgagcaggagagagaccagctggaaatagttgccatggatgcagaaaatatgaggaaggagcttgcagagctagaaagtgccctccaagagcagcatgaggtgaatgcatctttgcagcagacccagggagatctcagtgcctatgaagctgagctagaggctcggctaaacctaagggatgctgaagccaaccagctcaaggaagagttggaaaaagtaacaagacttacccagttagaacaatcagcccttcaagcagaacttgagaaggaaaggcaagccctcaagaatgcccttggaaaagcccagttctcagaagaaaaggagcaagagaacagtgagctccatgcaaaacttaaacacttgcaggatgacaataatctgttaaaacagcaacttaaagatttccagaatcaccttaaccatgtggttgatggtttggttcgtccagaagaagtggcagctcgtgtggatgagctaagaagaaaactgaaattaggaactggggaaatgaacatccatagtccttcagatgtcttagggaaaagtcttgctgatttacagaaacaattcagtgaaattcttgcacgctccaagtgggaaagagatgaagcacaagttagagagagaaaactccaagaagaaatggctctgcagcaagagaaactggcaactggacaagaagagttcaggcaggcctgtgagagagccctggaagcaagaatgaattttgataagaggcaacatgaagcaagaatccagcaaatggagaatgaaattcactatttgcaagaaaatctaaaaagtatggaggaaatccaaggccttacagatctccaacttcaggaagctgatgaagagaaggagagaattctggcccaactccgagagttagagaaaaagaagaaacttgaagatgccaaatctcaggagcaagtttttggtttagataaagaactgaagaaactaaagaaagccgtggccacctctgataagctagccacagctgagctcaccattgccaaagaccagctgaagtcccttcatggaactgttatgaaaattaaccaggagcgagcagaggagttgcaggaagcagagaggttcagcagaaaggcagcacaagcagccagagatctcacccgagcagaagctgagatcgaactcctgcagaatctcctcaggcagaagggggagcagtttcgacttgagatggagaaaacaggtgtaggtactggagcaaactcacaggtcctagaaattgagaaactgaatgagacaatggaacgacaaaggacagagattgcaaggctgcagaatgtactagacctcactggaagtgacaacaaaggaggctttgaaaatgttttagaagaaattgctgaacttcgacgtgaagtttcttatcagaatgattacataagcagcatggcagatcctttcaaaagacgaggctattggtactttatgccaccaccaccatcatcaaaagtttccagccatagttcccaggccaccaaggactctggtgttggccttaagtactcagcctcaactcctgttagaaaaccacgccctgggcagcaggatgggaaggaaggcagtcaacctccccctgcctcaggatactgggtttattctcccatcaggagtgggttacataaactgtttccaagtagagatgcagacagtggaggagatagtcaggaagagagtgagctggatgaccaagaagaacccccatttgtgcctcctcctggatacatgatgtatactgtgcttcctgatggttctcctgtaccccagggcatggccctgtatgcaccacctcctcccttgccaaacaatagccgacctctcacccctggcactgttgtttatggcccacctcctgctggggcccccatggtgtatgggcctccaccccccaacttctccatccccttcatccctatgggtgtgctgcattgcaacgtccctgaacaccataacttagagaatgaagtttctagattagaagacataatgcagcatttaaaatcaaagaagcgggaagaaaggtggatgagagcatccaagcggcagtcggagaaagaaatggaagaactgcatcataatattgatgatcttttgcaagagaagaaaagcttagagtgtgaagtagaagaattacatagaactgtccagaaacgtcaacagcaaaaggacttcattgatggaaatgttgagagtcttatgactgaactagaaatagaaaaatcactcaaacatcatgaagatattgtagatgaaattgagtgcattgagaagactcttctgaaacgtcgctcagagctcagggaagctgaccgactcctggcagaggctgagagtgaactttcatgcactaaagaaaaggtttgtcttcttgtggtttggggtgtgagctcagtgtggacaaaaaatgctgttgaaaagttcactgatgccaagagaagtttattgcaaactgagtcagatgctgaggaattagaaaggagagctcaggaaactgctgttaacctcgtcaaagctgatcagcagctaagatcgctccaggctgatgcaaaggatttggagcagcacaaaatcaagcaagaagaaatcttgaaagaaataaacaaaattgtagcagcaaaagactcagacttccaatgtttaagcaagaagaaggaaaaactgacagaagagcttcagaaactacagaaagacatagagatggcagaacgcaatgaggatcaccacctgcaggtccttaaagaatctgaggtgcttcttcaggccaaaagagccgagctggaaaagctgaaaagccaggtgacaagtcagcagcaggagatggctgtcttggacaggcagttagggcataaaaaggaggagctgcatctactccaaggaagcatggtccaggcaaaagctgacctccaggaagctctgagactgggagagactgaagtaactgagaagtgcaatcacattagggaagtaaaatctcttctggaagaactgagttttcagaaaggagaactaaatgttcagattagtgaaagaaaaactcaacttacacttataaagcaggaaattgaaaaagaggaagaaaatcttcaggttgttttaaggcagatgtctaaacataaaaccgaactaaagaatattctggacatgttgcaacttgaaaaccatgagctacaaggtttgaagctacaacatgaccaaagggtatctgaattagagaagactcaggtggcagtgctagaggagaaactggagttagagaatttgcagcagatatcccagcagcagaaaggggaaatagagtggcagaagcagctccttgagagggataaacgagaaatagaacgaatgactgctgagtcccgagctttacaatcgtgtgttgagtgtttgagcaaagaaaaggaagatctccaagagaaatgtgacatttgggaaaaaaagttggcacaaaccaaaagggttttagcagcagcagaagaaaatagcaaaatggagcaatcaaacttagaaaagttggaattgaatgtcagaaaactgcagcaggaactagaccaactaaacagagacaagttgtcactgcataacgacatttcagcaatgcaacagcagctccaagacttagtagatactggattggcactgaccacctctagtaaagatggctttattagtagtttccacttgttctttcacctaaaggacctgcttcacaccaccaagcatcaggatgtgttgctcagtgagcagacccgactccagaaggacatcagtgaatgggcaaataggtttgaagactgtcagaaagaagaggagacaaaacaacaacaacttcaagtgcttcagaatgagattgaagaaaacaagctcaaactagtccaacaagaaatgatgtttcagagactccagaaagagagagaaagtgaagaaagcaaattagaaaccagtaaagtgacactgaaggagcaacagcaccagctggaaaaggaattaacagaccagaaaagcaaactggaccaagtgctctcaaaggtgctggcagctgaagagcgtgttaggactctgcaggaagaggagaggtggtgtgagagcctggagaagacactctcccaaactaaacggcagctttcagaaagggagcagcaattggtggagaaatcaggtgagctgttggccctccagaaagaggcagattctatgagggcagacttcagccttctgcggaaccagttcttgacagaaagaaagaaagctgagaagcaggtggccagcctgaaggaagcacttaagatccagcggagccagctggagaaaaaccttcttgagcaaaaacaggagaacagctgcatacaaaaggaaatggcaacaattgaactggtagcccaggacaaccatgagcgggccaggcgcctgatgaaggagctcaaccagatgcagtatgagtacacggagctcaagaaacagatggcaaaccaaaaagatttggagagaagacaaatggaaatcagtgatgcaatgaggacacttaaatctgaggtgaaggatgaaatcagaaccagcttgaagaatcttaatcagtttcttccagaactaccagcagatctagaagctattttggaaagaaacgaaaacctagaaggagaattggaaagcttgaaagagaaccttccatttaccatgaatgagggaccttttgaagaaaaactgaacttttcccaagttcacataatggcccaactccgacactgtatgtccaagcaagcagaagtattaattaaaggaaagcggcagacagagggcactttacacagtttgaggagacaagtagatgctttaggggaattggtcaccagcacctctgcagattcagcgtcatcacccagtctgtctcagctggagtcttccctcacagaggactctcaacttggacaaaatcaggcagacagtgtcagaattgaactgaataagaggacatgcagctggtgtccactgaagaagtatctggtgtatggggcaacaacccttacatgtctgatgtcacaagtattgtactgtgtggtacggcagtag

SEQ ID NO: 141631 - DNA, 1958 bp, Homo sapiens
atgggaccgcaatcagaggaacatcctctgcctaggattcccaagctccctgaacctcacgcgacagctggagcccaggctgcgtccgctttgaggttcatccgagcctgggcagttcggtccctggagggaattcgctttagatacgactgtcagagagaagccctgagaagcgtgtccgtgtttcagagggtggcggcggcagctttgtctcagcgaaggccacagcactgcgggcagctgccgcatgaaacctcggctccccctgactctgcacccgacacttcacctgcaacgcaatccgaaggcgaaggcaccgcatcccgtcggccccgcgcggccggaagcctcgcgcccaagactccccggcatcctagcgcgctggctgcaaaagaggcgggaaacgcctccgcgtcccttccaacagtaccggagagggagaggggcgtggctgagactagccccgaccacgcgcgcgcggcccctcggcaaccggcacaacacaacaaaatggctgccgcgccgctgggcccctgaggaaagagcccgaacttctcccgctctacctcagcctgcgggactgctcggctcggcttctaggcggttttgatgaacacctggctttattcttgcaatgaagaaaggttctcaacaaaaaatattctccaaagcaaagaataccatcatcatctcactctcctatcccatcatctatgtccaatatgagatctaggtcactttcacctttgattggatcagagactctaccttttcattctggaggacagtggtgtgagcaaattgagattgcagatgaaaacaatatgcttttggactatcaagaccataaaggagctgattcacatgcaggagttagatatattacagaggccctcattaaaaaacttactaaacaggataatttggctttgataaaaactctgaacctttcactttctaaagacggtggcaagaaatttaagtatattgagaatttggaaaaatgtgttaaacttgaagtactgaatctcagctataatctaatagggaagattgaaaagttggacaagctgttaaaattacgtgaactcaacttatcatataacaaaatcagcaaaattgaaggcatagaaaatatgtgtaatctgcaaaagcttaaccttgcaggaaatgaaattgagcatattccagtatggttagggaagaagttaaaatctttgcgagtcctcaatttgaaaggcaacaagatatcatcgctccaagatataagcaagttgaaactgcttcaagatttgatttctctgatcctagttgaaaatccagttgtgacccttcctcattacctccagtttaccattttccacctccgttcattggaaagtttggaaggtcagccagtaaccactcaggatagacaggaggcttttgagagattcagtttagaagaggtagaaagactggaaagagacctagaaaaaaagatgatagaaactgaagagcttaagagcaaacaaacaaggttccttgaggaaattaaaaatcaagataaattgaataaatcattaaaagaggaggccatgttacagaaacagagctgtgaggaactcaagagtgacttaaacacaaaaaatgaattgctaaaacagaagaccatagaattaacacgagcatgtcagaagcaatatgagctggaacaggaattggccttttataaaattgatgctaaatttgagccactaaattattatccatcagagtatgctgaaattgataaagccccagatgaaagcccttacattggcaaatccagatacaagagaaatatgtttgccacagagagttatattattgacagtgctcaggcagtacagatcaagaagatggagccagatgaacaacttagaaatgatcacatgaacttgagaggccacacaccactggacacgcaactggaagac

SEQ ID NO: 141632 - DNA, 1617 bp, Homo sapiens
atgggcttttgtcacctgacactgcagggtgtgctgctggcagctgtggccacgtgctttccagacgagcccccgcaaccccacgagtcctcccagagggctgccctgacaggtgccttggcagctcccatcgtggctactggcccagctcaggccggcactgagggtcccacagtggtccagctgcggcctctgctccctctgagccggtggctccctggggacagtgcgcaggccctgggtgaacactacatggccacatctgggtgtgcttcccgcacagctgcagccatggggtctgaggaccacggcgcccagaaccccagctgtaaaatcatgacgtttcgcccaaccatggaagaatttaaagacttcaacaaatacgtggcctacatagagtcgcagggagcccaccgggcgggcctggccaaggtgggtgacatcctggccccagcgcggccctccatcagcctgcgccgcgggcctgcggacatcctgggtcccagctcagccagccccacaggcgtggcctgtgcacgtggaatgtgtttcggggccactcccagctcgtttaccagcgcctgtttgtggagttccaacaatgtgccaggcaccattctaggcactggagttgagaagtggccggtgcaggccctggctccagggagctggcagggggtgactaggatcatgggcgagtttcctctaatagcactgaagaggcgaattcacggcttcccctcggccagcggctttggcgtggatttggagccgggccagatcatccccccgaaggagtggaagccgcggcagacgtatgatgacatcgacgacgtggtgatcccggcgcccatccagcaggtggtgacgggccagtcgggcctcttcacgcagtacaatatccagaagaaggccatgacagtgggcgagtaccgccgcctggccaacagcgagaagtactgtaccccgcggcaccaggactttgatgaccttgaacgcaaatactggaagaacctcacctttgtctccccgatctacggggctgacatcagcggctctttgtatgatgaccagccggcccacagcgtgttacaaacacgtgtactttcccagtccctgccgctcgtcttcctggcactgtggagcctcgagtcctcagcccgccaggccacctgctggattcggctccaacccggtcctgacttgggctcagggcccggagacactggggtgaggggatctcccatcccgagcctggtctgctggagcgtcctcttgtccacacagcctgggctctccatgagggcagctggccggcatccccagagtcccagcctcaggcataaggtcccccaggccccgctggacgccagaagtgggcctgcgtggcgggtgtgtgtggaacagcagcaggaagctgtgactgccctgaggccacggccagccttggctctgccctgcttagtggaccttgtctgcgctgtggcccgcaggggactgggtttgctctctgagccgagggcgccggtttatgacacggaggattctgttcaggctggaagtgagcccgccctggagaacctgagggagacgcccccgacatggagccaggcataa

SEQ ID NO: 141633 - DNA, 571 bp, Homo sapiens
atgggtaacgacttcatgtctaaaacaccaaaagcaatgacaagagaagccaaaattgacaaatgggatctaattaaactaaagagcttctgcacagcaaaagaaatcatcatcagaatgaacagacaacctacagaattggagaaaatttttgcaatctatccatctgatgaagggcaatatccagaatctacaaagaacttaaataaatgtacaagaaaaaacaaacaaccccatcaaaaagtgggaaagaatatgaacagacacttctcaaaagaagacatatttgcagccaacaagctattaaaaagctcatcatcactggtcattagagaaatgcaaatcagaaccacaatgagataccatctcatggacatggatgaagctggaaaccatcattctcagcaaactaccacaagaacagaaaaccagaaactgcatgttctcactcataagtgggagttgaacaatgagaacacatggacacacggaagggaacatcacacaccagggcctgtcaaggagtttggggctaggggagggataacattaggcgaaatacctaatgtag

SEQ ID NO: 141634 - DNA, 469 bp, Homo sapiens
cataagccagacacaattaaatatgtttttcattgtaagtaccatcattactgatttaatagcaattaatattttctttctaatttaaaaatcctcagaaagcaaaaaggcttcaagaaaaagctatagaagcctccagataccataaacgaccacaaaatgcaatatttcaccaaacacatattaaaggccttaacacaatggtaagattctttctccataacattttcttaatagacattaaatttagagtgtttgaacaactgtgcaaatatactgaaaaccattgaattttacccattaaatggatggattgtgtggtattgaattatatctcaataaaactgttcaaaaaaaattttaaatttaaaaattagaagttaaaacaattaataaaaaaaaaaaccccgggcggccgctctagagtatccctcaaggggcccaagcttacgcgtacccagctttcttg

SEQ ID NO: 141635 - DNA, 1152 bp, Homo sapiens
atggatgaagctggaagccatcattgtcagcaaactaacacaggaacagaaaaccaaacactgcatgttctcactgataagtgggagttaaacaatgataacacatggacacagggaggggaacatcacacaccagtgcctgtcaaggggtgctttacaggcttggtgtcacataatcctttcaatgatcccatgcaacaaatcttattaacaaatcctgcttcattttacaaatgtcaagaccaagctttgaaaggaaaatggttcacccaagagctttcttacctccagagcccaggctcttatccattaggctacactgactctcagctgtcatttaagggagactatggtgatgtagggctgggaagggggagcagggacctagttcagctacgtcctaaacagtaccagtggctaatgaggttccggaccctctggggcatccacaaatccttccacaacatccaccctgccccttcacagctgcgctgccggtctttatcagaatttggagccccaagatggaatgactatgaagtaccggaggaatttaactttgcaagttatgtactggactactgggctcaaaaggagaaggtatgtcaagaaaaaccaagccctgtgtcttccagaggttatgtgtttctgcagaaaaccccaagtgcttggtttgtcttctcacaagacacagaccaagagagaagcagtagtgacattaggagtcaggagggcaagagaggtccaaatccagctttttggtgggtgaatggccaaggggatgaagtaaagtggagcttcagagagatgggagacctaacccgccgtgtagccaacgtcttcacacagacctgtggcctacaacagggagaccatctggccttgatgctgcctcgagttcctgagtggtggctggtggctgtgggctgcatgcgaacagggatcatcttcattcctgcgaccatcctgttgaaggccaaagacattctctatcgactacagttgtctaaagccaagggcattgtgaccatagatgcccttgcctcagaggtggactccatagcttctcagtgcccctctctgaaaaccaagctcctggtgtctgatcacagccgtgaagggtggctggacttccgatcgctggttaagtga

SEQ ID NO: 141636 - DNA, 1227 bp, Homo sapiens
ctagcccttcctggtggatcctgtttcagggccttcactcaggctgccctggggatgatgacatcccacactctcggactcctggctcagccttctcagctcactcagtgctttccccaggaaggtgtccgtaaagctgtactccccaccctgaatatagtgaaattctctccatgtcaaagagtcactcacagatggaatagatgtcacagccaacagagccagtattgccagtcccacaattcccagagacacataaatctccattctccaaacatcatgctcaatccaggcatcttctttattttgttggacctgttgatatgcccagtttagcaacttgtatctgtaggatcgcctcattgcgtaagacagagtataaattgcatgcagtacagcaaaaaacaaactgagaagcccaaactgctttcttgttaacatccacttatccaaccaatgtggaaacttcttatacttggttccattatgaacttggacaattgctgctatcacacctggtaggtaaaccaatgccaagagagtgatggaaaccattggcaagactttgttgatgaccaggattggaattttataaaaatattgttgatgggaagttgctaaagggtgaattacttccctcagaagagtgtaaagaaaagtcagagatgccataacagcagctattttaattggcaagtgccactgtggaaagagttcctgtgcgtgctgaagttctgaagggcagtcaaattcatcagcatgggctgtttgctgcaaatgcaaaagcacaggtctttttagcatgctggtctctcccgtgtccttatgcaaataatcgttgtcttctaaatttctcctaggcttcattttccaaatttcttcttggtttgtgatgtcttttctgctttccattaattctataaaatagtatggcttcagccacctgctggcgccccgcgtccgcagggttcgggaacgtccttggaggctaagactccccaagtcgcactccggcctctcccagtttcctctcaaatgccgtctgccctgcccttgaggtccgtttcgcgccctccaacccctcgccttttgtttaatctccactaaggaacgtttgtgcgtttctctagagcagtggttctcagacttcagcgtgtataagattacccgggggcatattaaaacaccgattgttgggctgtccacccacagtttccggttcagcat

SEQ ID NO: 141637 - DNA, 567 bp, Homo sapiens
atggatgaagctggaaaccatcattcgcagcaaactcacacaggaacagaaaaccaagcactgcatgttctcactcataagtgggagttaaacaatgagaacacatggacacagggaggggaacatcacacaccagggcctgttggggaccagaacaaggaaaggcccacagagaaagccaagctgcatcaaggcaaattttctctacaaatgcagatctcctccataaaagatagctttttagatattctaacatttccagcttttccgaataaccatcttgaaatatgtcgaagaattcctggcatctccaagcttctgggaaccactgcattttcctccacatgggtgcctgcagcagaagccatgtgcaatacatcttgtccagccacagcctcacatggagccggcacctatgccagcgcttggagctgtccatctactgtagcaggcagcatgcttggctgtgcacactggccagatcctgcactcacttgctcacacaccccttaccgctccacacgtaactggcccttggtagatgtggaatccgggctggtagcgtga

SEQ ID NO: 141638 - DNA, 804 bp, Homo sapiens
atggatgaagctggcaaccatcattctcagcaaactaacacaggaacagaaaaccaaacactgcgtgttctcactcataagtgggaattgaacaatgagaacacatggacacagggagaggaacatcacacaccagggtctgttgggggggattttgccgatttcggaaccaccatcaaacaggattttcgcctgctggggcaaaccagcgtggaccgcttgctgcaactctctcagggccaggcggtgaagggcaatcagctgttgcccgtctcactggtgaaaagaaaaaccaccctggcgcccaatacgcaaaccgcctctccccgcgcgttggccgattcattaatgcagctggcacgacaggtttcccgactggaaagcgggcaatttcaaagaaagtactggcaggcttgggtgcctaggcagaagtctgccacaagggtaaaacccacacagagagaccctactagggcagtgctgaagggaaataaagggtttgaacccccatacagagttcccatcagggccctaccttgtggaactgtgggaatgaggctaccaccctctagacccaagaaagatagagccatccccagctcatacattgagcctggaaaagctacaggcactcaactccaacctgtgaaagcagccatgggctcttcatcctgcaaagccacaggagcaaagcggctcaagaccttgggatcccaccgcttgcatcagtgtgctcatgttacgaggaaaagagtcaaagaatattatttcttgcctgccctgatgggtctcagacttgcgtga

SEQ ID NO: 141639 - DNA, 615 bp, Homo sapiens
atggatgaagctggaaaccatcattctcagcaaactaacacaagaacagaaaaccaaacactgcatgctctcactcataagtgggagctgaactatgagaacacgtggacacaggaagtggaacctcacctactggagcctctaggaggattttttaaaaatcagcatattcagtcacacaaaagactatttcaagaaattaagggtctcccatacagattctctcaatgtgaccatagggcccctaggaagcttaaggacgttgtgcttcagccccatcagcagcagtcagacaccccactctgggatcttgaaaagagtggaatgaaagtactattctcagagctgtgggcaagatttaaggaacacaaagagatgaatcaaggagagactagctggagcaggaatacgattacccctgaggctactgggcaagtggaggaagcagtgtttccggggcaagtggaggaagcagtgtttccggaccaaatcttgacacgaatgcatcccctagcaggatcggacccagagcataactggcagggattgtcggaatgtacttcccaaaggtcctgtcaccctcatacaaaggtgaagataaaagaggggaaatga

SEQ ID NO: 141640 - DNA, 855 bp, Homo sapiens
atgaaccagacagccatatggaagagagtggatcatcaagttggagtgacaagcacggacttcatcatcaaagatccacctaggcctttgctcagtgctctatcaaaatgtgagggaagtggcctgcctgtcctctttactggggcaaatactgccactattgccagcaagcttcatgcttcccagaccctcaaaggcatcatggggcctcaggctaacaaaccacaggaggcaccctactcaagtgaagacaacaaaaatgaagagccctatggtgatctacttcaacttaatgaatgggatatggatgaagctggaaaccatcattctcagcaaactaacacaggaacagaaaaccaagcactgcatgttctcactcataagtgggagttgaacaatgagaacacatggacacagggaggggaatatcacacatcggggcctgttgggggctggggagaaagcaataaaatcaacaaaaaggatgcccacgcaaaaaccccatccaaaggtcatcagcatcaaagatcaaaggtagataaatccataaatatgaggaaaaaccagcgcaaaaatactgaaaattccaaaaaccagaatgcttcttctcctccaaaggatcatgactcctcaccagcaagagaacaaaactggacagagaatgagtttgacgaactgatagaagtagacttcagaaggggggtaataatgaagtgctctgagctaaaggagcatgttttaacccaatggaaggaagctaagaaccttgataaaatgttctgggaactgctaactagaataatcagtttagagaagaacataaatgacctgatggagctgaaaaacacagcgtga

SEQ ID NO: 141641 - DNA, 669 bp, Homo sapiens
atggaatactatgcagctataaaaaagaatgagttcgtgtcctttacagggacatggatgaagctggaaaccatcatcctcagcaaattaacacaggaacagaaaaccaaacattgcatgttctcactcacaagtgggagtcgaacaatgagaacacatggacacagggaggggaccatcacaaaccagggcctgtcggggggatcccaaactccatattcctaccaacgacatcagtgcaacattgtatgtgtccagagatgggattttgggggcagtcataccaaggatgtgtccttgggaaggccagaaacactaccccagagggagcaacataagccaaggagataccaccaaagtgtttgtgaaagtgttcataacagtttacacacagagaagaatatgatggctccagttgctctacagtcttttcaacacctgatgtttgagggaaggtgcccaggaggctctgtggctgtgggaggcacaccagagcaagctgttgctgaagaagctggagactcaaaaaagaacagagaagcatcaggacaagcacagcctggagaaacaggtgcaggccccatctgctggggaagccctgagggggatgagagatgggtcacaaccagacagtcatctgcccttagggctcagcatagtggcctgtga

SEQ ID NO: 141642 - DNA, 375 bp, Homo sapiens
atggatgaagctggaaaccatcattctcagcaaactaacacaggaacagaaaaccaaacactgcatgttctcactcataagtgggagctgaacaataagaacacttggacatggaggggaacatcacacgccagggcctgtcgatggttagaaactaagaaatggttttatagcttggccacagatgagggcaaaaaaaaggcaggagaattcaccacagccaataacatgaagggaatcagcgaatcagcactcactgtggttggcctgatgagaacagtgactacaacttctgctgtaattgatgggaacgaattcttctgggatgtgttaatacagctgcaggcagtaaggcaagcagcgaatggaaactaa

SEQ ID NO: 141643 - DNA, 597 bp, Homo sapiens
atgaatgaagctgaaaaacatcattctcagcaaactaacacaagaacagaaaaccaaacactgcatgttctcacttataagtgggagctgaacaatgagaacacatggacacagggaagggaacatcacacaccagggcctgtcggcggtcttactcccaagctatacctgcaaaagctcttggtggtgcaaatgtgtgtatgcgtgtgcttaggcaagggattgtccagcaagagaagagatgcaaagggtgctggggccactgggggtgccatgctgggaaacttacacattaaccttgggccagtggtctccaaactgaggcttactgactcaatccgtgggtttgggaaagacatcggcattcgtggaaagaaaccagtatcttgcatgagcatttcctggttaattctaatagcaaagaaagtgtgcagctctggagcctttaagcttctgagtgacccaaccaactggccaatggaggctctgtcactctatctggatggatgtgaatcaggaagcaacatagccccagttattaccaggtatcgtcctgcaactactacaacaaagtactttatggtgaaactaacatga

SEQ ID NO: 141644 - DNA, 1323 bp, Homo sapiens
atgggcaggactctgaagcctcaggaggatgggggtacagagcgaggctctacattccaaaacaccaaactgcatctcacaccagagccaaaggcgtgccaatcaaaattccaggagggctacacccaagaaacagaaacaagccaaacgcagactcactctaaactacagccacagctccttgacctggttcaatgcggggtaggtcttgtgggacgcaaaacgctaagaggaacagcatggctgaatcatctggggacaactaagagcagtgagaaggggaaagaatgcacagcaactgccacacagttctcaatctgtgccaatcctaccaacgggcttgtggagtccatcaagaggtccatctgtgaaccccacaggatgccctgcctgaagatcccttggccacagccagatgatctgccccgaacctctagtgggttgcaccatgggcatcccatgtgtgaaccatatgaatttaaaattgaaatgtggattcataataccttctgtgctaatagagtcagcatccataatacagcccctatccaaattgactttagcaccaaggaggggcacattgcaaaacctgaactttcaggaaagggtgagaacgttttggagatgcttcagagtaactgtaaaaggagtgtgagttatgggattgcttgtcaaaggagagtcatagcatggacctgcgctcccattacagcttcctgggcagctttggatcgactgccattagaagaattggaaaaaactactttgaattgcatatggaacaaaaaaagagcccgcatagccaagacaatcctaagcagaaagaacaaaggtggagacatcacactacctgacttcaaactatactacaaggctacagtaaccaaaacagcatgggacatggatgaagcaggaaaccatcgttctcagcaaactaacacaggaacagaaaaccaaacaccccatgttctcactcataagtgggagctgaacaatgagaacacttggacacagggaggggaacatcacacaccggggcctgtcgggtgggagagagctgctaggaacactggtggtttttcacacttggaagtggaagaagacctactaagggaacagaagtcactggctcaatgtaaagcagcaaatcatctgggaagacctgtgaagtgtcagaaaatctttaggattcagggtgacaagaaacacagggaaaatgctatggaatataatttagaggaatgcactgatgagaagactagacagaatttatggcctgtttaccacgcagtgagagcactcctttcagacttgggcatctaa

SEQ ID NO: 141645 - DNA, 1041 bp, Homo sapiens
atggcagaagtgaaactgtctgacaaggaggaggagaaggaggaggaggacctttctggaggaggagcgactcaagccttcgcgaaagaaaataaccaaaaagcatacaaagaaacgtacggcgtctctcatattacacgccatgatatgctgcagatccctaaacagcagcaaaacgaaaaataccaagtgcctcaattcgatcaatcaacgattaaaaatattgagtctgcaaaaggacttgatgtgtgggacagctggccgctgcaaaacgctgacggaacagtagctgaatacaacggctatcacgttgtgtttgctcttgcgggaagcccgaaagacgctgatgacacatcaatctacatggacatggatgaagctggaaaccatcattctcagcaaactaacacaggaacagaaaaccaaacaacgcatgttctcactcataagtgggagttgaacaatgagaacacgtggacacagggaggggaacatcacacacaggggcctgtcagggggcccagagccctgggaagaaagaatggtttcacgggccaggcccagggccctgctgccccaaagaagcctcaagacactgcttcctgcatacaggcaaccccagttccagcctcagatcaaaaggtcccaggtacagcttgggatgctttggagggcacaaaccataacccatggcggcctccacaggacaataagcctgcaggtgcacagaatgcaaaaatgaaggaggcttggcagcttcgaccaaaatttcagaggatgtatcggaaagtctggaatgatagagccatgggcagctggcatactgaatctggaaaagccacaggtgttcaactccaacttgtgagagcagccacagaggcttcaccctgcaaaatcacaagggcagagctgcccaaggtcttgggagcccactccttgcactggtgtgccctggatgtgggacatggaatcagggattattttgaagctttaaggtttaatgactgccctgctggtttcagacttgtgtggggcctgtag

SEQ ID NO: 141646 - DNA, 684 bp, Homo sapiens
cccatcaaagtgacagcccagagcacaagatcatctttaataaaaccccaacttcaccgggaaagaggatggaaatcatagatgacgatgtacccagcttccacgcccatggctaccaggagaaggtgtcatctgtgtgggtgcggagtggcatgtgggttggctactagtaccctggctaccgtgggctgcagtacctgctggagaagggagactacaaggacagcagcgactttggggcccgtcaccctcagggacatggatgaagctggaaaccatcattctcagcaaactaacacagaagcagaaaaccaaacaccacatgttctcactcataagtgggagttgaacagtgagaacacatggacacaaggaggggaacatcacacaccgaggcctgtcagggagtgggggacaagagggagagagagcattgggacaaataccaaatgcatgcacggcttaaaacctagatgacaggttgatgggtgcagcaaaccaccatggcacatgtatacctgtgtaacaaacctgcacgttctgcacatgtatcccagaacttataataaaaaagaaaccagtaagtgctcaataaatgttactaacatctatttcttcattcattcttcaaccattacccactgagtgcctatttggatacttggcttagtacctgggtgatga

SEQ ID NO: 141647 - DNA, 1492 bp, Homo sapiens
atggatgaagctggaaaccatcattctcagcaaactaacacaggaacagaaaaccaaacaccacatgttctccctcataagtgggagttgaacaatgagaacgcatggacacaaggaggggaacatcacacactgggacctgttggaagtgttggaagttctggccagggcaatcaggcaagagaaagaaataaagatattcaattaggaaaagaggaagtcaaattggccctgtttgcagacaacatgattgtatatttagaaaaccccatcatctcagcccaaaatctccttaagctgataagcaacttcagcaaagtctcaggatacaaaatcaatgtacaaaaatcacaagcattcttatacatcaataagagacaaacagagatccaaatcatgagtgaactcccattcacaactgcttcaaagagaataaaatacctaggaacccaaattacaagggatgtgaaggacctcttcaaggaggactacaaacaactgctcaacaaaataaaagaggacacaaacaaattgaagaacattccatgctcatggataggaagaatcaatatcatgaaaatggccatactgcctaagcctaactgggaggcaccacccagtaggggcagactgacacctcacacggccaggtacccctctgagacaaagattccagaggaacaatcaggcagcaacatttgctgttcagcaatattcacggttctgcagcctccgctgctgatacccaggcaaacaaggtctcgagtggacctccagcaaactccaacagacctgcagctgaggctcctgactgttagaaggaaaactaacgaacaaaaaggaatagcatcaacatcaacaaaaaggatgtccactcaaaaaccctatcagaaggatcacaactcgtcggcagcaagggaacaaaactggatggagaatgagtttgatgaattcacagaagtaggcttcagaagttgggtagtaacaaactctttcaagctaaaggatcatgttctaacccaatgcaaagaagctaagaaccttaaaaaaagaattggaaaaaactactttaaagttcatatggaaccaaaaaagagcccgtattgccaagacagtcctaagtaaaaagaacaaagctggaggcatcatgctacctgacttcaaactacattacaaggatacagtaacaaaaacagcaggggacatggatgaagctggaaaccatcattctcagcaaactaacgcagggacagaaaaccaaacactgcatgttctcactcttaagtgggagttgaacaatgagaacacatggacacagggaggggaaggaacatcacacaccgaggccctgtccctgcaatcattcaaagaacagactccctcaactgtgcaatacaaacgaaagagaagtgacaggcactcagaggtcttggccaccaacatacgttcttgtgggacagtgccacaaaccttcaacccttacagccacaag

SEQ ID NO: 141648 - DNA, 1105 bp, Homo sapiens
atgtgcagaaagctgaaactgaatcctttccttatactttatataaaaattaattcaagacggattaaagacttaaatggtagaccaaaaaccataaaaactctagaagaaaacctaggcaatactactgaggacataggcatgggcaaagacttcatgactaaaacaccaaaagcaatggcaacaaaagccaaaactggcaaatgggatctaattaaactaaagagcttctgcacagcaaaagaaactaccatcagaatgaacaggcaacctacagaatgggagaaaatttttgcaatctatccacgtgacaaagggctaatatccagaatctacaatgaacttaagcaaatttacaagaaaaaaacaaacaaccccatcaaaaagcaaacagggtgtggagcagacctccagcaaactccagcagacctgcagcagacgggactgagtgttagaaagaaaactgataaacagaaaggaatagcatcaacatcaacaaaaaggacgtccacacagaaaccccatccgaagttcactaacatcaaagaccaaagaaatacaaactaccataaaagaatactatgaacacctctatacaaataaactagaaaatctacaagaaatggataaattcctggacacatacaccttcccaggactaaaccaggaagaagtccaatccctgaatagaccaataacaagttctgaaattgaggcagtaattaatagcctaccaaccaaaaaaagtccaggaccagacagattcacagccgaattctaccagagggacatggatgaagctggaaaccatcattctcagcaaactaacacagggacagaaaaccaaacactgcatattctcactcataagtgggagttgaataatgagaacacatggacacagggaggggaatatcatactccagggcctgttagagtttgggggaatagaggagggatagcattaggagaaatacctaatgaatgcagctcctcaccagcaacagaccaaagctggatggagaatgactttgacgagttgaaagaagaaggcttcagacgattggtaataacaaacttctccgagctaaaggaggatgtttga

SEQ ID NO: 141649 - DNA, 613 bp, Homo sapiens
aaaactgaaactggaccccttccttacaccttatgcaaaaattaactcaagatggattaaagacttaaacataagatgtaaaaccataaaaaccctagaagaaaacctaggcaataccattcaggacatagacatgggcaaagacttcatgactaaaacaccaaaagcaatggcaacagaagtcaaaattgacaaatgggatctaattaaactaaagagcttccacacagcaaaagaaactatcatcgaggtgaacagggacatggatgaagctggaaaccatcattctcagcaaactaacacaggaaccagaaaaccaaacactgcatgttctcactcataagtgggagttgaacaatgagaacatacgggcacagggatggggaacatcacacacaaacgggggcctgttggggggatgggggctaggggagggatagcattaggagaaatacctaatgcatactggggcttcatgcctagatgatgggttgatgggtgcagcaaaccaccatggcacatgtatacccatgtaacaaacctgcacattctgcacatgtactaccctagaacttaaagcataataataaaaaaataagaaaatggaaattga

SEQ ID NO: 141650 - DNA, 3185 bp, Homo sapiens
atgagaatctcagaccccatcccagacatactgaaccggaaactgtgggcggacagcccaacaatcggtgttttaataagcccccgggtaatcttatacacgctaaagtctgagaaccactgctctagagaaatgcacaaacgttccttagtggagattaaacaaaaggcgaggggttggagggcgcgaaacggacctcagctccccgactcctccccgcgcttcacgggtcttccggactccagtcagcgttcctcgggccctcggcgccacgagctgtccgggacgcaccccctagcgggccgtggctgccaaccggcggccttgggtggaacaaagtatgttgtgcaaggagtgacgcattttaaggaatggcattgcctttcccagaaagtgaagagaggaaattggaaaattgtgagtggaccttctgatactgctcctccttgcgtggaaaaggggaaagaactgcatgcatattattcagcatcctatattcaaagtgctgatgaagactgtaaccccttttgtgctgatgactgttattcagctatgaggcctaagaactttgacccttggggagagtgggatgcaagcataccagctaataaatgtgggataaacaccaataaacctgatgtagttttacaagtacctaccacagggatatccctggacaggaagatccccccactctccaccccgccgccaccggccatgtggacagaggaagccggggcgaccgccgaggcccaggaatccggcatcaggaacaagtctagcagttccagtcaaatcccggtggttggggtggtgacggaggacgatgaggcgcaggattccattgatcccccagagagccctgatcgtgccttaaaagccgcgaattcctggaggaaccctgtcctgcctcacactaatggtgtggggccactgtgggaattcctgttgaggcttctcaaatctcaggctgcgtcaggaaccctgtctcttgcgttcacatcctggagccttggagagttccttgggagtgggacatggatgaagctggaaaccataattctcagcaaactaacacaggaacagaaatccaaacactgcatgttctcactgataagtgggagcttgccatttttgaaaaagaaagtgtcggatgaaataacttatgctgaagatactgctaattcaattgcacttctgggtgacttaatgaaaataccaagttctgaattgaggatacaaatttgtaagtgtattgttgatttttatcatgcagaaccaccaaagaagcatattccagaagttaattgtactataatgatgaaagcacaagcagccagtggaatctgtactcacctcaatgacccagatccctctggacagcttttatttcgttcatcagaaatactttggaacttgctggaaaaatcttcaaaagaagaagtcatacaacagcttagtaacttggaatgtttgctggctttgaaggaagtatttaaaaatctgtttatgagaggtttcagtcattatgaccgtcagcttagaaatgacatattagtgatcactacaattatagctcaaaatcctgaagcaccaatgattgaatgtggctttaccaaggatttgatactgtttgccacctttaatgaagttaaaagtcaaaatcttttggtgaaaaggacttaagctttctaattcctatgaagattttgagttgaagaaattactattcaatgtaattgtgatcttatgtaaagatttacctactgtacagctattaattgatggcaaagttattttggctttgtttacctatgttaagaagcctgagaagcaaaaaataattgactggtctgcagcacagcatgaagaattacaactgcatgcaattgccactttgtcatcagtggctcctttattaatagaagaatacatgtcatgccagggaaatgctcgagtccttgcatttctagaatggtgtgagagtgaagatcccgttttcagtcatggttacaggtttcatggtacaggtggccgaggcaacaagtttgcccagatgcgttacagtttaagactcctgagacgccatggtctaccttgaagatgagactgtaaacaaagatctttgtgaaaagggaacaattcagcaaatgataggtcttcatgacctgtatcttttgcgacctcctatctcatcctgtgacttagaatgccgtgaccatctgggaatgcagcacagtacccctctttatgacagaacaatacagaaagacaaagtacaccagattggctacaggttaagattaggctttcaaatcatttctcccattaatcaaaactttacagaggagacagtgatttttaccattcattcaactggtttgcacagaggggaagggaagggaaaaagggaagggagcattgcttttggcagtgtggggaagattggagaaatatggaatgaaatatatgaagaaataaaattagaaaaattaagaccagtcactacagataaaaaagctttggaagctattacaacagcatcagaaaatattggaaagatggttgcttctctgcaaagtgatataattgaaagccaagcatgccaagacatgcaaaatgaacaaaaagtatatgcaaaaatacaggccacgcacaagcaaagagagctggctaataaatcatgggaagatttcttggctagaacatcaaacgctaaaacgttaaagaaagcaaaaaggcttcaagaaaaagctatagaagcctccagataccataaacgaccacaaaatgcaatatttcaccaaacacatattaaaggccttaacacaatggtgccctctggtggagtagtaacagtgggaaagcactcctgcccgattagtaggaggacctctggtttgatacgggtattggctcttaaaaaactggcccattcgagggaggagcctttgcagaggggtgaaagcagtttaaaattgtggatgcaccaaaaaagagtattcctacgtaatatactatagagactttttgaaataaagtcagcttataattttttagctgaatatatctttatacatatgtaaagccaatattttagaataagtattttagtataaatattttagtaaaatactataaaaataaaaggacatataatttatttttatggaaaacatcaaaaa

SEQ ID NO: 141651 - DNA, 416 bp, Homo sapiens; identical to SEQ ID NO: 126543

SEQ ID NO: 141652 - DNA, 816 bp, Homo sapiens
atggaccggattgaaaaggatatttgcattgaattggaattaacacctgcaggcaggagcagaacactcctcttgggggaaaacccggaaggagatggcccagtagaccacccacaggaggccaccgtcgctgagcctgatgggcacccagaagcccccacgcagctcgaggctattgcggacagtggagagcagttggaagcgtcacctggaccctggctctctttgggtctgtccaatggcagatactccattgggcagcagaatgggaaaaaagctattgctgcctctgctatttctaggaaggatctaggcagcagggctggaatggactccttgggctgcccagggctccagtgcacggtgggaatacccctgaaggggctagtgcctgtccacctagaaggtccagcagccttgcggcctagatctggctggggtgaagggccaggtactgagaggctctacggacatgcctgctcacaactgaagacaccgaggggctcaaaggaaggcttttctgcagagggtcaactgcggcctgtgttgcacctggaatctctgcccacaaaagctaagggggagaaaatggccagtccaggtgtcgcacagctgcaggcagagatcctggcggaccccttctgtaaccagaaggcaccctgtggggggctcccttttgtcttggggcacctccacctctacttacagctgcctgtgcccctgcggcaggcagggcagggggcaccagaggagcagcgccagcatgccccgaagacaggacgaatgcccacagtcagcaccaccatccccatgtga

SEQ ID NO: 141653 - DNA, 1881 bp, Homo sapiens; identical to SEQ ID NO: 126544

SEQ ID NO: 141654 - DNA, 326 bp, Homo sapiens
cagcactgttggcctccgactccagcaggtggatgtcattgcagtccgccagtgagtgctccaggcagagctgcaggaagcgggcctgggtacgggtgacccgtttcagaagtgacaggagggccactgtctgctcacactcattccagcctttgaaccagccagcgaggatgcccacctggtctcggaacatcatggtgccgggcctttcccctgagggccagggcttaaggacgtttctgggcgtggtggcaacggttgttgggggaggaggaagcctgctcacatggggggaggtcttggtccagccacgcctctccagtttc

SEQ ID NO: 141655 - DNA, 2319 bp, Homo sapiens
cgcggccgcgtcgacgttagcctgtgaggaaactggagaggcgtggctggaccaagacctccccccatgtgagcaggcttcctcctcccccaacaaccgttgcgcaccacgcccagaaacgtccttaagccctggccctcaggggaaaggtaacaggaggccagagccgggaccatgtgacggcgctggccctcgccaccgccgtcacccgaccctgaccccaggcccggcaccatgatgttccgagaccaggtgggcatcctcgctggctggttcaaaggctggaatgagtgtgagcagacagaggccctcctgtcacttttgaaacgggtcacccgtacccaggcccgcttcctgcagctctgcctggagcactcactggcggactgcaatgacatacacctgctggagtcggaggccaacagtgctgccatcgtcagccagtggcagcaggagtccaaagagaaggtggtgtccctcctgctgtcccaccttcccctgcttcagccaggcaacacagaggccaagtcggagtacatgaggctactgcagaaagtgctggcctactcaatcgagagcaatgctttcatcgaggagagtcgccagctgctttcctatgccctcatccacccagccaccacactggaggaccgcaacgcactggccctctggctgagccacctggaagagcggttggctagtggcttccgctcccggccagagccctcctaccattcacgtcaaggctcagatgagtgggggggccctgcagagctaggccctggggaggcagggccaggctggcaggacaagccaccccgggaaaatggacacgtgcccttccacccatccagctcagtgccgccagccatcaacagtattgggagcaatgcaaacacaggtctcccctgccaaatccaccctagcccactgaagcgctccatgtcactcatccctacaagcccccaggtccctggtgagtggccgagtccagaggagcttggggcccgggctgcttttaccacgcccgatcacgcacctctctcgccccagagcagcgtggcctcctctggcagtgagcagacagaggagcagggctccagccggaacaccttccaggaggatggcagtggcatgaaagatgtgccctcatggctcaagagcctccgtttgcacaagtatgcagccctcttctcacagatgagctacgaggagatgatgacactgactgagcagcacctggagtctcagaacgtcaccaaaggtgcccgccacaagatagccctgagcatccagaagctgcgtgagagacagagcgtcctcaagtccctagagaaggatgtgctggaaggcgggaacctacgaaacgctctgcaggagctgcagcagatcatcatcactcccatcaaggcctacagtgtcctccaggccaccgtggctgccgccaccaccacccctactgccaaggatggggccccgggggaaccaccgctgccaggtgctgagcctcccctagcccaccccggcacagacaaaggcaccgaggccaaggaccctccagctgtggagaactacccacctccaccagctccagctcccactgatggcagtgagcctgccccggctcccgtcgccgacggagacatccccagccagtttacacgggtgatgggcaaagtgtgcacccaactgctggtgtcccgaccagacgaggagaacatcaccagttacctccagctcatcgaaaagtgcctgactcatgaggctttcacggagacgcagaagaaacggctgctatcctggaaacagcaagtgctgaagctcctccggacattcccgcgcaaagccgcactagagatgcagaactaccggcagcagaaaggctgggcattcggctccaactcgctccccatagctggctctgtggggatgggagtggcccggcgtacccagcggcagttcccaatgcctccccgggccctcccacccggccggatgggcctcctgagcccctcgggcattgggggtgtctcccctcgacatgccctcaccagccccagccttggaggccagggccgacagaacctgtggtttgccaaccctggaggcagcaacagcatgcccagtcagagccgcagctctgtgcagcgcacccactcgctcccggtccactcgtcaccccaggccattctcatgttccctccagactgcccggttcctgggcctgacctggagatcaatcccactctggagtctctgtgtctgagcatgacagaacacgccttgggtgatgggacagacaaaacctccaccatctga

SEQ ID NO: 141656 - DNA, 678 bp, Homo sapiens
ctacttaataagggtttttaaggagtgggtgaatgtgctcataacagtcgccgaagttggggagcctggtggatgctctgtggctgcccctgcagctgctgccacctgctgctgctgctgctgctgttgttgttgctgctgctgttgttgttgctgctgctgctgttgttgttgctgctgctgctggttaaggttacgggctgtggactcctcagctgcacgcagcaggaaggtgtagttcctcaccacctcttctaccttggccagcagctcttggcgctgggcctcggagcgcacaatgaacaccagccgcacgaaggtctcaatgaggctgctcagcacctggaagctgcccgtgatggctgccagcatgtgagttgggctcttgtccacattggccacacggcggcaggaggcccggagctccttgaacttgagagctagctcaagcttatactcggagatctgagacacatagggcttgggggcacgggcctcggggctggccacacactgccgcaggactgtcagcagctcgttggtgtccagccgggcagccaggaagccatcagggaggccataggcatgggcccgcagggcattgatcttggccaggctcccctcgaaggtggacacacggaggtcaataacaggcaccacctgctcgtccagcttcat

SEQ ID NO: 141657 - DNA, 1416 bp, Homo sapiens
gcatcaaaggatgagaaaatgctgttagccctgaaattgctaatatttttttaaaacacgaattcttaatagcaaagtgaaaagttttacattacattttttaataagggataacaaaatctcttacatgtatttctgtgtgtttatattgtatatgaatgtatgagtgcagaaaatacttgactcacactaggtcataattttatttgtcagtatattggaatatgggggtggggaccaagtataaaaggaaattttctatatatgtaaaattagatacgtacatgtatatgtaaatgttctttaaaaaaactattaaaaacggaagcgattctttaaaaggtagatttccttttatgttgcagtcatagccacgtaagcaatggacctcatattttttttcaacagggagcctcttaaacagaatctaacctgtaaaactcaggagccgagaagctttaagaacagtgaggttgaagggcacaggctcttggtccttggcagcgatattaggaggcgtgcctagggaacctcggattccggggagctggacgtgaaactctgtggtggaatagaaatcctcagggcatgagctatacctaaaacgtaatggtattaagaattctggttcagccgtctgtatatctccccagatacctgaaactgaccacctgagtacgttttcccattgctgagctgtttccctgatatctggccatgcaacggagatcaagagggataaatactggacttattctactcctttctcaaatcttccatgttgggatcaacaatattccacctgtcaccctagcaactttggccctcaacatctggttcttcttgaaccctcagaagccactgtatagctcctgccttagtgtggagaagtgttaccagcaaaaagactggcagcgtttactgctctctccccttcaccatgctgatgattggcatttgtatttcaatatggcatccatgctctggaaaggaataaatctagaaagaagactgggaagtagatggtttgcctatgttatcaccgcattttctgtacttactggagtggtatacctgctcttgcaatttgctgttgccgaatttatggatgaacctgacttcaaaaggagctgtgctgtaggtttctcagagaaggacttggaaattcggaaggttaagagacttatcaacaaacagtttgtggtagacaccagccttaaaggttataccaatttgcattcatatcagcagcatatagaaatgtctgttatcactaccaacattaaatgtggtgagatggagggaggtggagcaaaacggccaaatagaaagctttacagatcatccttcccagaggaacaccaaactgaagaactatctgcagaaaaaatcaccttcataagaaccaaagatcat

SEQ ID NO: 141658 - DNA, 501 bp, Homo sapiens
agtcctcacgcgcgcttagactcttgggagttgtagtacgaatccgtcaggccggaaccatggcagtgaccaaggagctcttacagatggacctgtacgcgctgctaggcattgaggagaaggcagcggacaaagaggtaaagaaggcgtataggcagaaggccctctcctgccacccagacaaaaatccagataatcccagagcagctgaactcttccaccagctttctcaggccttggaggtgctgaccgatgctgcagccagggctgcatatgacaaggtcaggaaagccaagaagcaagcagcagagaggacccagaaacttgatgagaaaaggaagaaagtgaagcttgacctggaggcccgggagcggcaggcccagggccagggagagtgaggaggaaggagggagagccggagcaccaggacattagagcaagagatcgaacgcctgagagaaaagggttcccggcagctggaagaacagcagaggctcatcg

SEQ ID NO: 141659 - DNA, 966 bp, Homo sapiens
atggcagtgaccaaggagctcttacagatggacctgtacgcgctgctaggcattgaggagaaggcagcggacaaagagataggttgccccagtttatatgcccaccaagaatgtgtagagtacctgtcttcgagtggctgtcgagaaagcggggtactgtgctcctgcctgttgcagcagcccctggacatctgcagtgctgaactcttccaccagctttctcaggccttggaggtgctgaccgatgctgcagccagggctgcatatgacaaggtcaggaaagccaagaagcaagcagcagagaggacccagaaacttgatgagaaaaggaagaaagtgaagcttgacctggaggcccgggagcggcaggcccaggcccaggagagtgaggaggaagaggagagccggagcaccaggacactagagcaagaggtgagcactcaggcacactggccagaaggccacctgcaggaggaggagatcgaacgcctgagagaagagggttcccggcagctggaggaacagcagaggctcatccgggagcagatacgccaggagcgtgaccagaggttgagaggaaaggcagaaaatactgaaggccaaggaacccccaaactaaagctaaaatggaagtgcaagaaggaggatgagtcaaaaggtggctactccaaagacgtcctcctacggcttttgcagaagtatggtgaggttctcaacctggtgctttccagtaagaagccaggcactgctgtggtggagtttgcaaccgtcaaggcagcggagctggctgtccagaatgaagttggcctggtggataaccctctgaagatttcctggttggagggacagccccaggatgccgtgggccgcagccactcaggactgtcaaagcacttcagttttctggatgtgtctctggctgccccagaaagggaccgactgtcaagaggcaatatctcctcttga

SEQ ID NO: 141660 - DNA, 384 bp, Homo sapiens
gaagagattaaaattgtgggctctagaatcaaacctgattcttccagttactattaacattgccatttctcatgtgtgaaatgggaacagtgacctcacagggtcattgtgagaattaaattcacagtacctagaacagtgccaggtatggagtgagtcccccggggttgttagctttggtgagtgtcaaccactgccctggcctctcccaccttgagcaccagcactgctacagatgccactccccaggcccctccttccccactgctcttctcatctcagtgaaccacagcaatgcgaggcaacactcaaccctcgatgtgtccaggtgccaggcaggcatcttacttgtcgtgtctcacttgatcctggctacagcccttt

SEQ ID NO: 141661 - DNA, 715 bp, Homo sapiens
cttcgatgtggaagctgcggcgtttgaggctctcctcctgcttgcgaatctggagctgcacgatttctgtctccttgcgctgggtctccacctcctgctgcatccgctccagttcagccttgtctgatttctgcttttcctccatttcttctatgagtttccttttactttctaatttttcaagttcttcacgctgttgcctctcaaattcaagtccggggttatacaacatgactgcagacaggttctcacgggacttcgagaggtcggtcatggacaagctgaaggaggacagaaggccactcttcctcttctccctgagcttggcggcttcctttggatggttaaagcgaaacatattggttcttcccaagagaatcacagcaccttgatttagatgtgtggcctccacgatctgaacaccattcacagagcactgggacccactcaggggtatcagagtcactgtccccccgatattttcaaagatgcaatgctcactctccaagtcaaggccatgaagaacaatatcttgctccgtggaagcatcgtctctaccaacgtatgtctgaccttcctttaaatgatataagatgattccagtactcaaaaggtcatcatcgatgccaatcaaatgaggcagttcagaatccaaaacaactccaatcccttctttcctgagggctagagtttgttccatggttgaactgtgcat

SEQ ID NO: 141662 - DNA, 5312 bp, Homo sapiens
atgaacgaacttgttacttcgtgttacttggctccttcagcttaccttcatcgtgtctgcagatgtactgcagccttcactaatcacacgatgcaaatcctgaaggcgtctttggacttcttcttcaatgtgtgtgccctccacttggccatagaccttgggatttcctgtcatggagaaaatcaccttgatgacatggtggcctccagggatgctcagagtccaactgcaccgtacagaaaggctcacagagcattcaaaagcacacagagatgtagaggaaggaggggtgctgtgattctcttgggaagaaccaatatgtttcgctttaaccatccaaaggaagccgccaagctcagggagaagaggaagagtggccttctgtcctccttcagcttgtccatgaccgacctctcgaagtcccgtgagaacctgtctgcagtcatgttgtataaccccggcctttttggcaccatggaccaagtttcgtggaagacagttttttcagagacagggacagaggagggggatggatggtttcgggatcaaactcttccacctcagataattagtgaaccacagcaatgcgaggcaacactcagccctcgatgtgtccaggtgccaggcaggcatcttacttgtcgtgtctcacttgatcctggctacagccctttgagacttgaatttgagaggcaacagcgtgaagaacttgaaaaattagaaagtaaaaggaaactcatagaagaaatggaggaaaagcagaaatcagacaaggctgaactggagcggatgcagcaggaggtggagacccagcgcaaggagacagaaatcgtgcagctccagattcgcaagcaggaggagagcctcaaacgccgcagcttccacatcgagaacaagctaaaggatttacttgcggagaaggaaaaatttgaagaggagaggctgagggaacagcaggaaatcgagctgcagaagaagagacaagaagaagagacctttctccgcgtccaagaagaactccaacgactcaaagaactcaacaacaacgagaaggctgagaagtttcagatatttcaagaactggaccagctccaaaaggaaaaagatgaacagtatgccaagcttgaactggaaaaaaagagactagaggagcaggagaaggagcaggtcatgctcgtggcccatctggaagagcagctccgagagaagcaggagatgatccagctcctgcggcgtggggaggtacagtgggtggaagaggagaagagggacctggaaggcattcgggaatccctcctgcgggtgaaggaggctcgtgccggaggggatgaagatggcgaggagttagaaaaggctcaactgcgtttcttcgaattcaagagaaggcagcttgtcaagctagtgaacttggagaaggacctggttcagcagaaagacatcctgaaaaaagaagtccaagaagaacaggagatcctagagtgtttaaaatgtgaacatgacaaagaatctagattgttggaaaaacatgatgagagtgtcacagatgtcacggaagtgcctcaagatttcgagaaaataaagcccggtgaaggaccaggctgcaatataaagaacgccagctacagtacctcctgcagaatcacttgccaactctgttggaagaaaagcagagagcatttgaaattcttgacagaggccctctcagcttagacaacactctttatcaagtagaaaaggaaatggaagaaaaagaagaacagcttgcacagtaccaggccaatgcaaaccagctgcaaaagctccaagccacctttgaattcactgccaacattgcacgtcaggaggaaaaagtgaggaaaaaggaaaaggagattttggagtccagagagaagcagcagagagaggcgctggagcgggccctggccaggctggagaggagacattctgcgctgcagaggcactccaccctgggcatggagattgaagagcagaggcagaaacttgccagtctgaacagtggcagcagagagcagtcagggctccaggctagcctggaggctgagcaggaagccctggagaaggaccaggagaggttagaatatgaaatccagcagctgaaacagaagatttatgaggtcgatggtgttcaaaaagatcatcatgggaccctggaagggaaggtggcttcttccagcttgccagtcagtgctgaaaaatcacacctggttcccctcatggatgccaggttcaatgcttacattgaagaagaagtccaaagacgccttcaggatttgcatcgtgtgattagtgaaggctgcagtacatcttcagacacgatgaaggataatgagaaacttcacaatggcaccattcaacgtaaactaaaatatgagaaaaggcagttttgcccagcatggtatcttgacccgcttctgcccagagatgccactgacacttccagcctcattaaagaggagaggagggaggtggatcagaacgaccactgggatcatcccatgctgtggagcgtctcaggccctaaaacaacttcctcagcatcacaagagagaactcaccagcagagggatcagtcctcagtacccgaggtattccaggacagtgaaaacaaatatggtcatcctgagcatgctggccattttgaaccaaaatgttttaatctacctaaaatctcttttcttaacgaaagtaacaccgatgatgcagaagattttcagagtcagtcagaaaatttcagttgagctgatgactcataaagataatcatggctggagagtcaagtccagttggactttgctgcatcatacgtcccaagaagtgtctataaatagcggaggcaagcatgccaggcaaggcaaggtgctctgcttggttctgtctgaaggcattttccatgaagagagagcttccttgcatgtccctcataacgtactggcgtctgagttttatagtgagcagcaaggtcaggaagagttggatgctaaaaaaatgagctcatcggagtcactggtcaatatcagaacagaagtaaccaatgggctgggatctttttaccacaagttttcagacctttataaagattccagcagtcacttgtttcaggatggcacaaaggtgatcagccaagccaggcttgtggggaatctgtgtgcacagagggggttccccttccgggtagcaacattcgtcagaagccccccatttctgaagcacttagccccacacatgcccttgaagactgacatgcagtcaacagaatctcattctccggaagctcgggttggcagcagcgagagcgaagctgcagggagcctgaggccagcagagggtgcggcgccttaccgggcctctgtctttgcagctacaggtttaccaggttcctcgccaagctcagtttttcgccttgaatatgaagatgctagaaagagctctgcatttaagcagagccttgtgcaattcccggaccaaatgctgaaactgcaagagtgccctttaaaagaccttcttaggcatgtgacttgttctctaccagaacctttgggcaacatgaaggaagtcaaaggcatttactggcttgctgttgctgttctgctcagcacctgaccctcaaccagcgagattgctcctgcttcagtcaactttatatgctttgggcctgccagataatctcggctcaatgagcattattcatgctctacctctctctggtctacaggagattcagattggctttggtggacagagtgttcgattcctgagctctgcagagggtcttctgctcactgtattcagttataacaaatacctctctcaacagctgggtcgtgacctcctgtgtgtcctgatgccagagcctgatgccgctgcctgcgctaatcatcccttgctccagcaagatctggttcagctttctcttgattggaaaacagaaatccctgatttagttttgccaaatgggagttcaggtgtcatccaaattccaggactaccttgggttggacatgatttactttcttcatggaaatatggaagtcaatgtcccttccctggcagaagttcagttactgctctacacaacagtgaaagtcatgggtgactctggccatgaccagtgccagtcgctagtccttctgaacacccacattgcactggtgaaggaagactgtgttttttatccacgcattcgatctcgaaacatacctcctccgggtgcacaatttgatgtgatcaaatgccatgctttaagtgaattcaggtgtgttgttgttccagaaaagaaaaatgtgtcaacagtagaactagtcttcttacagaaactcaaaccttcagtgggttccagaaatagtccacctgagcaccttcaggaagccccaaatgtccagttgttcaccaccccattgtatcttcaaggcagtcagaatgtcgcacctgagattggagtggctgtgctgtacgctgcaggtcatctgttgctcaaccagggtcggtctgctccacacatatcattttgggacctattcagaaggggcagtagccatcgtggtgatgacagaaacacagaagggcagtcctgcaagcctttgcctgtgtctgctaacatctcattggccaacacaagtcacatgaccaagccccaaatcaaggggcaaggaagtaccctccgtccatcaagaggccatgatgacctgaaggacccaattaaaattagtatcccacgctacgtcctctgcgggcaaggaaaggatgcacacttcgagtttgaggtcaaggaatcttcactctccaagctccatacacctcccatttgtgttacccacagacgggcagatcgaggactggcattggactgccctttccttgtgcaatgtgctgtctttagaaccaggctcttcctgcagaggcccagcttcttccctcaagtacctttgaacagaatttctgcagttggtcaagcttcaggttcacagggcccactgcactggagggggaagcctgcttggattaggaactgttacacagttgcggacatggtccagatggcaactgttcccttgccttgtgtccctggatggctgctgaccaagtctctctttctttactcccacctggctgcagagctctgccctcctttgggctccccagaaggagaagccggtgaacgttcccaaagtgtccctaatggagccagaggaggggatacattgcagatacatctcagagcaaataacttaaaataccccattagactattgtgttctcccaagagcaccagcctttccgttcctcctgcctag

SEQ ID NO: 141663 - DNA, 4002 bp, Homo sapiens
cggcgtgtttccctctctccgcgcggattttagccggaactgcggcagtctctccctgccaggctcttcatccaaggtttctggggatcccttctgaagttctatctgaaaattgcgcttaagtgaattttctgttagaagaacttggttgctactttcttgtcaagatgattgcaacacctttgaaacattcaagaatttacttacctccagaggcatcttctcaaaggagaaatctacccatggatgcaatcttttttgacagcattccttcaggcacacttactcctgtaaaagatttggtgaaatatcagaactcctccttaaaattgaatgaccataaaaagaatcagttcctaaaaatgacaacttttaacaataaaaatatatttcaatcaactatgctaacagaggctactacctctaacagttctcttgatatcagtgctataaagcccaacaaggatggattaaaaaataaagcaaactatgaatcaccaggaaaaatatttctaagaatgaaagaaaaagtactgcgtgacaagcaagaacagccatcaagaaacagtagtttgttggaaccacagaaaagtggaaataatgaaaccttcactcctaacagagttgaaaaaaaaaaattgcagcatacctacctatgtgaagaaaaggaaaacaacaaatcattccagtcagatgacagttcactaagagaacttccaactctgaaccaagaacaggaaaattttttggctgtagaagcccgaaacaagacattaactagagctcagttggctaaacaaatttttcactcaaaggagagtatagttgcaaccactaaatccaaaaaggacacgtttgttttagaaagcgttgattctgctgatgaacaatttcaaaatactaatgctgagactctcagtactaattgtattcctattaaaaatggcagcctgttaatggtttctgatagtgagaggacaacagaagggacttcgcaacagaaagttaaggaaggaaatggaaaaacagtgcctggagagacaggtcttccaggttccatgaaagatacatgtaaaattgtacttgcaacaccaagacttcatataacaatacctcggagagacgtcactaacatatattggcacagtaatgtaattatagagcggattgagcacaacaaacttaggactatatcaggcaacgtttatatattaaaaggcatgatagaccaaatttccatgaaagaagcagctaatttgagattttggtctttggttttgtcttatgaaattaaagagacaactgaagaattggatgtatccattgatattctaacctcaagggaacagtttttctcagatgaagaaagaaaatacatggccatcaatcagaagaaagcttatattttagtaacaccacttaaatctagaaaagtgatagagcaaagatgcatgaggtataatctgtccgctggcaccatcaaagcagtaacagattttgtaataccagagtgtcaaaaaaaaagtcccatcagcaagtccatggggactttagaaaatacatttgaaggtcataaaagtaaaaacaaggaagattgcgatgaacgtgacttacttactgtcaaccggaaaataaaaatatctaaccttgaaaaggaacaaatgctcacctctgactttaagaaaaataccagactattaccaaaattgaagaaaatagaaaatcaggtagctatgtcattttataagcatcagtcctcaccagatttgtcaagtgaagaaagtgaaacagaaaaggaaattaaaaggaaagctgaagttaagaaaaccaaagcaggaaacaccaaagaagcagtggttcacctgagaaagagcacaagaaacacaagtaatattccagtgattttggaacctgaaactgaagaaagtgaaaatgaattttatatcaaacaaaagaaagctagaccttccgtcaaagaaactcttcagaagtctggtgttaggaaagagtttccaattactgaggcagtaggatctgataagacaaataggcatcccttagaatgcttacctggtttaattcaggataaggaatggaatgagaaggagttacagaaacttcattgtgcttttgcatctcttccaaagcacaaacctggtttctggtcagaggtagctgcggctgtaggttctcgatctcctgaagaatgccagaggaaatacatggaaaatcccagaggaaaaggatcccagaaacatgtcactaagaagaagccagccaattccaaaggccaaaatggcaacgagaggtgatgctgatcagaaacaaactattaagataactgccaaagtgggaactcttaaaaggaagcaacagatggagggaatttctgggaacagttgccaaaagatgaccatgatgattttttcagtacaacacctttacagcatcaaagaatactgttaacctgctgtaacattcccacttctgcaagtcaccagtcaagtgaagctttggaagcagcagatgctgtgacagaaatagaaaaggaggttctgcaagacaaaggcaccttggctattgctggaagctcccctaatgttcttactacagggtcagctagccatgagcagctggcactcacaggtggctccatggccctatccaacagaagatcagatagtttccaggacagtgaagatgatgatgatattctgccaaatatggacaaaaatccaacaactccatcatcagttatctttccattggtaaaaactcctcaatgtcagcatgtcagtcctggcatgctaggttctataaataggaatgactgtgataaatatgtttttcgtatgcaaaaatatcataaaagtaatggtggtattgtctggggcaacatcaagaaaaaattagttgaaactgatttctcaactccaacaccaagaaggaaaaccccatttaacacagacttaggagaaaactctggtattggaaaacttttcactaatgctgtggaatccttaggatgaggacgagaaagattattatttttcgaactctgattctgcatagtaaaatgagaaaatatgattcctgggatttttaccataaagcagaccagtgtttgtattttcaactggagctacatgtattttctttgtaaagtagcttcctatgaaaatgtggacttttttgaaggtttcatatgtttgtgttcaaagtaaaatatcctcattgctgcagcttactaaaaatgtaaagaaaattgtttttgctcgtgtagatatctgtaaatttgtttttgcatattaaaatatatatagataattttttaataagcatccaagtctgtttactttaagaaaaccatttcccaaacagatttttttcctatttcaagaaaattttgctaccatttaagtaagagaaggtgagaaggatgacagaggttgtattggtagctattgaattcatgaaaacttttaagttagcatttgttagcagttattatccaagccagagtaggatttgttaccagttgttatccaaacctaatgtttaaattacacattgttgaaattaaattacacattgttgacatgcttctctcctgattgtttttattttaaacttgtgataggcatatctatgaaacctttgtaaatttagtttattgctttaccattattttactaggtaaaattagagaacagattttgttctctaatttttaagccttatttacatatgcagaaacagcttaaatattttgactagattagacaaacagttaatagatccaccattaggaatcaatatattatgtcataataaacatcctttttctttcactgaaatttcttttagaaataaacttatttttgcttgttatgttttgaaacttgacataggatattttccctctggctacacattcacctacccttgttctctatttagattattcaaataaagttagtttgcttttatagtaaaaaaaaa

SEQ ID NO: 141664 - DNA, 1812 bp, Homo sapiens
atggggccctcatggagaatctctgtgagggcagtgtggaagggaagtgtggcgtcggaaaccccacacagagtccctactggggcacctcctaatggagctgtgagaagagggccatcatcctccagaccccagaatggtagatccactgacagcttgcaccgtgtacctggaaaagccacagacactcaacgccagcctgtgaaagcagctgggagggaggctgtaccctgcaaagccacaggggcagagctgcccaagaccatgggaacccacctcttgcatcagtgtgacctggatggcccaccgcccgggtccctctgtaaggcgcttctccggcagacaccccgagccaaagcgggccgtaccgcagcgttgggcacttgggtggagagtgcaagggcggcgggcctgcgcccagacaggtgtagccgtcccacgctaggtgtcctcctgccgctccctggccgcgccatgcctcgaggcatggaggtgctggacctgccggtgtgcaaccgcgcctcgggcctgtcctgggggccgcaccacagggctccaacttcggcggacgcgttacggcgagggcgaaatgagtcggccgtgaacggtgtttcctgttccgaatcccgagagccctggaaagttttgaaggaggaggcatggcccggcagccttatcgttttccccaggcaaggattccggagagaggatcaggtgttttcagatgtggtggaaatacccagaaaactagaagagaagcctgaagatgtgacagaattgctgcaatctcatgatcaaactagaatggatgaggagttgtttgttatggatgagcaacgaaagtggtttcttgagatggaatctactcttggtgaagatgctatgaacattgttgaaatgacaacacataatttagcatattccgtaaacatagttgataaaacagcagcaaggtttgagaggactgactccaattttgaaagaagttctactgtagccctcaaacatcagactccaagttcttcagttttagaactcggactggctctccttgctcctcaacctgcagatggcttattgtgggaccttgtgatcatggcagtgggctcccttctggcccacggaaggtccagaaatgccatccaagagtcagctcttagaactggggactccaggagcccacttgttgctccaccccccaatagccgagatgaacctgaagccagcaagtctcagaggctcacccaaggccctagatgtagtacctgggtatcgctgctgattattcagtgcccaagggctcttcagttagcaggtgatgaatgctgccaggaatgggttcttcccttcaaggcagtaggttcccttctggcccaggggaggctcacagaactcagggaaacacatttactggtttattgtaaaggttgttacaagggatacagtgaagaatacatgagaaatgcaatggcacatcgtgattctgagatgaaagaagaatgtctaagggaagacctgaagttttacttcatgagcccttgtgaaaaataccgagccagacgccagattccgtggaaactgggtttgcagattttgaagatagtcatggtcaccacacagcttgttcgttttggtttaagtaaccagctggtggttgctttcaaagaagataacactgttgcttttaagcacttgtttttgaaaggatattctggtacagatgaagatgactacagctgcagtgtatatactcaagaggatgcctatgagagcatcttttttgctattaatcaggcaagtgttttgttgtga

SEQ ID NO: 141665 - DNA, 601 bp, Homo sapiens
  misc_feature (1)...(601): n = a,t,c or g
cttgtcntgacagacccggatgctcccagcaggaaggatcccaatacagagaatgggcatcatttcctggtggtcancatgaaggncaatgacatcagcagtggcacagtcntctccgattatgtgggctcgggcctcccaaggcacaggcttccaccgctatgtctggcacgtgttaccaggccgagtgggatgactatgtgcccaaactgtacgagcagctgtctgggaagtagggggttagcttggggacctgaactgtcctggaggccccaagccatgttccccagttcagtgttgcatgtataatagatttctcctcttcctgccccccttggcatgggtgagacctgaccagtcagatggtagttgagggtgacttttcctgctgcctggcctttataattttactcactcactctgatttatgttttgatcaaatttgaacttcattttggggggtattttggtactgtgatggggtcatcaaattattaatctgaaaatagcaacccagaatgtaaaaaagaaaaaactggggggaaaaagaccaggtctacagtgatagagcaaagcatcaaagaatctttaagggaggttt

SEQ ID NO: 141666 - DNA, 598 bp, Homo sapiens
  misc_feature (1)...(598): n = a,t,c or g
ggggtcggggtggaccgagctgggcaaagtctgacgcccacccaggttaagaatagacccaccagcatttcgtggtatgtctttgattcaggaagctctacaccttgtcctgacagacccggatgctccagcaggggatgatcccaaatacagagaatggcatcatttcctggtggtcaacatgaagggcaatgacatcagcaatggcacagtcctctccgattatgnntgtgctgcgcctcccaaggccccaagccatgttccccagttcagtgttgcatgtataatagatttctcctcttcctgccccccttggcatgggtgagacctgaccagtcagatggtagttgagggtgacttttcctgctgcctggcctttataattttactcactcactctgatttatgttttgatcaaatttgaacttcattttggggggtattttggtactgtgatggggtcatcaaattattaatctgaaaatagcaacccagaatgtaaaaaagaaaaaactggggggaaaaagaccaggtctacagtgatagagcaaagcatcaaagaatctttaaggaaggtttaaaaaaaaaaaaaaaaaaa

SEQ ID NO: 141667 - DNA, 609 bp, Homo sapiens
atgtggctccaagttaggtgctctttacattatgtggggggattggctgctgctgtgttgtacaattcctccaagagccgtgaggtgtggagccctgacagcgtcgtcctgttacctcaggtgcaagtcattaaaaaaggagttacctcccaaaagaaagaaatacgattgcgcagactgccagaacagcccaagttcttcacccaggttccggcggggtcaggagcctttagcatttctcaaggaatgcagttttgcccacagatgcttcgaaaacccaagtttcctgatcgttgctatgacacacccaggattaagcgagcgtatgcgagaagcgctctgcaaaccgccaggcaaacggcaacgaagaaactgcctcacaaacaatacctgaatgaggcgggggccgaagaacttgctgacaatgggcaccggtcaatgctcgggcacaggccgctgaaatgtgacgagcccatcctcagcaaccgctccggagaccaccgtggcaaattcaaggtggcgtccccccgtaaaaagtacgcgctcggggtcccggtggccggcacgtgttaccaggccgagtgggaccactatgtgcccaaaatgtag

SEQ ID NO: 141668 - DNA, 1513 bp, Homo sapiens
gagccagtgtgctgagctctccgcgtcgcctctgtcgcccgcgcctggcctaccgcggcactcccggctgcacgctctgcttggcctcgccatgccggtggacctcagcaagtggtccgggcccttgagcctgcaagaagtggacgagcagccgcagcacccgctgcatgtcacctacgccggggcggcggtggacgagctgggcaaagtgctgacgcccacccaggttaagaatagacccaccagcatttcgtgggatggtcttgattcagggaagctctacaccttggtcctgacagacccggatgctcccagcaggaaggatcccaaatacagagaatgggcatcatttcttgggtggtcaacatgaagggcaaatgacatcagcagtggcacagtcctctccggaatagtggggctcggggccttcccaagggcacaggcctccaccgctatgtctggctggtttacgagcagggacaggccgctaaagtgtgacgagcccatccttcagcaacccgatctggagaccaccgtggcaaaattcaaaggtgggcgtcccttcccgtaaaaaagtaatgaagctccagggcccccggtggctgggcaccgtgttacccccagcccgaagtgggatgaaccaatgtgcccccaaactgtaacgaagcagctgtcctggggaaagtagggggttaagcttgggggaccctgaactggcccctggaggcccccaagcccatgttcccccagtttcagtgtttgcatgtataatagatttctcctctttcctgccccccctttggcaatgggtgagaccctgacccagtcaagatggtaagttgaggggtgacttttccctgctgccctggccctttataattttactcactcactctgatttaatgtttttgatcgaaatttgaacttcatttttgggggggtatttttggtactgtgatgggggtcatcaaatttattaaatctggaaatatagcaacccagaatgtaaaaaaagaaaaaaactgggggggaaaaaaagacccaggtctacagtgatagagcaaaagcatcaaaagaatcttttaagggaggtttaaaaaaaaaaaaaaaaaaaaaagattggttgcctctgcctttgtgatcctgagtccagaatggtacacaatgtgattttatggtgatgtcactcacctagacaaccagaggctggcattgaggctaacctccaacacagtgcatctcagatgccctcagtaggcattcagtatgtcactctggtccctttaaagagcaatcctggaagaagcaggagggagggtggctttgctgttgttgggacatggcaatctagaccggtagcagcgcctcgctgacagcttgggaggaaacctgagatctgtgttttttaaattgatcgttcttcatgggggtaagaaaagctggtctggagttgctgaatgttgcattaattgtgctgtttgcttgtagttgaataaaaatagaaacctgaatg

SEQ ID NO: 141669 - DNA, 1446 bp, Homo sapiens
atgaactgcggcagggctacacccgagagtcgcatcctgcagttaatctggaagcagcagatgtacctgcgtcaacaggaaggattttggaaacatgcagggggcatgagaagagaggctgctgagggtctgtgccataggaagcctctactgacaaatgttaaacagaaggtggcaatagaccgttcctacagatgccttcagctgcagcagaagaaatacaggcatgtggaatccataccaaccccgggaaaggagggcagggagcggaactgggagaatgaaggggcccccactgtatctgagatgttttcgttctctgaagcaaacacagaaaaactgtcctgcacggagcagctgccgcccaatctctgctcgtggagacgagcgttggtcactggccatgaaacccttcgtgaagtttttgaaataaaaataataataacagatagttggggactggagcagcgggaggctgggctgtttatgctgtgtttttggttgcacgtgtttttggttgttggtgtttttctctgcccctcggtatttccttccgaaatgggtgaactcgggcatgagtctccactcaccaaaggatcctcccacgtctgtgtggcctgggcgccgcctttcattgaggaagctgggccgccatctggaggcgcctcgcacgcgggacacgcatggaggacctgccaggtgcctgttggtggccgcctgtccccagggcgttctgactcagggacagctttcagcgactacacggcagaagtggagtgtgaaaaggaaaaagctttgccctctgagctcaactctgatccctttcaggaaccaccggtcctcctgttgtacgtccttgccctgtgctgggtgctgttccaggtgcctgccaagtgtcatctcacgcagccctccaggcctagcgggagggaggcccaggcatctcagcagaggctatggggtgtctgcttcatgcagctcctgctgtctaaccccgagctcgccaagaaactgcgtgtttatgacctggcttctgcacagacatttcaaagcaagagactgtgcagaccctacctgcgcttcatcctgcaagcagccggccacgccacacagcctgctcccagaactcagggtggctgcaacggaagttcgcacatgtgtgagctcagggacgtttccttttatcaacaagtgcgaagcaagttggtcaagaaaggcccacggtgcgtggctgagagcagccgaatggagggagcagacgcttgctggatggagacgccgccgctcgctgcattgctgatgtgtgaggacgcgtggatttcctttccttgctttgcctggcgaggctgccctcgcatcccgacgtgtttaacacaggacaccagcttctccaccgggaggaagccttgcgttctgagctcagcgacgctgaacttgttcctgtag

SEQ ID NO: 141670 - DNA, 1785 bp, Homo sapiens
tagggtgaagcagaggacctcagtgctgaacatgctaaggaggttggacaaaatcaggttcagaggtcacaagagagatgacttcctcgatctagcggagtctccaaatgcctcggacaccgaatgcagcgacgaaatccccctgaaggtaccgcggacctcgccccgggacagcgagggggttgcaggtattggtctggttggagcagcaggaggtagggctgtgggatcatgggagtcttcacctggggcagaacatctggatttggggggcatcagggatccccttcggggggacggcagtctcgtccacccccaggcctgctttaaggatcaaatgagataataagtgaaacgtacgtggctggcgtcttgcttatggttagcttggagggagttgtaattattaatgaccgtgaaatactgagctccaggagctcttccgtggcggaccccaagcagcctcactcctggcagcggctcaggatctcaccctgggatgttcgtcacttcagctaatctgtccccactgagggatcgcaggtgcttgtgggatgggtagaacctcacagcctgtgtcctttcgtctcctggggaccggggatgggtagaacctcacggcctgtgtcctttcgtctcctggggaccggggatgggtagaacctcacggcttcctgtgggaatagagctgtttaaagtgtggctccctctcctgccctccctggggagccccccacctaatgaaggtggggacttggatgaggtggcatggatgcccgtcctctctttgtccctgacttccaggtagcctttgctcatgtctgtcccagggaagggctggctgtgtggggctgtttcaggggctcctgatgaaggctgctcctggcccgggagcccagcaactggggggctttgcagtgtgcctcctcctggctgcgtgtgggagcgcccaggcccttgcccactcaggtgaaccttttccaggctgtctatgtcagagccaccttcatggggacgtttagcccccggggtctgtcctggggccccagctggggtcctagtctagtgctgggacagaccccaagcagctcccacagggtccgtccagcgggcgggacagatggaatcaccctgcctccactcatgccctgggaactcttgccccagcagcgagagcagctgaaagtgtgggaggtcgggcacccagaacggggcagccacagccagagtgccctgcctagaagctgctggttcccgaagccagcgccttattcctgggctgtggccacagcgtgggtgatacatgtgcaaggagccgttgcggtgctgctccgggtggccttgttgaagccgcacacctgttacctggctctggaggaggaagtctgaggacccagctggagaaatcgggtcgctgctgtcctgtggtgggacactcactcgtgtgctgtccctcaccaggtccctggcaggatgcaacgtggagggcgactgtgtggcatccagtgtggggcccaggcaggcctggctgtgccgggcatggcccctgctttctgtcccatcagcagggtgtggaacggccgcctgtgcccagtccctgggctccaggcatcgggcagctgtagcctgtaactcgagcccgtcctggcttgctggggctgtgagcgcatagctcagcagacgctagttaagtcatcaaccaccagaggctgccttatccgctgaacctcacgaattgcctttctgtgagttgaagtggttgaatattgacggtttttctgcctg

SEQ ID NO: 141671 - DNA, 594 bp, Homo sapiens; identical to SEQ ID NO: 126062

SEQ ID NO: 141672 - DNA, 1476 bp, Homo sapiens
tcacatcaaccagggttgctcttctccttgcacagctgggtggtcagtatgaccagtccttgcagcattcacttcactgtgtttgcagctcttcccacatctagccaacaccacacattcagactcatccttaagtggctcaggagtttcttccttatatactttgtaccaccctaaaaactctctcttccccactgatgcactgaggtccaccagaactaccttaggaattgccacctcatattcatgatcattatcatcaatgtccataactgccttcatgtagaagcccagcaagctcttgaacccagagccgggatgccttccagagccggctgctgccaagacccacactcggtcatcagaggagagctgccacgggatgcccataccaggtggacaccatcccatgtggccagggtccatcttcagcagttgtggattgaggcctttgtccttgtctgtgctgatttgagaggtactggagaaaggctgtggtgtcttggtcttcgtctccagtgttagccactggccgccaatctgttttctaaagtggctgcaccatttcacattcccaccagcagtgatgagggttttttcctccatccttgctaacacttgttcttgtctgtagattttatcatagccatcccggatgttctttttagatgtggcattttgagcgtcatgatttggagagttgctgtgactgtgccgagcttcatacagaaatccaagcaaagctcttgaatccagaatcaggatgccttccagagccagctgtttcaagacgctgctagaggcagtgaagagcgcaggaggcctgcctagcagtctgatggtagtttcttttgctgtgcagaagctctttagtttaattagatcccatttgtcaattttggcttttgttgccattgcttttggtgttttagtcatgaagtccttgcccatgcctatggcctgaatggtattgcctaggttttcttctagggtttttatggttttaggtctaacatttaagtctttaatccatcttgaattaatttttgtatgagatgtaaggaagggatccagtttcagctttctacatatggctagccagttttcccagcaccatttattaaatagggaatcctttccccatttcttgtttttgtcaggtttgtcaaagatcagatggttgtagatatgcagcattatttctgaggactctgttctgttccattggtctatatctctgttttggtaccagtaccatgctgttttggttactgtagccttgtagtatagtttgaagtcaggtagtgtgatgcctccagctttgttcttttggcttaggactgacttgccaatgcaggctcttttttggttccatatgaaccttaaagtagtttttcccaattctgtgaagaaagtcactggtagcttgatggggatggcattgaatctataaattaccttgggcagtatggccat

SEQ ID NO: 141673 - DNA, 875 bp, Homo sapiens
agaattcccgggtcgacgatttcgttgttaaactgacaaagcccacgtctccgggtccctgtctcggggagtcgggactattggggcaccccgcgtagtcgagactttaaactgagctgtctcggtcactcaggaggcagttggcagagtattcgtggtcagggaggtgacccgtggtcagcagggtcaggccacccagggacaaagggtgctcctgcaccgggccttggagaaggacagagcggtggggacttggggtcagcgggggagcctccgcggcatggggagtcaccacctgccggcaatcagccatgactgcctttgcactgtccatgctctcagcccaccacctcctccccctgccattgcagtggctaacactggagacgaagaccaagacaccacagcctttcgtccagtacctctcaaatcagcacagacaaggacaaaggcctcaatccacaactgctgaagatggaccctggccacatgggatggtcagacacgcctgcccagctatctgcaggcgaagaggctcagaagaggtttaggtgcctgaaggacatcttgcttccatgtccatatgagcaggctatttctgctccatgagtcaattttgccatataaaatacttaatttcagccattccagggtgctgtaggatgcacagcttcccatcagcccacctgaactccagccatgccattttaataccaggaataaggtcacctgctttcctgccccttaggaggccagagccgtggaagcaaaatggcacttctgtttacctgttatattatttttttgtcatccttatatgcttggaaaatgcaattatatgaaaaaagtttagtaattacagacataacagcaaa

SEQ ID NO: 141674 - DNA, 2650 bp, Homo sapiens
ctaaagggcgcaggggatacggcaacccagacccacatgcttacgtacttgcagactcgcccaggcacacgtgtatcgccacatgcagacacgcaagcatacacttgctgcactcagacctcctggtgtgaacacacggtgtgcaccgtcggagatagccagtggcccccacgtacatgccatccctcaggcacagagaaccagcccacaggtcccacttggagggacatgaagcagacagggtccccaggctgtatgcttctcctaggccggtgtccaccacagtcagccacatacatctgctgccatgacacaggctccctttgtgccataggatccaagatgacactccatcacataggcttctagcctgcacgaagttggggagagagggccccagaagcaggttctctccttttaaggacaccatctggaagtcacagacaatgcttttgctcatatcccattggccagaactgttagacatgtagctatacttagttgaggtcccccactgactgcagacagcaaccaagctgtcctgggcctgtggtgtcacctggtggtcagccttggaacttgtcttggagctgagatctgaattcagcttcatccatcttagtctgaagatcttcacttcctccccttcctccgcctctagcccacgtccatcccgtgtgcgacaggattccatagagctggggcccctatacacggggatgtctggctgtgttgggggccgggggtgtttggaataagcgagcaacagcggcacatccttggcatgacgggcccgcttccagccccctgggccctgtccaaagccacatggccagtatgtggccagcagggatgtcaactcaggtgagtcttcctctagcccagagttcttctgaccacacaaagactgccctctccgggcttctctctcttgtggatgtggactgtatgggtacacagggttgtgccagaggttccagatgctgcaggacaagcatggctcatcctggagagcatcaggtttgccagacatatgatctttgccctccaggaacttaaatcccccatgaacaatgaacttgtgatagtgaacagtacatagtctcttccataatgaaccctgggtttcagtctggtggtgccacatggtcttgaaggtactctggctgtgaggggccgctcccatgttgtcttccatctctgggacaagatggtaggttgggagtggggagctctggccgttggagccttggccaggattgaggcttgggtcactctccgcatcccaggtacacaggggctgtccagtcctcaccagcaggaggggagcaaatgtggcgccctgggcccggtcccagttagctgagctgcgtatctttaatcccttcacctcctcccacccctccaggctggctgggcctgggcctgcttcggagcccctgtgcccttcaccaggcctgtttacaaggcccaggacagccgccaaaaccccagctgtgtccctgtccttgtctgtctccagcggacatgactgacttggaaggaaggcgtgcccttgtctggagagaaaagagccaaagagagccagagatgcgaaccgggaagaaccaagcaggaggccagagacattgagtcccagctccctgcaaagtagtgctgaatttaccaggggctccaccagaaattcagacccctgggcataggtcccactctggcccacaggagccctcaacgccgcttgtgttttctgtggggcatctaccatgggccaaacacggtgctgagctccaaggcagactgacgtagctcctcctcccgcaaaaccatggcctgatgggagagaccggcgagtcaatggctgtttctcagtaggaggggagtcacaatcaaggtttgcacaggattcacctgtaggacactcagctctggtcaatctggttgtagattccatgctcttaatcaccatgtgggtttgagcatttggtgtctgggtcatggggcccttgtcacccgtggaagtctgagtgatgcccccacagatgttcatgtctttaggcccagaatctgtccatgacacctcgtatagggctttcacctgaaaggggaggtcgttttcaagatcaggtacctgaggaagaagcgggtcttcaaaatagaaggtgaacctgaggctgtacccctcagatgcatttgacatccggttcctttcctcctcaatccctgaagctttcattcccccacagtctgccttctctttccccttttcctgatccaatgaagggtctgggctggcagagacctgtgctgctttcagcctggggtgggcattgaggctgccaggaacattccttccctgcagtcctgcctgggataggcaaggccctgtctccagatgggcaaatgggggccctgggaactggggggatgcaggagcagctgagccgggaccagagtccaggccgaatgacttcacatccagagcatggtcttcaacctcccctgaaacctcatgaagcttggcttggcaggatgaggggtcacataagctcagtggtagttcagccaggaccaggttctgccaggtagggcactgagggcaggggagccagctgcgggagaggttgaggaaggtcacacgggcctgctccat

SEQ ID NO: 141675 - DNA, 610 bp, Homo sapiens
caagcaatctgtacctgcagtccttgtctgtaaccatggcaccctggcttctcacacatctcatcgtggagttccaccatgtgtcaggcatggcactgagcaccttcttttaagaatataatttgtaattatgtagattcttaattctacttcaaaatgccacacagccttcatgtgataaaatgaaacaattgctcaactgatctcctgggatctctactaagatgttggcagcccggccagctggtctggccctggacgtgccttcagggtctggttatgcttcatgacctgcattgtggtcagtgccattttgcagactttgatcacagtgaacacgttccacgggaacttgggccatgagaaacatccttcctaaccacgtgactgcagaaacatccttatcacatcctcctgggcaaaggcccaacagcctgactgcagggacatccttgccatatcctgctgggcagcaagctctaccacccagatccctccctcccagtcccatgattaccccagcctgtgagtggcagttggttctggcactaagctggtttcctcctccccagggttttgctggcaataaagatgttgctgttgaagccac

SEQ ID NO: 141676 - DNA, 1007 bp, Homo sapiens
tgtctggtacagtgtagatgctcaagggaagtttactttgtaaaaccacttacctgggagatgttactgttagtctaacctgtaccatttcgtaaacctccagccattttgcagactctgatcacagtgaaacgttccatgggaacttgggccatgagaaacatccttcctaaccacgtgactgcagaaacatctttattgccagcaaaaccctggggaggaggaaaccagcttagtgccagcaccaactgccactcacaggctggggtaatcatgggactgggagggagggatctgggtggtagagcttgctgcccagcaggatatggcaaggatgtccctgcagtcaggctgttgggcctttgcccaggaggacgcgataaggatgtttctgcagtcacgtggttaggaaggatgtttctcatggcccaagttcccatggaacgtttcactgtgatcagagtctgcaaaatggctgcccgttgcctaaccaggggaaaactcagggtggggtccacagaaacaatccctctggaaggggaaagggtgtttctcatccaaaaccaagggaaaacaccactcataaggagcagaggggcctgactgccacattccccaaagggaacaggctcctcagcccaggagctgaggtttcttcttgctgcttctagacttcttctagtcattaagcatgttgagccatttttctgtgcatccgatctgacatttttgctctcagatgaaacacgacaaagtaagctgagccaccaggattcctggagggaaccttggatgcttggtcttgggctccagggcactcccagggatggtgtgtcactcctacttgccatgaaatgtgcacaaaggctgtcctcctgcccatcccatcctgctggacaggatggaggaagtgagggaacaggcagcgtggacagttgtaaggcctcactgaccaggtccttactgacaaggcctcgctgatcaggttccaccgataatgaccccat

SEQ ID NO: 141677 - DNA, 641 bp, Homo sapiens
  misc_feature (1)...(641): n = a,t,c or g
ttttttttttccaagttgagtaactagttggggttattctgcatcctgcatccccggatgaagcaaacttttgtctttttccatctggaactcttaaagtggtgagatcatcaaaaggattgactgaagcagcaagcagaaaagcaccttcattcacaaaatgcaactggtgagtgctgcaggggccatgcaggcggctacagcttgcaaccatccagccaccgtgccagggtatcggagtactggcagtaccgggaccaggtgggccatgctcccatcccttcttttccttttacaatggtcttggcacatttaattgtcttctctaaattaggattcagtaaagcggaacatgacataatggcagcggttcctgccatggtcgccacaccagtcactgccacgcatctgaaagaggccaaaagccagtgtagccctcacgtgtgttctcgtagatggccacttgggttgaacttgctctcgaagtaggccaggcacacccagttctcaaggctatagccctcaaaataatccaggcctccatcgtggagtttcttagccactgtgcaacgccccaagatgtaagcaccacttggaaccaccangtagccaaggagggagagaaccacggatgccttcat

SEQ ID NO: 141678 - DNA, 2271 bp, Homo sapiens
atgggctccatggaagactcggttttgctgagtggagtacactggactgcagggggaggtcaggaggcttttgctttatccacagagggcaaactcatgccctcgccggggagccggctgccacctgctctcctcagagcctgcctcagtggcccctgtttgcccagagatgaagatctgctcattcgggtgtggcctgctcatacccgctccgcactgcacccctgggcgctcttcttccttgtccttggcattcatggagagcttgtggtggaccaggaactttccatacgacctgaagaggctgggacctctgggcggcgatgggtccctgcttgctccttcacagtatttctcttggcacagcctgatgtctttctccatttcagggcactgggggcagctgagggtggctttgtcttgacatgggtgacaaagagaatgttcataaaggcaccaaaagccagcctttggaagggctggtggactggtaggcgggtatatggtgggcaggagggtaacgggcatgacaatacccagctgcaggagaagctcatcagcaaattcacttattgcttatttgatgacagttcagttgggaagaggaggtttttgttcattcattcattcaacaaagtttcattgagcacctactctgtattaggttctgttctgagttctggggataatgaagagaaaaaaccagaccaggtttctgcattcctggtgcttacactcaggagcctggagaagatgaaggcatccgtggttctctccctccttggctacctggtggttccaagtggtgcttacatcttggggcgttgcacagtggctaagaaactccacgatggaggcctggattattttgagggctatagccttgagaactgggtgtgcctggcctacttcgagagcaagttcaaccccatggccatctacgagaacacacgtgagggctacactggctttggcctctttcagatgcgtggcagtgactggtgtggcgaccatggcaggaaccgctgccatatgtcatgttccgctttactgaatcctaatttagagaagacaattaaatgtgccaagaccattgtaaaaggaaaagaagggatgggagcatgcaatatgatcaatcctggatctgtgctattccaagcctcaggtcaccaggttatactcaaagagatggggatgggtgacacagaagacctgtgctgtggttatgtagaaggcaaccaaaggacagttatccagtactccactattaatagagctcatgaatcttggcattatcactacttaaaggtctctgccatcgctgtaacagctgctagtaccccactgtatagatgttgcaggcaccaggagaaaaggttagagaaactcagtgcagctgacttaggtggggctaaagagttggaaggaattttggaaggtgaagagcggagcagcactcaccagttgcatcttgtgaatgaaggtgcttttctgcttgctgcttcagtcaatccttttgatgatctcaccactttaagagttccagatggaaaaagacaaaagtttgcttcatccggggatgcaggatgcagaataaaccaaactagttactcaacttgggccaaagggttttccagaggctccgtggaattagttgctggcaaaattaacagaagagctacaggagcaagtcagccacctgtagggtttaccattgcgcctgtggtgcagggagtcagaaagtggctgctgcttctaggatgtctgaaatgtgtaggaaactgctgccaacttcccagcaactcagcagccttgagtgaggaaatcaatggcagcagggagagttggggtggtggagcagggacggcgatgaggggttggggggaggcggcatgtggagcaccaagggacggcaggtgtggagataaggatgcttcaccctctgtggctctccctccacagccttggggcaggcaccctgttgaggtggttgaggctaccagtgggaagtgcccacagccacatagggccaggtgctgctcatatagagagatccgcccccgccagaggaaactgactttggagaatgagtcactcgttggggtctggccctcagccataatagcagcctttgtgactgtggaggttggcacaggaacggtgatgcccgccctattaacaggctgtgtaggaagacccaatggaaaaacccagcttggaggctctctagtctgttttgccatggaaacttctactacttgtaaggaatag

SEQ ID NO: 141679 - DNA, 460 bp, Homo sapiens; identical to SEQ ID NO: 84321
  misc_feature (1)...(460): n = a,t,c or g

SEQ ID NO: 141680 - DNA, 3636 bp, Homo sapiens
atgggggtaggcagaggttctgactgccagctcaaggccactgcaccagctgcgtccacgttttacttccggagctgccccagtgacaagtggggacaggcaatgagcccgaggtccgcagtggctatcgcctacccacagcctgcaggctttgtccttggaaacaagcagcctgtcaaagctgcccgctgtaaagtggatagatggctcttggctgccaactggacaatgcccaggctctgtggaggggagattaggccagccgtggcccaaaccagtcccaactgctccggggcctcaaatcaggatgcctcgcagacggtgaacggccacaggcgccaggccagccatagcggatcaggagtctctctgggaccccctccaactccccaggtgaatcaaggaacccttgggccccaggttgcccccgtggccgccggcgaggtggtgaagactgcaggtggggtgtgcaagttctctggacagcgactgagctggtggcaggcccaagagtcctgcgagcagcagtttggccacttggcactgcagccccctgatggggttcttgcttcacggctgcgcgatccggtctgggtgggccaaagagaggcccctctgcggagacccccacagaggcgtgcgcgcaccaccgccgtgctggtgttcgacgagaggacggctgaccgggcggcgcggctgcggagccctctgcctgagctggcagcgctgaccgcgtgtactcacgtgcagtgggactgtgcctcgcccgaccccgcagcgctcttctccgttgccgcgcccgcgctgcccaacgcgctgcagctgcgcgccttcgccgagccggggggcgtcgtgcgcgctgcgctggtggtgcgtgggcagcacgcgcccttcctcgcagccttccgcgccgacggccgctggcaccatgtgtgcgccacgtgggagcagcggggcgggcgctgggcgctgttctccgatgggaggcggcgcgctggggcgcgggggctgggcgccggccacccggtgccgtccggcggcatcctggtgctgggccaggatcaggactctctgggcggtggcttctcggtgcgtcacgccctcagcggcaacctcaccgacttccacctgtgggcgcgggcgctgagccccgctcagctgcaccgggcacgggcctgcgcgccgccctcagagggcctgctcttccgctgggacccgggcgccctggacgtcacgccctcgctgctgcccactgtgtgggtgcgccttctctgtcccgtgccctccgaggagtgccctacgtggaacccgggacctcgcagtgagggctctgagctctgcctggagccgcagcccttcctctgctgctaccggacagagccctatcgtcggctgcaggatgcccagtcgtggcctggccaggatgttatcagccgagtcaatgccttggccaacgacattgtgctcctcccggaccccctctccgaagtccatggggccctgtccccagcggaggcctccagcttcctgggccttctggagcatgtcctggcgatggagatggctcccctggggccggccgcactgctggctgttgtccgcttcctgaagagggtggtggccctcggggctggggacccagagctgttgttgacaggcccctgggagcagctgagccaaggcgttgtatctgtggccagcctggtcctggaggagcaggtggctgacacatggctctccctccgtgaaccaggcctctctggagtcaccgtgatccacagctggttcacctccagagtcttccagcacaccctagagggaccggacctagagccccaggcccctgccagctcagaggaggcaaacagggtgcagaggttcctaagcacccaggtggggtcagccatcatctcctctgaagtgtgggacgtcactggagaggtcaacgtggccatgacctttcatctccagcaccgggcccagagccccttgttccctccccatcccccaagcccatatacagggggtgcctgggccaccacaggctgctccgtggctgccctgtacctggactccaccgcctgcttctgcaaccacagcaccagctttgccatcctgctgcaaatctatgaagtacagagaggccctgaggaggagtcgctgctgaggactctgtcatttgtgggctgtggcgtgtccttctgcgccctcaccaccaccttcttgctcttcctggtggccggggtccccaagtcagagcgaaccacagtccacaagaacctcaccttctccctggcctctgccgagggcttcctcatgaccagcgagtgggccaaggccaatgaggtgggcagccagtgggtggcatgtgtggctgtcacagtcgcaatgcacttcctctttctggtggcattctcctggatgctggtggaggggctgctgctgtggaggaaggtggtagctgtgagcatgcacccgggcccaggcatgcggctctaccacgccacaggctgggtgctatctccccaaatctgtagccagccagttgcccagcctccgtctccagagacgcccagctgtagcctccaaagcagcctcagctctcccgactcccaaactactgtggctccaatgccaccccaacagcatcagagcccccagccctgctccttggacctccccagtgcccccagtacaacctccagtaggggacagctgcggcttggggggcggatcctgggtcctggagaggaaaaagcaggcgtgcctgtgggcatcgtggcggtcaccctggccatgctcccccatgactacgtggcccccggacattgctggctcaatgtgcacacaaatgccatctgggccttcgtggggcctgtgctcttcgtgctgactgggaggggcgtgttggggatggggaagtcctcttgcccactgaccccaggtctccaggccaacacctgcatcctggcccgtgtggtaatgatcaccgtgtccagtgcccgccgccgtgcccgcatgttgagcccacagccctgcctgcagcagcagatctggacccagatatgggccacggtgaagcccgtgctggtcctgctgcccgtcctaggcctgacctggctggcaggcatcctggtgcacctgagccccgcctgggcctacgctgccgtgggcctcaactccatccagtgtgtgccaggcactgtgctgggtgccaggccgcagcagcagaagaggcagcaaaaagcccctgtatttgtggagctgcccttggtagagcaggcagaccatggccacgatgaagaaatgaagtgttcagggctgtacatcttcctggtttatgctgcctgcaatgaggagggacctatggccctagaactccctcagcattctcctccattgcaaacccggagagacaggaacaagagagcggcggcgcctctgcgctcaagtgacggcgcctttgtctccgctgaatggccccgaccccaccccgcgggccactcagcggcccgagctggaagcgcggggcagcggaggctgccgggctgtgtccttcgcggggccgccaccgcccctcctgaaaggccgcggagccctcagggcatgcggatgttccgaggatggagaagctga

SEQ ID NO: 141681 - DNA, 3811 bp, Homo sapiens
atggctcgccccgcccagccccagccagcccggccgcccgccctttcccacacaccggcccggggggttgagaactggtgcttctgtagagaccctgacagcaggtggcagaggtcccagagtcttggcccccactgtaccccccggggagctgtagtgccagctcgcctttctgggtcatgtcccccggtgctgcgaaagtcagaagtgagcggcttctctgattcagggccgggactggattggcggggcccggagctgtccatgaccctctcccgaggcgtgggcaggtcgccctgggctgtgaagttgtccccttttattgacaagcaaactgaggatcaagaaggccagctgcaccacatcccctggggatgtttggaaaatgtgaacatccccaggcctactgtcatgcagctctgatccagccagccagatgtcagtaaagtgtgttgatgacacgcatgggcagtcagtgcaccagtggctgaccgagtgtgatggggccctggcctttggttcttgcttcctcagagcggaaagagccatgaatcaaagggcagctcaactagcactggattcacaactgtggggactgttagtctcctacattagattggaggtccctgattcaggctccatgctgtgtgacttagggccacatgcagtgcttggtgcctgggttaagtctgtgccctgtggcgagtgtgcccggataccccggggtccatttgaggatgaactcggctgggtcaccctgctacaaacaggcttttacattcttgaacttcacctgggatccagtatactgcactatgtggctccaaatggagacctcgtgggaacgttccaaggctttgtaagctcccgaggctatttgcccagcgtggtcaatgccattgctgtgtttactgatacacccacttcagctacacctgccaagctcataaaacatattgtaaacctctgcttaaatttacctcctcaaatatcagctcctcatcccctgtctgtttctgccagcagcaaggccagctatttgagcagtgacaatgtggagaaaaccaagaatccagggggccctcacagctcacagctgagccacggagtctgggagacagtagcagcgtgggacctcgctgccctctcatcagccactactttgctcgtaggtgggcgtctctttgcagcaggaggtgctcgagcttgtcggggccaccaggatggtggaggccatgtcccagctccaggacgagaagacccactacaggaggagctggtggtcctacaggagaggctggccctccgcgacatgaccagcaggccacgtccacccagctgcagaaccaggtacctggggagctgggatgggcagaggccactgcccactatggagcaggggccaggaccttccccactaggaggtgacgtagatgtgagtggacaggaagtgtctgtctctgtggctgtatctgagcctcgcccacttccccaaggtctccaagcctgtctgccacatcatccccacttctgatccagtgccctggcctggctgttgggcctctgagctctgggcccagcactctgttgacagactgccttcagccctatccaccactggcttctgatcggctgctttttcaactgctgttcctgcaaggctgtgtggccccatggttaagggtgagggtttgcaagggtcagccagatgcgagttccggtcctaggtccaccacttactgtcaggtgacctcaagcctgtggggcctccaagcccaatcttctctaaaaagttccgtgccgttcctcaccggacagggctgtgaccggcagatgatctttgacatgctgaagaggcttcgcctgttgtctacctgcccaacgactatgtgtgcaagaaggaaagatgggtggcaagggggcaaaggcggcaaacttgctcacctccgggcccggctcaaagaactggccgcgcggaggcggctgcaaagcagcaagagttggtggaacagacctgatgtatgtcctatggctgttcttcgtggtgatggcctggaattggaactgttggctgattcccgtgcgctgggccttcccctaccagaccccggacaacatccaccactggctgctgatggattacctatgcgacctcatctacttcctggacatcaccgtgttccagacacgcctgcagtttgtcagaggcggggacatcattacggacaaaaaggacatgcgaaataactacctgaagtctcgccgcttcaagatggacctgctcagcctcctgcccttggattttctctatttgaaagtcggtgtgaaccccctcctccgcctgccccgctgtttaaagtacatggccttcttcgagtttaacagccgcctggaatccatcctcagcaaagcctacgtgtacagggtcatcaggaccacagcctaccttctctacagcctgcatttgaattcctgtctttattactgggcatcggcctatcagggcctcggctccactcactgggtttacgatggcgtgggaaacagttatattcgctgttactactttgctgtgaagaccctcatcaccatcggggggctgcctgaccccaagacactctttgaaattgtcttccagctgctgaattatttcacgggcgtctttgctttctctgtgatgatcggacagatgagagatgtggtaggggccgccaccgcgggacagacctactaccgcagctgcatggacagcacggtgaagtacatgaatttctacaagatccccaagtccgtgcagaaccgcgtcaagacctggtacgagtacacctggcactcgcaaggcatgctggatgagtcagagctgatggtgcagcttccagacaagatgcggctggacctcgccatcgacgtgaactacaacatcgttagcaaagtcgcactctttcagggctgtgaccggcagatgatctttgacatgctgaagaggcttcgctctgttgtctacctgcccaacgactatgtgtgcaagaagggggagatcggccgtgagatgtacatcatccaggcagggcaagtgcaggtcttgggcggccctgatgggaaatctgtgctggtgacgctgaaagctggatctgtgtttggagaaataagcttgctggctgttgggggcgggaaccggcgcacggccaacgtggtggcgcacgggtttaccaacctcttcatcctggataagaaggacctgaatgagattttggtgcattatcctgagtctcagaagttactccggaagaaagccaggcgcatgctgagaagcaacaataagcccaaggaggagaagagcgtgctgatccttccaccccgggcgggcaccccaaagctcttcaacgctgccctcgctatgacaggaaagatgggtggcaagggggcaaaaggcggcaaacttgctcacctccgggcccggctcaaagaactggccgcgctggaggcggctgcaaagcacgaagagttggtggaacaggccaagagctcgcaagacgtcaagggagaggaaggctccgccgccccagaccagcacacgcacccaaaggaggccgccaccgacccacccgcgccccggacgccccccgagcccccggggtctccaccgagctctccaccgcctgcctcccttgggagctgcgagggagaggaggaggggccggccgagcccgaagagcactcggtgaggatctgcatgagcccgggcccggagccgggagagcagatcctgtcggtgaagatgccggaggaaagggaggagaaggcggagtaa

SEQ ID NO: 141682 - DNA, 729 bp, Homo sapiens
atgacccataaccaggagaaaaacaaatcaaccaacacagaaatgacaatgatgatgaaactagcagacaaggatgataaaacagctatgataaatatgctccaagtagtaaaaaaggtggaggaagccatgagcatgatgagaagaaataaagatgtaaaaaatattcatggccgggcacgatgggtcaagcctatgatcccagcactttgggaggccaaggaagtagaggggaaatactctgcccataatttctggggaagctggaagtttaaatccagctcccgcagcagcagcagtgggcctgagagccctgctagaacccatgcctcattctgccagcctgatggtggacccaccaacaagctagggacaaaggcctttcgtgtgtctcctgctagcagtctactggttgacctgaacactcaggaagtagagataattaatgtgagaaaggccacccccacatgctccctggagctgggcaggaagaggagggatggagccgctgagagagcagctctggatgttgtagttgtcatctatcagctggcacctgctgctgctccaaactgcctgaacccagtgaccagcaggaggcgccacaaacaccggctccggaaggtcagggaagacggcagagttttgaagaataaatacaaagcaacagggtcatccttccgcttcctcagagatctgagaaccaaccactcagaatccttcttctga

SEQ ID NO: 141683 - DNA, 627 bp, Homo sapiens
gtcaaattcataattgatgatctcttccttgttttccccagaaccctgtgtgaagagcagctggtactgtcgatttggaaagctggctggaaaaaacttattcatgaaggggctggctctgaatgatgccaaaagtcatgttctcatccaagaccctgtactggttcccgagaaagctgcttcaaatgttgcagagagatgccttctgacctgaatggtgtgggacagggccaggattcccagcacgaaagaataccatggacagcaggaggttgatgtactcctgggagaatattttgaaaaagaggtagagccccaagagtgtgcagctggcgatgatggggaagcgggcggcatcccggctggtgattgtttcaggcatgtctgaagcattcttgccgcgggcgcagcgtacggagcgcagggcgccgaagaagatgggcagcagcgccatgagcaggaggctgccgtaggccagcgcgatgccctcgggcgtggaaggcggccgcgtagtgctgttggtggggccgcctgcctcggcactgccgttatgcggatcgctgagggccgagtccatggcgagggtgcgttcgggatccgactccagctccggttgctgcagcaggg

SEQ ID NO: 141684 - DNA, 604 bp, Homo sapiens
cggccgccttccacgcccgagggcatcgcgctggcctatcggcatcctcctgctcatggcgctgctgcccatcttcttcggcgccctgcgctccgtacgctgcgcccgcggcaagaatgcttcagacatgcctgaaacaatcaccagccgggatgccgcccgcttccccatcatcgccagctgcacactcttggggctctacctctttttcaaaatattctcccaggagtacatcaacctcctgctgtccatgtatttcttcgtgctgggaatcctggccctgtcccacaccatcaagccctttatgaaataagttttttccagccagctttccaaatcgacagtaccagctgctcttcacacagggttctggggaaaacaaggaaaaagatcatcaattatgaatttgacaccaaggacctggtgtgcctgggcctgagcagcatcgttggcgtctggtacctgctgaggaagcactggattgccaacaacctttttggcctggccttctcccttaatggagtagagctcctgcacctcaacaatgtcagcactggctgcatcctgctgggcggactcttcatctacgatgtcttctgggtat

SEQ ID NO: 141685 - DNA, 1244 bp, Homo sapiens
ctagaggtaggcctgagccttgacgtagaggtagaatttcagccaggagaaggcattcttccggagccggtgtttgtggcgcctcctgctggtcactgggttcaggcagtttggagcagcagcaggtgccagctgatagatgacaactacaacatccagagctgctctctcagcggctccatccctcctcttcctgcccagctccagggagcatgtgggggtggccgcttcctgctggctggaatgtgaatatgatggctgctgcttgagcagcatattgtactttctcacattaattatctctacttcctgagtgttcaggtcaaccagtagactgctagcaggagacacacgaaaggcctttgtccctagcttgttggtgggtccaccatcaggctggcagaatgaggcatgggttctagcagggctctcaggcccactgctgctgctgcgggagctggatttaaacttccagcttccccagaaattatgggcagagtatttcccctctacttccttgccgcgggcgcagcgtacggagcgcagggcgccgaagaagatgggcagcagcgccatgagcaggaggctgccgtaggccagcgcgatgccctcgggcgtggaaggcggccgcgtagtgctgcttggtgagggccgcctgcctcggcactgccgttatgcggatcgctgagggccgagtccatggcgagggtgcgttcgggatccgactccagctccggttgctgcagcagggacgcaggcggagacaccggctctgcagggaaagccacgttcccctcatgatctaagaaggatgctaaagctctggacaccttgttcaaattgtagtccctggaagccaggatgtccatgctgccaggatcctctctctgcatctcctttctgtttttatctgctttgtcttcattctctttcacagaaaaccaggcttgctttgtatactgaacaagagccttggttgtatccataatggtggaattatgggcattgtgagtagcaagaggagatttaccaggcagagggaccgcactgatgtcatagagatcaggatgcatttgatgtggctgatggctctcagatcttaaccagccctggcgaagatctctgagaataggatcgatccttcttcctggccaccgcaccctccctgagtcagctgtgcgcatccccagagagtcgagtttgccagcatctccattccaggagtggttgatgcccagattcat

SEQ ID NO: 141686 - DNA, 783 bp, Homo sapiens
ctaactactttcctttgcatctgatcgcatacagagccagtagtgagttctctgctccttgccgcgggcgcagcgtacggagcgcagggcgccgaagaagatgggcagcagcgccatgagcaggaggctgccgtaggccagcgcgatgccctcgggcgtggaaggcggccgcgtagtgctgttggtggggccgcctgcctcggcactgccgttatgcggatcgctgagggccgagtccatggcgagggtgcgttcgggatccgactccagctccggttgctgcagcagggacgcaggcggagacaccggctctgcagggaaagccacgttcccctcatgatctaagaaggatgctaaagctctggacaccttgttcaaattgtagtccctggaagccaggatgtccatgctgccaggatcctctctctgcatctcctttctgtttttatctgctttgtcttcattctctttcacagaaaaccaggcttgctttgtatactgaacaagagccttggttgtatccataatggtggaattatgggcattgtgagtagcaagaggagatttaccaggcagagggaccgcactgatgtcatagagatcaggatgcatttgatgtggctgatggctctcagatcttaaccagccctggcgaagatctctgagaataggatcgatccttcttcctggccaccgcaccctccctgagtcagctgtgcgcatccccagagagtcgagtttgccagcatctccattccaggagtggttgatgcccagattcat

SEQ ID NO: 141687 - DNA, 1360 bp, Homo sapiens
ctttctatcaggggagggaggctgtgctctcactggcttcttgttagaagttctgcctgccctacagcctgcactgagggctctcatcactgcttctgagatcttaatgggggtcaacgaagatgtgggcttctctgagtttagaccatccatctgccaaggaaaaccaagccctgagactgatagagatgagagaagagaatggtaatgtccccaagacagagcaggcaggaagtttgaagcctctgagggatacaggaaaatctaacctcaaagagaagaagaatacaccaggcctacatggattcaatggtaaattctgccaaacttttaaggaagaaattataccaatcctctacaatctctttcaaaagataaaaacagaggaaataattcctaactcatcctgtgaggccaacagcaagctgaagcagatttgagaaggaatacactcagaagcttgccaaatcttcacagatcatagcagaacttcagacaaccatttcctctctgaaagaagagaacagccagcagcagcttgccatgtataaggcggctccaggatgttagacaaaagtttgaagatgagaagaagcagctgattagagataatgaccaagcaatcaaggttttacaagatgaattagaaaacccgttctaatcaggtgcgatgtgcagagaaaaaattacaacacaaagaattgggagtcacaggaacagataacttacataccgacaagaatatgaaacaaaattgaaaggatttgatgccagcatccctaagaccaagaactttgaagacaccatttcctccctaaaatcacaggttaattttctgcaaaagagagcttcccatccttcaggaagaactgactacatatcaaggcagaaggtacagcccataagcaggtaactgcacgagagaattgcaacggagtgcaatttcccaggctgtgctgtgggacttcttcccagcaggtttgaagatttggatattgtaaactgtgagatcagtggcattttttaaatccttaaatgtaattaagatcataagaaacgtggcatcattcatacactagtggggtggttttatttgtgtctgcctaagttatttttttaacattcctttatttccgattttcatgtttgtgtgcatttgagtatgtgctgagaactgcttatattgggcaaagtggatttcctatgatatgccttggttaatccttttgccatagaaattttacccagttgcggtacggttccaaatcacgtttggtaggtatcatatccaaaaattctaacctgtttacattgttttcatgttcatgttcctatgttattaaaatattattttgtactt

SEQ ID NO: 141688 - DNA, 397 bp, Homo sapiens; identical to SEQ ID NO: 116236
  misc_feature (1)...(397): n = a,t,c or g

SEQ ID NO: 141689 - DNA, 529 bp, Homo sapiens; identical to SEQ ID NO: 117835

SEQ ID NO: 141690 - DNA, 369 bp, Homo sapiens; identical to SEQ ID NO: 122077

SEQ ID NO: 141691 - DNA, 939 bp, Homo sapiens
atggggaaaaaacagaacagaaaaactggaaactctaaaacgcagagcgcctctcctcctccaaaggaacgcagttcctcaccagcaacggaacaaagctggatggagaatgactttgacgagctgagagaagaaggcttcagacgatcaaattactctgagctacgggaggacattcaaaccaaaggcaaagaagttgaaaactttgaaaaaaatttagaagaatgtataactagaataaccaatacagagaagtgcttaaaggagctgatggagctgcaaaccaaggctcgagaactacgtgaagaatgcagaagcctcaggagccaatgcgatcaactggaagaaagggtatcagcaatggaagatgaaataaatgaaatgaaaccaaatctacgtctgattggtgtacctgaaagtgatggggagaatggaaccaagttggaaaacactctgcaggatattatccaggagaacttccccaatctagcaaggcaggccaacgttcagattcaggaaatacagagaacgccacaaagatactcctcaagaagagcaactccaagacacataattgtcagattcaccaaagttgaaatgaaggaaaaaatgttaagggcagccagagagaaaggtcgggttaccctcaaagggaagcccatcagactaacagcggatctcttggcagaaaccctacaagccagaagagagtgggggccaatattcaacattcttaaagaaaagaattttcaacccagaatttcatatccagccaaactaagcttcaaaagtgaaggagaaattaaatactttacagacaagcaaatgctgagagattttctcaccaccaggcctgccctaaaagagctcctgaaggaagcactaaacatggaaaggaacaactggtaccagctgctacaaaatcatgccaaaatgtaa

SEQ ID NO: 141692 - DNA, 865 bp, Homo sapiens
atggagctgaaagccaaggctcgagaactacatgaagaatgcagaagcctcaggagccgatgcgatcaactggaagaaagggtatcagtgatggaagatgaaatgaatgaaatgaagcgagaagggaagtttagagaaaaaagaataaaaagaaacgaacaaagcctccaagaaatatgggactatgtgaaaagaccaaatctacatctgattggtgtacctgaaagtgacggggagaatggaaccaaattggaaaacactctgcaggatattatccaggagaacttccccaatctagcaaggcaggccaacattcagattcaggaaatacagagaacgccacaaagatactcctcgagaagagcaactccaagacacataattgtcagattcaccaaagttgaaatgaaggaaaaaatgttaagggcagccagagagaaaggtcgggttacccacaaagggaagcccatcagactaacagcggatctctcggcagaaactctacaaaccagaagagagtgggggccaatattcaacattcttaaagaaaagaattttcaacccagaatttcatatccagccaaacgaagcttcataagtgaaggagaaataaaatcctttacagacaagcaaatgctgagagattttgtcactaccaggcctggcctaaaagaactcctgaaggaagcactaaacatggaaaggaacagctgggcaaagtgttcccatgcagggttatgccacacgtttccattcgagcagatggcagaaaggtttgtctgcaatgtggaacttgttaagggggaaggccttcctgatagagatcaagaaggccgctttaatttacttagtggtgggatggttt

SEQ ID NO: 141693 - DNA, 1290 bp, Homo sapiens
atgaaggacttcttcaaggagaacaacaaactactgctcaatgaaataaaagaggatacaaagaaatggaagaacattccatgctcatgggtaggaaggagcaatatcgtgaaaatggccatactgcccaaggcctcaaagggctccaactatccacttgcagctgctacaaaagagagtttcaaaactgcacagattcttctaatggactgtttccaaactgttcaagaaaaaaaagcggtgttgccaaactgctccaaaaaacgaaatgttcaactctgtgaggcctcaaagcgttccaaatatccacttgcaggttccataaaaagggtgtttccaaactgctcaatcaaaagaaaggttcaactctgtgagatgaatgcacatatcacaaagaagtttctcagaatgcttctgtgtagtttttggatgaagctacatgaggaaattcgaaccaatgacaaagaagttaaaagctttgtaaaaaaattagacgaatggataactagaataaacaatgcagagaaatccttaaaggacctgatggagctgaaaaccaaggcatgggagctacatgacaaatgcagaagcctcagtagccattgtgatcaagtggaagaaagggtatctgtgatggaagatgaaatgaatgaaatgaagcaagaaaagaagtttagagaaaaaagaaaaaaaagaaatgaacaaagcctccaggagatatgggactatgtgaaaagaccaaatctacgtctgattggtgtatctgaaagtgacagggagaatggaaccaagttggaaaacactctgcaggctattttccaggagaacttccccaatctagcaaggcgggccaacattcaaattcaggaaatacagagaatgccccaaagagactcctcaagaagagcaactccaagacacataattgtcagattcactaaagttgaaatgaaggaaaaaatgttaagggcagccagagagaaagctcgggttacccacaaagggaagcccatcagactaacagcaggtctctcagcagaaactctacaagccagaagagagtggggaccaatattcaacatacttaaagaaaagaattttcaacccagaatttcatatccagccaaactaagcttcaaaagtgaaagaaaaataaaatactttacagacaagcaaatgttgagagattttgtgaaaaccaggcatgccttaaaacagctcctgaaagaagcactaaacatggaaaggaaaaactggtaccagccactacaaaaacatgccaaattgtaa

SEQ ID NO: 141694 - DNA, 2840 bp, Homo sapiens
  misc_feature (1)...(2840): n = a,t,c or g
atgggtcctggggcgcggctggcggcgctgctggcggtgctggcgctcgggacaggagacccagaaagggctgcggctcggggcgacacgttctcggcgctgaccagcgtggcgcgcgccctggcgcccgagcgccggctgctggggctgctgaggcggtacctgcgcggggaggaggcgcggctgcgggacctgactaggtgcaatgatgaaacaataacatacctgttagataagaggttgactgttctcactgcagctaacatcccctactcgtctccggaaaacggtgcgaagagaaggcgccaagacgccttccctccaatacactacaatacccaggacgctttgctacaatacctctccggggttggctggggggcgcctccagctgcgcaagcgcatagggatgcgccctttgtggactccattgcgcaggtgctgttgcgcacttccggtggaagcgctgaagcgagtgggtggagtttacggagccggtgggcggtaggcggtgctacgggtagctgggtgctgtccaaaggcgacagggcgtcgttaggggagcgagtcgtgaccggttgggccacactcaacgtgggacgaagcttcgcctactgtttgactacgtgcgtgcagcctcccctcgatgtcggccctcgaaaagagcatgcacctcggccgccttccctctcgcccacctctacccggcagcgggggcagtcagagcggagccaagatgcgaatgggagaaggaaacagaagaccaagtcagagcctgagagatttgaagatgctgtgttgcttgccggctttaaagtggaggaagaacctgtccagagacctaggaggaaagaatggtttcagggcccaagcccagggcactgctgccctgctcagcctcaggactctgcaccttgtatcctggctactcatgctccagccagggctcaaaatgccccaggcacagcttgggccgctgctctagagggcacaagcactgtaagccttgaccacttccatgtggttggtgtagtggttgtatcaggaggtgagatcattctactcctttctttcagattctacgacaaggtactttctttgcatgaggattcaacaacccctgtggctaaccctctgcttgcatttactctcatcaaacgcctgcagtctgactggaggaatgtggtacatagtctggaggccagtgagaacatccgagctctgaaggatggctatgagaaggtggagcaagaccttccagcctttgaggaccttgagggagcagcaagggccctgatgcggctgcaggacgtgtacatgctcaatgtgaaaggcctggcccgaggtgtctttcagagagtcactggctctgccatcactgacctgtacagccccaaacggctcttttctctcacaggggatgactgcttccaagttggcaaggtggcctatgacatgggggattattaccatgccattccatggctggaggaggctgtcagtctcttccgaggatcttacggagagtggaagacagaggatgaggcaagtctagaagatgccttggatcacttggcctttgcttatttccgggaacagagctcctcaccagcaacggaacaaagctggatggagaatgactttgatgagttgagagaagaaggcttcagacgatcaaactactccgagctacaggaggaaattcgaaccaatggcaaagaagttaaaagctttgaaaaaaaattagacgaatggataactagaataaccaatgcagagaagtccttaaaggacctgatggagctgaaaaccaaggcacgagagctacgtgacgaatgcagaagcctcagtagccgatgcaatcaactggaagaaagggtatcagtgatggaagacgaaatgaatgaaacgaagcgaggagagaagtttagagaaaaaagaataaaaagaaacgaacaaagcatccaagaaatatgggactatgtgaaaagaccaaatctacgtctgattggtgtacttgaaagtgacagggagaatggaaccaagttggaaaacactctgcaggatattatccaggagaacttccccaatctagcaaggcaggccaaccgttcagattcaggaaatacagagaacgccacaaagatactcctcgagaagagcaactccaagcacacctaattgtcagattcaccaaagttgaaatgaaggaaaaaaatgttaagggcagccagagagaaaggtcgggttaccctcaaagggaagcccatcagactaacaacagctgatctctcagcagaaactctacaagccagaagacagagtgggggccaatattcaacattctctaaagaaaagaattttccaacccagaatttccatatccagccaaacctaagcttcataagtgaaggagaaataaaatactttacagacaagcaaatgctgagagatttttgtcaccgccaagcctgcccttaaaagagctcctgaaggaagaagcactaaacattggaaagggacaacccggtaccagccacttgcaaaaacattgccaaatttgtaaagaccattgaggctagggaagaaacttgcatcaacttaacgagcaaaataaccagctaacatcataatgacaggatccaaattcacacataacaatattaactttaaatgtaaatggggctaaatgctccaattaaaagacacagactgggcaaattggataaagagtcaagacccatcagtgtgctgtattcaggtaaccatctcacgtgcagagacaccataggctcaaaataaaggatggaggagatctaccnagccatggaaacaaaaaa

SEQ ID NO: 141695 - DNA, 451 bp, Homo sapiens
tcccctaaccccatccctccagtgtgtcagctcttgaaaggccttcccaccaggacgccccttaatggctcgggacccccgcggcgcgtgggtggctatgccacgtccccatcctctcccaagaaggaggcgacctccgggcgcaggtaaggcacaaggccgggacccccagcctcttccaagacctcgtgggagacagaggtggtttgtttgcctgagctccagcagcagagggtgcagggagaatctcgcttgctcacggcactcgcctgctggcctagaaggctctgcccccacctgtgtgctctcttttagcagtgtccgccgctacttgtcaccagagcgcctcgcctcggtgcgccgtgaggacccccgcagccggaccacatcctccagcagcaactgtagcgccaaaaaggaagggtaagacgaaatcgtcgacccgggaatt

SEQ ID NO: 141696 - DNA, 561 bp, Homo sapiens
cacggagccatcctccacactgaagataacttctttggttttgccttcctttttggcgctacagttgctgctggaggatgtggtccggctgcgggggtcctcacggcgcaccgaggcgaggcgctctggtgacaagtagcggcggacactgctgcgcccggaggtcgcctccttcttgggagaggatggggacgtggcatagccacccacgcgccgcgggggtcccgagccattaaggggcgtcctggtgggaaggcctttcaagagctgacacaccgaggcagtggtgcctaagcgcggaggcgcccggcccttgggggtgccccgcgcgcgtagcgccgctccctgttcttcgcatgcccgcaggcgacgcagagcatccgccagcgccgcctttaggaccgccagctcgtcttcctgtaactgcagccgctgctccagcgccgacacgcggtcgtccacttccataccgctcgtgcccgacaaattgtcatcgttgcagtatcgcagcagcgaggacgtgtcgtacaggccgcagaaggccgggccgcgctccgccat

SEQ ID NO: 141697 - DNA, 2766 bp, Homo sapiens
ctacacgcactcgtcggggcagccgtactgcagaagcacgttgatgcactcctggctggaggcctgccgggcgtaggtcagcgctgtgttcccgtgggcatctcgggccatgacgtccaccccgtaccagatcaggagctgcgccaggaccacattccccttgcggcaggccagatggagcgccgtgcagccgtctccctccccacaggtctcgttcacctcctcacgggagccatgtgccagcagcaggatggctgtctgcaggtcctcatcagcggtggcccgcagcagctgctggcccagggacagatcagtgcagggtagtggggccagaaagagcttctcctcatatttggaaaggatccaccgttccttttcttccctcgtggacttttctgagggttttgtctgtccctggctgctcccttcccagatgctgttggctaggtcattgccaatagatgacataaccttcctgagctcaactggccagtcatccagctccagagatcgcacacgggaaaggcgggtgccaagactgcggtggatacctgagcattcaatacacatgaggactcccaagttcaaactggcccacttaggattctgggtctcacagtccacacagtgggcgttcccacgcatgttttggatcgactgcagggccatggcctcgctctggctggtcagctgggacttgcttttactgctctcgcatgactgcaggctggccaggatctggctctggatggcttggacccaggcatcccgctcctcatatgtcgtggcttcaaagtgccacgtttggccagtggcagacacaatcataaagttgttggtgcttttcttctttaggtgtttctttttattggcatgaggagaggggggcgggttgagcttggggccggtggtgctggagatactggggctgaagcatatggagtcacccagcccggtgtccatgtccttggataggtcattgcttttagagctggagatgggtgcgcaggccgatgtggctagggatggccactttcctgggactttgatggtagatgtctgaaggtcaatctcttttttatgaatattcttcatataatcacctaagcttgaataataggtgagcacgccattggaacacagggtgacgtatttctttttccatgtcttcagccatttcccacttcgctttaagagcatgccctgtttaatggggatggctctgccgctcccgatggtgtcagcatgattctccggggctttcctctctttgtctgggtcactccctttctcagatgtaaacaggttggaccagcgcatggaccgcttgcaaacgggggtgggtgtgttggcagtgggaggaacactgaactgagggtcctcctggctggtgctgggagtcgatggaatggaggaggaatagttatttaaactcccacctccatttctgttcttcgtaatgtgcacggtggaaacctgttctgcatttctacctaagacttcaccagacgggcctttaaagtccatcatgcccacgaacattctgttgatgatgatatatgtattctgtaagaatatggaggctttctctctggctctcctcttttctttctgagcccttataagagttacctttaattcaatcatctgttggaccatagctatcaacagtccacggggtggaagtacgcgtcggggttcgcggaccctttcagccccgtggtgaagacaaatggcgactctttctaaaacactagctttcaagtcctggacggtctgccgtctcttgcaggaggccaaaaaaactcctgtatgttctaactggggagaacttttcctaaagttttcttcctgaaaatgctggaggtttgtagacagcccagttccagagttctgaagcctgcctgccccacgtgtgctctgtaatctatttctgcttgtgctcccggccagtgaggcaagaaaactgatattatttacacaaccaacaggctctttggaagccttgttagtcatttctgtgatatcccgagcctcaactttggaaataacatcagatcttttcccaagtgaatcaactttaacaccttgaaagcaagtagtcctagagaaagaagaatcagttatgttttgaacatccagtgactgagaagaagaaggctgtagcttcccaaactcaaaacatttggactgtctctctggtttcaccagagaattatgtagcgacattggtgcagaacagcgaagaggtgacaagagtctattcttgtgaggacttaattcccggtagttaagaactgaagtctctactgattccccattcagcactcctgcaacatgcttgagatgctgctctggagctttcaaccctttgtcagcattagtgagtagcaactccagattcactttgcacgcaccttctaagccgctgctctgttcatcagcatttccttcttcactggacagctctccaagacctacatcttcttgttccatgaacagctttgacccaatgagatatggtaaaggacgatcaatgtatagatccaaaagggaatggttaacaaatattgcatacacaggggtgtgtgggggctccagggccgggatgacggcggctgcagttgcggcggctgcaggatgagcgggtggatccccaggaagcgcctccagtgatgcctctgaatggtcccgaggggttgtggtggccgggcagagccaggcaggagccagagtcagcatggggggtgatggagctgtggccat

SEQ ID NO: 141698 - DNA, 440 bp, Homo sapiens
tctgctgccacacgatgctgggaggcctggggaagctggctgccgaaggcctggcccaccgcaccgagaaggccaccgagggagccattcatgccgtggaggaagtggtgaaggaggtggtgggacacgccaaggagactggagagaaagccattgctgaagccataaagaaagcccaagagtcaggggacaaaaagatgaaggaaatcactgagacagtgaccaacacagtcacaaatgccatcacccatgcagcagagagtctggacaaacttggacagggttgtggtggccgggcagagccaggcaggagccagagtcagcctgggggtgatggagctgtggccatcaccggtctgacagtggaccagtatggcatgctgtataagggggctgtgccacctgccaccttctcaccaactggactcccatctgtgtga

SEQ ID NO: 141699 - DNA, 378 bp, Homo sapiens
gaactgtctctttctcattcctttgactccgctggacttgccgcccccgtgacctggtgttgggtctcatcatcccaacagattcccattctaaagatgagggaaccaagaggtggaagttcatgccatggaggaagtggtgaaggaggtggtgggacatgccaaggagactggagagaaagccattgccgaagccataaagaaagcccaagagtcaggggacaaaaagatgaaggaagtcactgagacagtgaccaacacagtcacaaatgccatcacccatgcagcagagagtctgggcaaacttggacagtgaatgcacctgctaccatggcccacccttcccaagtctcaataaaaagccatgacatgtgtaaa

SEQ ID NO: 141700 - DNA, 907 bp, Homo sapiens
tcactcagattcttccttgctggtttgccagtggccacatctttctagtgatggctgcagctcctgatgatcctcccctacagccacagctctcttcggggtctgtggacacctttcctgtccctctagacccagggagataacagctcccactcttgctggtccagggcatttctcatctctcattggttcccttaactctgtccacacttctgtgaacagccccttttcctcaagtacccattcgaatatgtcctctggcttccaccaggagcctgactgatacccacaggtgggtgaatgctggcgtgcttctgggccgaagcatgttttgtatgcagaggtcagcagctgtgtgtggggaggcccagccaggccccactcatgggtcatcatgtgaaaaacagccttgcctgagtttgtgtcctctttcacctgtttctttgttagatcaccaataaatagcatgggctcccagagctcagtgcctttgcagcctccacactggcaatggccccctggtcccactttctctcttgaactttttctcattcttttgactccgcgggactttgttgcccccacgacctggtgttggctctgatcatcccaacagattcccatttgagcttgtctcccatcagccagtgtcccggcatctccaaatgaaggcagcctggactcaggagggcagtgggcctgctctgagccctcaccctggactgagagggcagtgggcctgctctgagccctcaccctggactgggagggcagcgggcctgctctgagccctcaccctggacttgtctcctctgttcagttcatgccatggaggaagtggtgaaggaggtggtgggacatgccaaggagactggagagaaaggtacagctggctgaggtcgggcat

SEQ ID NO: 141701 - DNA, 517 bp, Homo sapiens
  misc_feature (1)...(517): n = a,t,c or g
gttcctctctctgcgccttggctccccttcccagagcccttcctcttggtcttgccaaatcctgcccatcctttgagaaacgcttatgcccatggctgttcttaccccttcctgctttgctgtggtatccattagtctgttctcgcgctgctaataaagacatacaaaagactgggtaatttataaaggaaagaggtttaatggactcacatttccacatggctggggaggcctcacaatcatggtggaagatgaaggaagagcaaagggactttttatgtggcggcaggaaagagagcttgtgcagggaaactcccatttataaaactgttcagatctcatgaggacttatttcactaccatgggaacacgtatgggggaaactgcccccttgatttcatttattctccacctggccctgccctttnacacgtgggggttattacaattcaaggtgagatttgggtggggacacagccaaaatatatctggcatatgcaatctgatcaccccttcc

SEQ ID NO: 141702 - DNA, 957 bp, Homo sapiens; identical to SEQ ID NO: 115904

SEQ ID NO: 141703 - DNA, 6102 bp, Homo sapiens
ccccgaccagttccacaacatggacctcaggggcggcccccacgatggcgtcaccattccccgctccaccagcgacactgacctggtcacctcggacagccgctccacgctcatggtcagcagctcctactattccatcgggcactctcaggacctggtcatccactgggacataaaggaggaagtggacgctggggactggattggcatgtacctcattgatgaggtcttgtccgaaaactttctggactataaaaaccgtggagtcaatggttctcatcggggccagatcatctggaagatcgatgccagctcgtactttgtggaacctgaaactaagatctgcttcaaatactaccatggagtgagtggggccctgcgagcaaccacccccagtgtcacggtcaaaaactcggcagctcctatttttaaaagcattggtgctgatgagaccgtccaaggacaaggaagtcggaggctgatcagcttctctctctcagatttccaagccatggggttgaagaaagggatgtttttcaacccagacccttatctgaagatttccattcagcctgggaaacacagcatcttccccgccctccctcaccatggacaggagaggagatccaagatcataggcaacaccgtgaaccccatctggcaggccgagcaattcagttttgtgtccttgcccactgacgtgctggaaattgaggtgaaggacaagtttgccaagagccgccccatcatcaagcgcttcttgggaaagctgtcgatgcccgttcaaagactcctggagagacacgccataggggatagggtggtcagctacacacttggccgcaggcttccaacagatcatgtgagtggacagctgcaattccgatttgagatcacttcctccatccacccagatgatgaggagatttccctgagtaccgagcctgagtcagcccaaattcaggacagccccatgaacaacctgatggaaagcggcagtggggaacctcggtctgaggcaccagagtcctctgagagctggaagccagagcagctgggtgagggcagtgtccccgatcgtccagggaaccaaagcatagagctttccagaccagctgaggaagcagcagtcatcacggaggcaggagaccagggcatggtctctgtgggacctgaaggggctggggagctcctggcccaggtgcaaaaggacatccagcctgcccccagtgcagaagagctggccgagcagctggacctgggtgaggaggcatcagcactgctgctggaagacggtgaagccccagccagcaccaaggaggagcccttggaggaggaagcaacgacccagagccgggctggaagggaagaagaggagaaggagcaggaggaggagggagatgtgtccaccctggagcagggagagggcaggctgcagctgcgggcctcggtgaagagaaaaagcaggccctgctccttgcctgtgtccgagctggagacggtgatcgcgtcagcctgcggggaccccgagaccccgcggacacactacatccgcatccacaccctgctgcacagcatgccctccgcccagggcggcagcgcggcagaggaggaggacggcgcggaggaggagtccaccctcaaggactcctcggagaaggatgggctcagcgaggtggacacggtggccgctgacccgtctgccctggaagaggacagagaagagcccgagggggctactccaggcacggcgcaccctggccactccgggggccacttccccagcctggccaatggcgcggcccaggatggcgacacgcaccccagcaccgggagcgagagcgactccagccccaggcaaggcggggaccacagttgcgagggctgtgacgcgtcctgctgcagcccctcgtgctacagctcctcgtgctacagcacgtcctgctacagcagctcgtgctacagcgcctcgtgctacagcccctcctgctacaacggcaacaggttcgccagccacacgcgcttctcctccgtggacagcgccaagatctccgagagcacggtcttctcctcgcaagacgacgaggaggaggagaacagcgcgttcgagtcggtacccgactccatgcagagccctgagctggacccggagtccacgaacggcgctgggccgtggcaagacgagctggccgcccctagcgggcacgtggaaagaagcccggaaggtctggaatcccccgtggcaggtccaagcaatcggagagaaggtgaatgtcctatactccataattcccagccagtaagccagcttccttccctgaggcctgaacatcatcactacccaacaatcgatgagcctcttccaccaaactgggaagctcgaattgacagccacgggcgggtcttttatgtggaccacgtgaaccgcacaaccacctggcagcgtccgacggcagcagccaccccggatggcatgcggagatcggggtccatccagcagatggagcaactcaacaggcggtatcaaaacattcagcgaaccattgcaacagagaggtccgaagaagattctggcagccaaagctgcgagcaagccccagcaggaggaggcggaggtggagggagtgactcagaagccgaatcttcccagtccagcttagatctaaggagagaggggtcactttctccagtgaactcacaaaaaatcaccttgctgctgcagtccccagcggtcaagttcatcaccaaccccgagttcttcactgtgctacatgccaattatagtgcctaccgagtcttcaccagtagcacctgcttaaagcacatgattctgaaagtccgacgggatgctcgcaattttgaacgctaccagcacaaccgggacttggtgaatttcatcaacatgttcgcagacactcggctggaactgccccggggctgggagatcaaaacggaccagcagggaaagtcttttttcgtggaccacaacagtcgagctaccactttcattgacccccgaatccctcttcagaacggtcgtcttcccaatcatctaactcaccgacagcacctccagaggctccgaagttacagcgctggagaggcctcagaagtttctagaaacagaggagcctctttactggccaggccaggacacagcttagtagctgctattcgaagccaacatcaacatgagtcattgccactggcatataatgacaagattgtggcatttcttcgccagccaaacatttttgaaatgctgcaagagcgtcagccaagcttagcaagaaaccacacactcagggagaaaatccattacattcggactgagggtaatcacgggcttgagaagttgtcctgtgatgcggatctggtcattttgctgagtctctttgaagaagagattatgtcctacgtccccctgcaggctgccttccaccctgggtatagcttctctccccgctgttcaccctgttcttcacctcagaactccccaggtttacagagagccagtgcaagagccccttccccctaccgaagagactttgaggccaagctccgcaatttctacagaaaactggaagccaaaggatttggtcagggtccggggaaaattaagctcattattcgccgggatcatttgttggagggaaccttcaatcaggtgatggcctattcgcggaaagagctccagcgaaacaagctctacgtcacctttgttggagaggagggcctggactacagtggcccctcgcgggagttcttcttccttctgtctcaggagctcttcaacccttactatggactctttgagtactcggcaaatgatacttacacggtgcagatcagccccatgtccgcatttgtagaaaaccatcttgagtggttcaggtttagcggtcgcatcctgggtctggctctgatccatcagtaccttcttgacgctttcttcacgaggcccttctacaaggcactcctgagactgccctgtgatttgagtgacctggaatatttggatgaggaattccaccagagtttgcagtggatgaaggacaacaacatcacagacatcttagacctcactttcactgttaatgaagaggtttttggacaggtcacggaaagggagttgaagtctggaggagccaacacacaggtgacggagaaaaacaagaaggagtacatcgagcgcatggtgaagtggcgggtggagcgcggcgtggtacagcagaccgaggcgctggtgcgcggcttctacgaggttgtagactcgaggctggtgtccgtgtttgatgccagggagctggagctggtgatagctggcaccgcggaaatcgacctaaatgactggcggaataacactgagtaccggggaggttaccacgatgggcatcttgtgatccgctggttctgggctgcggtggagcgcttcaataatgagcagaggctgagattactgcagtttgtcacgggaacatccagcgtgccctacgaaggcttcgcagccctccgtgggagcaatgggcttcggcgcttctgcatagagaaatgggggaaaattacttctctccccagggcacacacatgcttcaaccgactggatcttccaccgtatccctcgtactccatgttgtatgaaaagctgttaacagcagtagaggaaaccagcacctttggacttgagtgaggacatggaacctcgcctgacattttcctggccagtgacatcacccttcctgggatgatccccttttccctttcccttaatcaactctcctttgattttggtattccatgatttttattttcaaaccaaatcaggattgacaaaagctgtgcatgaagaactgccttcttctaagatctaaccttcaggcttctctcctctgttttcaatgaactgctagcctgtatgcaatattaaaaaacagctgtctcaaggtctgtgtatatctccacatacctccattactaacaatgaaatatgaatgcaagttaagctacacttgaccaaatggtaataaatgtttacttccatttctatcattgaagggaaaatgtgagcattaagcactccaggctttcatatgcccatgtcttctgagcagagccaccattttttataatttctaataaccaactccagaactaggagctgatcaactctttgttttcctctccatctacttttccctgtgcataatatccatccaaaggacaacagtggcaaagctgaaatttttatacattcaactcatgattcacatgtggcatcagtcccatcagccggaactagcctagacatacggtgcaaatatgacacttctaacgattaacaacagcaagaaaacacctgctgctgatgcaatgcaatgcatcccaatggttgtggggattgtgggctcaactcaagagaagtttaggagggggagcatccctagtgaatactcacaccacaagaaggacaaacttgtgcacatgtccaagaaagaaagcttcttgattgaggtagcatgaaggatgaggcttcagcccccattgtcttatgtagaatgtggcaatgccaactggagaaagggaagaaggacatattaccttggtttgaatccctgagttctgtactgttctgttttgtttagtctagccacagttcttcacaaaggaaaaaaaaatgtgtagatgataccatgacttttgttaaagccatgacttttgtttgcttggcagacaaaccctttttttaaaactttgatatttttttttcacattttttttccttttcctttcttaatcatggagttcaagttcctttgcattcgattgtccatcgggaccacactaggaagctgcagagagtgatggtgcttgttagggatcaagggcaacatagtacttctccttcacccatagtaatcctcctggggcagaaacataacaccccaaaggcacgttgatttgtatcaaaataaatatccagtttcttttagcattcagtgaaaacatatctcagaaaacttcatgttgtcagaaaaacagctgcaggctccaaagacagcctaacctctcaactacatttgaaataaacccaaccataatggt

SEQ ID NO: 141704 - DNA, 1278 bp, Homo sapiens; identical to SEQ ID NO: 122605

SEQ ID NO: 141705 - DNA, 870 bp, Homo sapiens
atgatactcttttattttgtcttcaccacggggcggaaggtcgcgtcgggacagggagccttgggactgccgaagagcgccgtgggcgagagattacgtcgagtcccccggggctgtgagcgacaccggcagcgaggccgccgcctcaacaggtcctcgcggacctccgggacagtcctgtggggtccgccgccctcctcccacccagagctccggggagaagctgctgaggacgcggctgggacgagggggggcgccgggacccggactttcacttgcagtctctcctcgcgcttttctcccgagccgggaggaggaggagctggcgatgtgtgcgccgtgcccggtgtcttttgcagagtgaccgccgtacctgttttattcgtgtgtaccagtgctcgttgtgcagtgcggtgtcctatgcggtggtgtgctcgaagtacccggtgtcgtaccggctatcatacacgaaatatcaaagaacataagacagcctatactgccaatcctcaaataccagtgaggagatctgtgcctagatcattgaaaatagggtcatcatatgcaacaatacagaaaaatcgactcagttgcacaggggctgcttctctagagccgacacggccgaaacgacgggggaccggtagacggaccgcgccacgcaggacaagagaagaacgacgaacagaccagacgcacggaagaggcggaagcagtgaaggaagcggcgacggcgagaaagcagcggaagcggcaagtagaaacgaaggagatgtaagcaaacgtaaagcgagcagcgacagcggccagatagcgcgtgctgtaagacggaaaagacagagggacgagagcgagcgcacggagcaataa

SEQ ID NO: 141706 - DNA, 472 bp, Homo sapiens
accatgtatttcctgactcccatcttggtagccattctctgcattttggttgtgtggatctttaaaaatgccgacagaagcatggagaaaaagaagggggagcctagaaccagggccgaagctcgcccctgggtggatgaagacttaaaagacagcagtgacctgcaccaagcagaagaagatgctgatgaatggcaagaatcagaagaaaatgttgaacacatccccttctctcataaccactatcctgagaaggaaatggttaagaggtctcaggaattttatgaacttctcaataagagacggtcagtcaggttcataagtaatgagcaagtcccaatggaagtcattgataatgtcatcagaacggcaggaacagccccgagtggggctcacacaaagccctggaccttcgtggttgtgaaggacccagacgtgaagcacaagattcgaaagatcattgaggaggaac

SEQ ID NO: 141707 - DNA, 1215 bp, Homo sapiens
catgtatttcctgactcccatcttggtagccattctctgcattttggttgtgtggatctttaaaaatgccgacagaagcatggagaaaaagaagggggagcctagaaccagggccgaagctcgcccctgggtggatgaagacttaaaagacagcagtgacctgcaccaagcagaagaaggtgggaatgcagtggaaggcgtggatcagagtaaagttaatggaagagcaacagggtttgctagtaaattggatattgggaaaaggaggagagagggagagttggagactggaagctatcataagtggactcatgcctatgctctgaaaaagagtggtccatggaatccagggacatggcagcacaggaaaatcgtcagaggtttacaattttacactgtcttcttccctcatcagcctgttttggcatttttagctccagtgattgacccttctgttgcatcttcatcttctctaagatcttcaactactgataatgagcttgcagaactttctgaacaggaggatgctgatgaatggcaagaatcagaagaaaatgttgaacacatccccttctctcataaccactatcctgagaaggaaatggttaagaggtctcaggaattttatgaacttctcaataagagacggtcagtcaggttcataagtaatgagcaagtcccaatggaagtcattgataatgtcatcagaacggcaggaacagccccgagtggggctcacacagagccctggaccttcgtggttgtgaaggacccagacgtgaagcacaagattcgaaagatcattgaggaggaagaggagatcaactacatgaaaaggatgggacatcgctgggtcacagacctcaagaaactgagaaccaactggattaaagagtacttggatactgcccctattttgattctcattttcaaacaagtacatggtttcgccgcaaatggcaagaaaaaagtccactactacaatgagatcagtgtttccatcgcttgtggcatcctgctagctgccctgcagaatgcaggtctggtgactgtcactaccactcctctcaactgtggccctcgactgagggtgctcctgggccgccccgcacatgaaaagctgctgatgctgctccccgtggggtaccccagcaaggaggccacggtgcctgacctcaagcgcaaacctctggaccagatcatggtgacagtgta

SEQ ID NO: 141708 - DNA, 401 bp, Homo sapiens
cggccgctctcccccggaagccctcggaggcagcacgatggacgtggccacactgccctccagtggccagctcgccgaacaacacgtctgggccccttttgggggtctgggtgacgtgtccaccctctctctgccctttgctacatttgaaggtggggtttgctcatccatggttcctcttacaggtcaccaaagctgccacagtgcacactcacccaacagcaggggatttgccgccttcggtggttctcaaacttcagtgtgcacaggaatccccccttggacagttctttcaaacccggattgctgggtcccccaaccaagtcagagaatttgcatttctaacaaatcctcaggcgatgctgagctgctggtccgctggtcctggagccacacttaga

SEQ ID NO: 141709 - DNA, 1245 bp, Homo sapiens
ttagcactgtcgcagtgtccactcatcatgggtactaatactcgtggagccataagtaaaagccacaatggtggttggagagctgctgtcagggaagcatgtcctgggaatcgatgaaatgcagtagttctttttcttctgattggtggtttgtgtgcttctggggcttctgtctcttgccacgaggcctgttacatgctggcagctttcccagtgaattttctccaccccaggaccagcctgggtaagtccctggccattcaactcagccagcaggggaagggctgtagggagcccttcccctccccttggccggtccttggtggcactttcagtggccatgtccttgctggataatgcttctttcatccttgataaaaaacacaggggtgctactgacttcaccagctggtttggaggcttcaaagagaagatggccgtgtagcctgagctcagccagtgacactggtgaatgtcaaagaatggaagccatcgtgaccctgggggctgtgtcagttcccttgccttgctggactccagacagcggaccagcagctcagcatcgcctgaggatttgttagaaatgcaaattctctgacttggttgggggacccagcaatccgggtttgaaagaactgtccaaggggggattcctgtgcacactgaagtttgagaaccaccgaaggcggcaaatcccctgctgttgggtgagtgtgcactgtggcagctttggtgaccttcaaatgtagcaaagggcagagagagggtggacacgtcacccagacccccaaaaggggcccagacgtgttgttcggcgagctggccactggagggcagtgtggccacgtccatcgtgctgcctccgagggcttccgggggagagcggccgcgggaggacgggaacgaagccgtagcgagaacctcgccccacgccgcagcctcctgcagcagcgtcggctcgccggccccttgcgttccgagccgcccagggagctcagccgccgcagccccggcccctgtgtctcccctcgcgggccgggcctggtgtgcacgtctggatggcctcgggcccagcagctgcagcagatctggttgcctttggtcagacaagagcaggccctggtttgggggcccacagtaccccggggtggagggtgcagttggtgggagaaactcagcactaaagaagtcacagggctgtggcaaagacccgtcctctctcactcccccgccggctgtccacat

SEQ ID NO: 141710 - DNA, 1180 bp, Homo sapiens; identical to SEQ ID NO: 120252

SEQ ID NO: 141711 - DNA, 956 bp, Homo sapiens
atgccagctgctatggtcaactcaaatacaactcccaggagagatgtcatcaagagcccaccagttgcacagagcggtagaccctgcttctctaagtgggcagcggacagcggcacgcacatttcacctgtcccgcagacaacagcaccatctgcttgggagaaccctctcccttctctgagaaagaaagatgtcgaatgggtattccacagacgagaatttccgctatctcatctcgtgcttcagggccagggtgaaaatgtacatccagaggtgaaggagcagattcagaggacagtcgccacctccgggaacatgcaggcagttgaactgctgctgagcaccttggagaagggagtctggcaccttggttggactcgggaattcgtggaggccctccggagaaccggcagccctctggccgcccgctacatgaaccctgagctcacggacttgccctctccatcgtttgagaacgctcatgatgaatatctcccacctgctgaacctccttcagccccactctggggggacaagctcctagttaaagacgtctggattaagtgcatggaggaggaactgttgacaattgaagacagaaaccggattgctgctgcagaaaacaatggaaatgaatcaggtgtaagagagctactaaaaaggattgtgcagaaagaaaacctggttctctgcatttctgaatgttcttcgtcaaacaggaaaccaatgaacttgtccaagagttaacaggctctgattgctcagaaagcaatgcagagattgagaatttatcacaagttgatggtcctcaagtggaagagcaacttctttcaaccacagttcagccaaatctggagaaggaggtctggggcatggagaataactcatcagaatcatcttttgcagattcttctgtagtttcagccgcgttacctggcaaaatcggctacggttga

SEQ ID NO: 141712 - DNA, 1410 bp, Homo sapiens
atgacggtgttctttaaaacacttcaaaatcattggaagaaaactacagctgggctcttcctgctgacctggggaggccagtggctctatggaaaacactgtgataacctactaaggagagcagcctgtgaagaagctcaggtgtttggcaatcaactcattcctcccaatgcacaagtgaagaaggaaactgtttttctcaatcctgcagcttgcaaaggcaaagccaggattctatttgaaaaaaatgctgccccgattttacatttatcccagcatagagagacagttccatttgacgtcttgcagatcaagggtgaaaaggaacagcctgtgtttgcaatgactggcctttggtggggatccctcagagatgctggcatcaaagttagcagcactcttaaggagtggcctcagactcatgaaacttctatcttgtatacaggacctacagagagacctgccaatgaaccagaggagacccctgtacgaaggccttctttgtacaggagaatattacggaggcttgcatcttactgggcacaaccacaggatgccctttcccaagaggtgagccgagaggtctggaaagatgtgcagttgtccaccattgaactgtccatcacaacacggaacaatcagcttgaccgaacatgcaaagattttatgaacatctgcattgaagccgacaccgtcagcaaaggaggctttataactataggaagcctaaaggtgagaaaagccaagctggacactgagggcatggagtgtctccaagccagccagtacactttgcttgtccccaagggagcagggagctcttttagcattgacagtgaggagtatgaagcgatgcctgtggaagtgaaactgctccccaggaagctgcagttcttctgtgatcctaggaagaaagaacagatgctggcaagctccacccacctcctccacgggtgctgctattttgagagctccggctcttgtttagcttttatttcaattctatcctcagtccagaaaggagctgagtttaagaaggctagaggaagtccagttagatttgatattgaccaaacaggagactgcccagatgctattgatcccctgcacttggcagcacaaatgcccttgggtgtgcattacttcaagcaaacggaagtgtgccccgctgacagtgggaatgcctggctggggattgatgatgatgatgatgatgatgatagtgatgatgatgataatggtggtgatgatgatgatagcagtaatggaactggttctgggccagtgccagagtgggtgattgggaaatatagtgaaaaggcagccatttacaaaccaagaagagagcctttaccacagtccaaccatactggcaccctcatcccaggtctccagcctctagaaatgtga

SEQ ID NO: 141713 - DNA, 1200 bp, Homo sapiens
atgggcacaaaagaatcaaccagaagaatatgggatgtgattagagagcaggatctcagggttttagatttccaaagtggaatagttctgggtgacattaggggccaggatgtggccatggaaatgggtggatgtggtgaatcagaggagtggcctcagactcatcaagcctctatctcatacacgggacctacagagagacctcccaatgaaccagaggagacccctgtacaaaggccttctttgtacaggagaatattacgaaggcttgcgtcctactgggcacaaccacaggatgccctttcccaagaggtgagcccggaggtctggaaagatgtgcagctgtccaccattgaactgtccatcacaacacggaataatcagcttgacccgacaagcaaagaagattttctgaatatctgcattgaacctgacaccatcagcaaaggagactttataactataggaagtcgaaaggtgagaaaccccaagctgcacgtggagggcacggagtgtctccaagccagccagtgcactttgcttatcccggagggagcagggggctcttttagcattgacagtgaggagtatgaagcgatgcctgtggaggtgaaactgctccccaggaagctgcagttcttctgtgatcctatgaagagagaacagatgctcacaagccccacccagtgagcagcagaagacaagcactctgagaccacactttaggccaccggtgggaccaaaagggaacaggtgcctcagccatcccaacagtgtcgtcagagggtccccagggcattttcatgggaaggacccctctgcccccactccagcagtgcttcccaaagtgtgctctgtcacctgctttgcaatcggcttccattagcgcatgttttattttggtgtgacggttggccctcctaaacacggactttcctcaggctggttcaagacggaaaaggactttcttctgttttcttccaaagtgcaaccacagtggagagcccacggtgggcttagcctgcctaggcccttccatttctcttctttgaccgtgctaggaattccaggaaagtgcattcctgccctggtgaccttttcctatgtctaggctcctccacaggtgctgctattttgtgagctccggctcctgtttagcttttatttcagttctaacctcagtccagaaacatatgtgag

SEQ ID NO: 141714 - DNA, 776 bp, Homo sapiens
tgggaaaaaaaggagtgagagaggataaaagaatggaagacagagtaatagggacattacatgaagaccatggataaattatatttttttctctttccgcctctactaacctagcaaatctctagaagatgacggtgttctttaaaacgcttcgaaatcactggaagaaaactacagctgggctctgcctgctgacctggggaggccattggctctatggaaaacactgtgataacctcctaaggagagcaccctgtcaagaagctcaggtgtttggcaatcaactcattcctcccaatgcacaagtgaagaaggccactgtttttctcaatcctgcagcttgcaaaggaaaagccaggactctatttgaaaaaaatgctgccccgattttacatttatctggcatggatgtgactattgttaagacagattatgagggacaagccaagaaactcctggaactgatggaaaacacggatgtgatcattgttgcaggaggagatgggacactgcaggaggttgttactggtgttcttcgacgaaccagatgaggctaccttcagtaagattcccattggatttatcccactgggagagaccagtagtttgagtcataccctctttgccgaaagtggaaacaaagtccaacatattactgatgccacacttgccattgtgaaaggagagacagtttcacttgatgtcttgcagatcaagggtgaaaaagaacagcctgtatttgcaatgaccggccttcgatggggatcttttaaaag

SEQ ID NO: 141715 - DNA, 1446 bp, Homo sapiens
gcgactgcggacaggttagagttgtggttggggcggacgcggaagcagcccaagggcagagagggagcccgagccaggccatctccaaccatgttcgacgaggcctcggccatcacttcctacgagaagtttctaacccccgaggagcccttcccactcctgggacctcctcgcggggtgggcacctgtccgagcgaggagccggactgcctggacatcaacgacttcggctgccagctgtcctcctgccatcgcaccgacccgctccaccgcttccacaccaacaggaggaacctaactttttgtggaacaagtgttgccagctcacaaggcagggaggagctgttttcatctgcgtctgttgggaaacaagaatgattcctatccccgtttaggtgatcaggacttcacttcttttgatttatttcctgaggggagtgtctgcagtgatgtctcttcttctattagcacttactgggattggtcagatagcgagtttgaatggcagttaccaggcagtgacattgccagtgggagtgatgtactttctgatgtcatacccagtattccaagttcaccttgcctgcttcctaaaaagaaaaacaagcaccggaatttagatgaactcccttggagtgcaatgacaaatgatgagcaggtggaatatattgagtatctgagtcggaaagtgagtactgagatgggtcttcgggagcaacttgatattattaagatcattgatccttctgctcaaatctcccctacagacagtgagtttattattgaacttaactgtctcacagatgaaaaactgaagcagcattttgaaggtagaacatcaaggtgcaacactaaccagtttgtgtttgtgcatcccaaggtcagaaactatatcaaggaacatagccctcgccaacggcctgcaagagaggcctggaagagaagcaactttagttgtgcaagcaccagtggagtgagcggtgccagtgccagcgccagcagcagcagtgccagcatggtcagttctgcaagcagcagtgggtccagtgttggaaactctgcttcaaactccagtgccaacatgagtcgagcacacagtgacagcaacctgtctgcaagtgcagcagagcggattcgggattcaaaaaagcgatccaagcagcggaagttacagcagaaggccttccgcaagaggcagctgaaggagcagaggcaggcccggaaggagaggctcagtgggctcttccttaacgaagaggtgctgtccttgaaagtgactgaggaagaccatgaagcagatgttgatgttttgatgtaataagggtgaatttatcaacgttctttgtgagcattaaaatactccatccttatgggtttacatgcatcttgaccaaaattttggttagggctgtgctgatgtaccattaataatttaagccagtggtt

SEQ ID NO: 141716 - DNA, 963 bp, Homo sapiens
actcgggatggtggcatcgctttacatcctagggagggactctcttaccacccggaattaagatgtttccttccaatgggcttttggtgtaggatgtcggagaaccaagaacaggaggaggtgattacagtgcgtgttcaggacccccgagtgcagaatgagggctcctggaactcttatgtggattataagatattcctccataccaacagcaaagcctttactgccaagacttcctgtgtgcggcgccgctaccgtgagttcgtgtggctgagaaagcagctacagagaaatgctggtttggtgcctgttcctgaacttcctgggaagtcaaccttcttcggcacctcagatgagttcattgagaagcgacgacaaggtctgcagcacttccttgaaaaggtcctgcaaagtgtggttcttctgtcagacaggcagttgcacctattccttgcaagccagctctcggtgcctgagatagaagcctgtgtccagggccgaagtaccatgactgtgtctgatgccattcttcgatatgctatgtcaaactgtggctgggcccaggaagagaggcagagctcttctcacctggctaaaggagaccagcctaagaggccttacatccatactaccgagtccaagagtgaagtaatctgctccaagttctggtaccctaaatgtggagatgttgaagaaatgaacttcaatctccagatgctgcgtgcttctctggaggtggaacagttcatgacacgtccagagggctggtggtgtgcatatgccaccttggtgactcacagcacagcaatgcgggcatgtctgatggtgtggaaaagggaaatgtctgtagcctgcttcctgttccatgatgggatgtggaggataaaaggtgaccagctgctcaccatcaggctgcaagtgtctacagtggaaccagatgtcctctttgaggaccagcactag

SEQ ID NO: 141717 - DNA, 440 bp, Homo sapiens
  misc_feature (1)...(440): n = a,t,c or g
aagtcagggttcccatctatagtgacaaatccataggggcttgcttgggaagtaccatcctttcgtggaaggtgccgggtgtataaaggagtacctttgggcagcctggtcccaaagctgaaagcccaggtctggtgcctctggggcaggttggctgcccaggggagaaaccaaatcattaatgtgtccacctagtgggggctgcgagattgtcgaagcctggctgagagctgatcgatatgcattctgggatgttcccctggactccccaccccttgcctgactctgttcttggggctccccagggaaaggggaactgcaacttcaggcagtgtaatttgtctaaaaagaaacacggggaaaagangtagctgcaaaacatcgagccatcntcaactttccccccacttcccacaacacctttgggacacaccagattg

SEQ ID NO: 141718 - DNA, 603 bp, Homo sapiens
atggacaggtttgacatctacaggaaggtgcccaaggaccttacgcagccaacgtacaccggggccattatctccatctgctgctgcctcttcatcctcttcctcttcctctcggagctcaccggatttataacgacagaagtgtataggagttgcccgaagggcctccgcaggatgagccctaagacttacagagcaatcgagaggagaaagcatcacatctttggggtcttccagttgtcagaagcttgtggcccccaggaagccctacaggtttgggaacaactgaaggtcacagttctcgtcttctgggtggctggccctctgtggcaggtagttcgaggacactacaaaggtcagcaaattggcaaggtagtccaggtgtacagaaagaaatatgtcatctacatcgagcgggtgcagcgtgagaaggccaacggcacaactgtccacgtgggcattcacccaagcaaggtggttatcaccaggctaaaactggacaaggatcggaaaaaaattcttgaacgcaaagccaagtctcgacaagttggaaaagagaaaggcaaatataaagaagaacttattgagaaaatgcaggaataa

SEQ ID NO: 141719 - DNA, 375 bp, Homo sapiens
atggaggagctgaaaacgccagtggtagacacagtcaacaagcaaacaaaactagactgtatcgatcaggggcaagtactccaaagacaagaactaaagcagggcaggagagggacaaccttaaaagggaaaattgggaacaactctgtgttcctcgatgaggacagagaagtaagtgaggatccagccatagaagggaacgtgctggagccattcgaaatgaccctcacgggtccacaggacatgggaaatgccaatggtccccggcaacttccacgtgtccacacacagtgccacagcgcagccacagaacccagacatgacgcatgtatccacaagctctcctttggggacacgctacaggccttgggatag

SEQ ID NO: 141720 - DNA, 1692 bp, Homo sapiens
cccacgcgtccggaagcacttgaggccagaggaagacatgcgccttgtcagtgatccctgcatccctaggggggggcagcacgtcattcctgtgagaggctggactggagagagagactgggttggcagccaggctggagaagctgtgaccagcctggaacgccaggcccaggcaggtggacttgaaacttactcacaagaagcaaagagccctgttggaaaggtttgacatctacaggaaggtgcccaaggaccttacgcagccaacgtacaccggggccattatctccatctgctgctgcctcttcatcctcttcctcttcctctcggagctcaccggatttataacgacagaagttgtgaacgagctctatgtcgatgacccagacaaggacagcggtggcaagatcgacgtcagtctgaacatcagtttacccaatctgcactgcgagttggttgggcttgacattcaggatgagatgggcaggcacgaagtgggccacatcgacaactccatgaagatcccgctgaacaatggggcaggctgccgcttcgaggggcagttcagcatcaacaaggtccccggcaacttccacgtgtccacacacagtgccacagcccagccacagaacccagacatgacgcatgtcatccacaagctctcctttggggacacgctacaggtccagaacatccacggagctttcaatgctctcgggggagcagacagactcacctccaaccccctggcctcccacgactacatcctgaagattgtgcccacggtttatgaggacaagagtggcaagcagcggtactcctaccagtacacggtggccaacaaggaatacgtcgcctacagccacacgggccgcatcatccctgcaatctggttccgctacgacctcagccccatcacggtcaagtacacagagagacggcagccgctgtacagattcatcaccacgatctgtgccatcattggcgggaccttcaccgtcgccggcatcctggactcatgcatcttcacagcctctgaggcctggaagaagatccagctgggcaagatgcattgacgccacacccagcctaatggccgaggaccctgggcatcgccagccttgcctccagtgccctgtctcctttggccctcaatctggtcccaaatctggctgtgtcccaaagggtgtgtgggaagtggggggaaagtagaggatggctcgatgttttgcagctacctcttttccccgtgtttctttttagacaaattagcactgcctgaagatgcagttcccctttttctggagagccccaagaacagagtcaggcagggggtggggagtccagggatcttggggacccctcctaggagagctgcagtctcttccctcaggggaacatcccagaatgcatatcgatcagctctcagccaggcttcgacaatctcgcagcccccactatgtggacacattaatgatttggtttctcccctgggcagccaacctgccccagaggcaccaaacctgggctttctagcttttgggaccaggctgcccaaaggtactcctttatacacccggcaccttccacggagatgggtactttcccaagcaagcccctatgatttgtcactatagatggaaccctgacttctgccccatcccttcctgcccaacctagaacccaggcctg

SEQ ID NO: 141721 - DNA, 468 bp, Homo sapiens
gcgcagaatttctttacaattcaaggtgctaagaggccattttttggtcatcaagtccagctgtccttgtcagatgaagaaaatgaagcttatcatcataaagaattgtccagggttccgagttagtgatagggctgagaagacccttgagctcctgttcccagtctaatattctttctactccagtattgagatgcgtattcgtttccgcttgggacacagaatgtctttcagtatgacctttaaggattcgtagcttccagccctttgagctcctgggtgtattggcgacgactcactgtccttgtgtttgtagtttaatgcgctgaaggttcccgtgcccttgtgtttgtagtttaatgcgctgaaggttcccgtgccagaggataaatatactgcccaggtggatgccgaagaaaaagaagatgtaagtagttgaggctcctgcttattctaaaattctcttga

SEQ ID NO: 141722 - DNA, 432 bp, Homo sapiens
gaaaagctgtggtttgcctgtcagagtgagcgcccccactcagggtaaccacagtttctccatagagcaataggacagcaggagtgggctgggacgactcctaccttagcagctgctggggtagaatgcagcctggtttcagaactgaatttctctttcttcttaaaggtgaaatcttgtgctgagtgggtgtctctctcaaaggccaggattgtagaatatgagaaagagatggagaagatgaagaacttaattccatttgatcagatgaccattgaggacttgaatgaagctttcccagaaaccaaattagacaagaaaaagtatccctattggcctcaccaaccaattgagaatttataaaattgagtccaggaggaagctctggcccttgtattacacattctggacattaaaaataataattataca

SEQ ID NO: 141723 - DNA, 666 bp, Homo sapiens
cggacgcgtgggctgcggaggaccgtgggcagccagggtcggtgaaagaatccccaacatggctgggcgaaaacttgcctcctaaaaacccactgactgagtagcttttgccagagattcataccccagaacccaaaagcgccattgcctagtttcctgaaatccctggaatggagacccctcaccctccaggttgggctgctttaccctgagaatcccacccagctatcgaactgggcttaactaccaaggcccaatgttgcccaaggcttggcttgggtggatgactttgaggaagaagtttaatgccgctgaaaggttcccgtgcccagaggataaaatatactgcccaggtggatgcccgaagaaaaaagaagatgtgaaatccttgtgcctgagtgggtgtctctctcaaaggcccaggattgtagaatatgagaaagagatggagaagatgaagaacttaattcccatttgatcagatgacccattgaggacttgaatgaagctttcccagaaaccaaattagacaagaaaaagtatccctattgggctcaccaacccaattgagaatttataaaattgagtccaggaggaaagctctggcccttgtattacacattctggacattaaaaataataattatacaaaaaaaaaaaaaaaaa

SEQ ID NO: 141724 - DNA, 678 bp, Homo sapiens; identical to SEQ ID NO: 125688

SEQ ID NO: 141725 - DNA, 1357 bp, Homo sapiens
gagaggacgaggtgccgctgcctggagaatcctccgctgccgtcggctcccggagcccagccctttcctaacccaacccaacctagcccagtcccagccgccagcgcctgtccctgtcacggaccccagcgttaccatgcatcctgccgtcttcctatccttacccgacctcagatgctcccttctgctcctggtaacttgggtttttactcctgtaacaactgaaataacaagtcttgatacagagaatatagatgaaattttaaacaatgctgatgttgctttagtaaatttttatgctgactggtgtcgtttcagtcagatgttgcatccaatttttgaggaagcttccgatgtcattaaggaagaatttccaaatgaaaatcaagtagtgtttgccagagttgattgtgatcagcactctgacatagcccagagatacaggataagcaaatacccaaccctcaaattgtttcgtaatgggatgatgatgaagagagaatacaggggtcagcgatcagtgaaagcattggcagattacatcaggcaacaaaaaagtgaccccattcaagaaattcgggacttagcagaaatcaccactcttgatcgcagcaaaagaaatatcattggatattttgagcaaaaggactcggacaactatagagtttttgaacgagtagcgaatattttgcatgatgactgtgcctttctttctgcatttggggatgtttcaaaaccggaaagatatagtggcgacaacataatctacaaaccaccagggcattctgctccggatatggtgtacttgggagctatgacaaattttgatgtgacttacaattggattcaagataaatgtgttcctcttgtccgagaaataacatttgaaaatggagaggaattgacagaagaaggactgccttttctcatactctttcacatgaaagaagatacagaaagtttagaaatattccagaatgaagtagctcggcaattaataagtgaaaaaggtacaataaactttttacatgccgattgtgacaaatttagacatcctcttctgcacatacagaaaactccagcagattgtcctgtaatcgctattgacagctttaggcatatgtatgtgtttggagacttcaaagatgtattaattcctggaaaactcaagcaattcgtatttgacttacattctggaaaactgcacagagaattccatcatggacctgacccaactgatacagccccaggagagcaagcccaagatgtagcaagcagtccacctgagagctccttccagaaactagcacccagtgaatataggtatactctattgagggatcgagatgagctttaa

SEQ ID NO: 141726 - DNA, 1035 bp, Homo sapiens; identical to SEQ ID NO: 123566

SEQ ID NO: 141727 - DNA, 997 bp, Homo sapiens
  misc_feature (1)...(997): n = a,t,c or g
aaatggcgaataaccccggtgccaacgggcaggcccgggggccctggtggcccggggatgggaaaaccccgttgctttccggcgaggttttcggcattgtcatccggggccggggttcccgcccggtggacggggccggggccgagagccgcggagctcgcgggagcaaaggccgaggataaagggattgggatgcccgtccaccaagttggggccgctttggtcaaggaccattaaagatcaaagttcccctggaaggagatctatctcttctccctgccccattaaaggaatcagagatcattgattttctttctggggggcctcctctcaaaggatgaaggttttgaatgattatgcccagtgcaagagcaagacccgtgccggcccagccgccaccagggttcaaggcattttgttgctatccgggaactaccaatggcccacgtcggttctgggtgttaagtgctcccaagaaggtggcccaccggccattccgtggggccattcatcctggccaagcttctccatcgtccccgtgcgcaagaggctactgggggaacaaaattcgcaagccccaacactgtccctttgcaaggtgacaaggccgctgcggctctgtgctggtacgcctcatcccctgcaacccaggggcactggcatcgtctccgcacctgtgcctaataagcttgctcatgatggctggtatcgatgactgctacaccctcagnccgggggctgcactgccaccctggggcaacttcgccaaggccaccctttgattgccatttctaagacctacagctacctgacccccgacctctggaaggagactgtattcaccaagtctccctatcaggagttcactgaccaactcgtcaaagaccacaccagagtctctgtgcagcggactcaggctccagctgtggctacaacatagggttttttatacaagaaaaataaagtgaattaagcgtgaaaaaaaaaaaaaaaaaaa

SEQ ID NO: 141728 - DNA, 867 bp, Homo sapiens
atggatgatcctgccagcgctaaaaaacctttcgaaggtaatctgaacgcaggatatcttgcacaatcaggcaatacgaaaagctcctcacttacggctgacaccaccatgacctgctggctgacagaccgttataacggctatcgagagcgcgatgtgttgaccgcgggttatggtcgtcagtttttgaatggcccggtcacagtttccgctttgaattcggtccaggtagatctgtttccaacctcagctgaggtcccctacagtcagcttcctgccattgccattttccttaatttccatctaactctaaatctgatgaagctttcacgccttcattttgaaggaggcaccgctgctgccaggagccctgtgctatcagccatggtcaaccccaccgtgttctttgacacggagcccttgggccgcatctcctttgagctgtttgcagacaagtttccaaagacagcaggaaactttcatgctctgagcactggagagaaaggatttggctataagggttcctgctttcacagaattgttccagggtttatgtgtcagggtggagacttcacatgccatgatggcactggtggcaagtccatctacagggagaaatttgatgacaagaacttcatccggaagcatacagtttctggcatcttgtccatggcaaatgctggacccaacgcaaacagttcccagtttttcatctgtgctgccaagactgagtggttggatggcaagcatgtggtcttcagcaaggtgaaagaaggcatgaatattgtggagaccatggagtgctttgggtccaggaatggcaagaccagtaagaagatcaccattgctgactgtgggcaactctaa

SEQ ID NO: 141729 - DNA, 952 bp, Homo sapiens
ccggcgcgcccacgcgtgcgcgaggagaaggagaaagaaagaaatgcttggggtaaatgttttaactagtcattcttcccaggagcggatgaagctgacttttaaaaagaaggctgtgaactttgcagatgctgctgccgcccagggccccctgcttccagccatggtcaaccccaccatgtttttccacattgctgtcgatggcgagcccttgggctgtgtctccttcgaggtaaggggcctggaaagcaagaagtgactgctcatctaatccataaaactatgttaacagattggagctgtttgcagacaaggttccaaagacagcagaaaatttccatgctctgagcactggagaaaaaggatttggttataagggttcctgctttcacagaattattccagggtttatgtgtcagggtggtgactgtgaagtcaccataatggcactggtggcaagtccatctacacggagaaatttgaagatgagaacttcatcctaaagcatacaggtcctggcatcttgtccatggcaaatgctggacccaacacaaatggttcccagtttttcatctgcactgccaagactgagtggttggatggcaagcacgtgctctttggcaaagtgaaagaaggcacgaatattgtggaggccatggagcgctttgggtccaggaatggcaagaccagcaagaagatcaccattgctgactgtggacaactcttaataagtttgacttgtgttttatcttagccaccagaccattccttctgtgctctcctctcaggagagcacccctctaccccatttgctcgcaggatcctaagaattttgtggctctcgctgcagttcctttggggttccatgttttccttgttccctcccatgcctagctggattgcagagttaagtttatgattatgaaataaaaactaaataacaaaaaaaaaa

SEQ ID NO: 141730 - DNA, 387 bp, Homo sapiens; identical to SEQ ID NO: 141436
  misc_feature (1)...(387): n = a,t,c or g

SEQ ID NO: 141731 - DNA, 890 bp, Homo sapiens
tctcactcaccttaggagtctgacctctcacttttccagcacgggccagggaaccatggactttacctgtagtgggaaaggaaggcaccagcaggtaagagcaagaaggtgccacccagcagaacccctcttttctcaattcaagcctttaaagagaagctgcgcccaataggtaatgagaacaaagttgcagatatttgaccttgaaatcttaagtttcatttcaggatcttccagcttctaattttatagagcactttgggggccctggtctgacctaattttagtgtggaagctgataaccagactaggatctcgtgatgtgactgaaatacaactacactctggctcagtctcccatggacgtctgtgttcaacatgagggatgtaaacaggaagaatcactctgaactgaagacagtgagaagtactctattaccataggtgtgacactcagctgtcaggactatgcaccccacactcactagacgcttaccggtacttcaaagaacattcctctctcactcacctccaaagcatgcgggcctggttacttcccagggtaagtcagggccttccaccccgcacttggcccagaagtgggcctcatccctccaaggggcggcgccttgccaaggaagcacgagcttgatctttccgggggcaatgccttcccagttgaaggctacatggagcctttgatcttgggcgaaccgttttccttggccggtgctggaaaagtgacaggtcgggctaagcggcggatgcagtacaaccggcgctttgtcaacgttgtgcccacctttggcaagaagaagggccccaatgccaactcttaagtcttttgtaattctggctttctctaataaaaaagccacttagttcagtaa

SEQ ID NO: 141732 - DNA, 1959 bp, Homo sapiens
cagctaccatggcccaagggctagaagtggccctcacagacctccagagctccagaaataatgtgcggcaccacacggaggagatcactgtggaccacctgcttgttcgccggggccaggccttcaacctcaccctgtacttcaggaaccggagcttccagccaggcctggacaacatcatcttcgtggttgaaactgaggatgctgtctacttggacagtgaaccccagaggcaggagtatgtcatgaatgattatggcttcatctaccaaggcagcaagaactggatccgcccatgtccctggaactatggacagtttgaagacaaaatcatagacatctgcctgaagctgctagacaagagcctgcacttccagactgacccagccacagactgtgctctgcggggaagccccgtctacgtcagcagagtggtgtgtgccatgatcaacagcaatgatgataatggggtgctcaatggaaactggagtgagaattacacagacggcgccaaccctgcggagtggacgggcagcgtggccatcctgaagcagtggaacgccacaggctgccagcccgtgcgctacgggcaatgctgggtctttgctgccgtcatgtgcacagtgatgaggtgtctggggatccctacccgtgtgatcaccaacttcgactctggccacgatacagatggaaacctgatcatagatgagtattatgacaacacaggcaggattttggggaataagaagaaggatactatctggaacttccatgtctggaatgagtgctggatggcccggaaggatctgccccctgcatatggaggctggcaggtgctggacgccacacctcaggagatgagcaacggcgtctactgctgtggccctgcctctgtcagagccatcaaagaaggagaagtggacctgaactatgacacgccctttgtgttttcgatggtgaatgctgactgcatgtcctggctcgtccagggagggaaggagcagaagcttcaccaggacacgagttctgttggcaattttatcagcacaaagagcatccagagtgacgagcgggatgacatcacagagaactacaagtatgaagaaggatccctccaggagaggcaggtgtttctgaaggctctgcagaagctgaaggctagaagcttccatggctcccaaagaggagcagagttgcaaccttccaggcccacatcactgagccaggacagccctcggagcctgcatacaccttcccttcgacccagtgatgtggtgcaagtctccctgaaattcaagctgctcgacccgcccaacatgggccaggatatatgctttgtcctgctggccctcaacatgtcctcccagttcaaggacctcaaagtgaacctgagtgcccagtctctgctgcacgatggcagccccctgtccccattctggcaggacacagcgttcatcacactctctcctaaagaagcaaagacctacccctgcaaaatctcctattcccagtacagccagtacctgtcaacagacaagctgatccgcatcagtgccctgggtgaagagaaaagcagtcctgagaaaatcctggtgaacaagatcatcaccttatcttatccaagcatcacgattaatgttctaggagcagccgttgtgaaccagccactctccatacaggtgatattttcaaacccccctctcggagcaggttgaggactgtgtgctgactgtggaaggaagtggcctcttcaagaaacagcagaaagtcttccttggagtcctcaaaccccaacaccaagcaagcatcattctggagaccgtccccttcaagagtggacaaaggcagatccaagctaatatgagaagcaacaagtttaaggacattaagggttacaggaatgtttatgtagactttgcattataaattctggaacaacgcgccagacgtgtgagtttc

SEQ ID NO: 141733 - DNA, 759 bp, Homo sapiens
atggcccggaacgatctgccccctgcatatggaggctggcaggtgctggacgccacacctcaggagatgagcaacggcgtctactgctgtggccctgcctctgtcagagccatcaaagaaggagaagtggacctgaactatgacacgccctttgtgttttcgatggtgaatgctgactgcatgtcctggctcgtccagggagggaaggagcagaagcttcaccaggacacgagttctgttggcaattttatcagcacaaagagcatccagagtgacgagcgggatgacatcacagagaactacaagtatgaagaagggctagaagtggccctcacagacctccagagctccagaaataatgtgcggcaccacacggaggaaatcactgtggaccacctgcttgttcgccggggccaggccttcaacctcaccctgtacttcaggaaccggagcttccagccaggcctggacaacatcatcttggtggttgaaactgtcctggggtcctgtgatctggtgccggtcagagcagtcaaggaggggacgctggggctgaccccagcagtgtcagacctttttgctgccataaatgcctcatgtgtggtctggaagtgctgtgaggatgggacactggagttgactgactccaacacaaagtatgttggcaacaacatcagcaccaagggtgtgggcagtgaccgctgcgaggacatcactcagaactacaagtatcctgaaaggtttctcaaccccatttga

SEQ ID NO: 141734 - DNA, 2604 bp, Homo sapiens; identical to SEQ ID NO: 127695

SEQ ID NO: 141735 - DNA, 1680 bp, Homo sapiens
atggcccggaaggatctgccccctgcatatggaggctggcaggtgctggacgccacacctcaggagatgagcaacggcgtctactgctgtggccctgcctctgtcagagccatcaaagaaggagaagtggacctgaactatgacacgccctttgtgttttcgatggtgaatgctgactgcatgtcctggctcgtccagggagggaaggagcagaagcttcaccaggacacgagttctgttggcaattttatcagcacaaagagcatccagagtgacgagcgggatgacatcacagagaactacaagtatgaagaagaacattttgaggcatttcagtcagttgctcaatgtacctataaccagaccgttcagctggatattacggcctttttaaagaccgtaaagaaaaataagcacaagttttatccggcctttattcacattcttgcccgcctgatgaatgctcatccggagttccgtatggcaatgaaagacgcaaagacctaccccggcaaaatctcctattcccaggacagccaggacctgtcaacagacaagctgatccgcatcagtgccctgggtgaagagaaaagcagtcctgagaaaatcctggtgaacaagatcatcaccttatcttatccaagcatcacgattaatctgctggcccgggtgctaagcccctcactgcccgggccggcagggctggccagccgctccgagtacgggcccgccaaacccacgcccaccgggaactctagctggcccgcaagcgccgcgcgcagccccggttcccgcccgtgcctctccctccacacctccccgcaagctgagggagccggctccggcctggaccagcccagagaaaggctcccacagtgcagcggcgagctgaagggctcctcaagcgcggccagaatgggcgccgagaacgaggaggcaccgagagcgagcgagggctgccagggctgccagcaagctgtcacctctcaacaggacggggggcccttgctccagaaccgtttcttctgggactgtggggatgagaatggggcagatgctgtctacttggacagtgaaccccagaggcaggagtatgtcatgaatgattatggcttcatctaccaaggcagcaagaactggatccgcccatgtccctggaactatggacaggctgccagcccgtggcgctacgggcaatggtgggtctttgctgccgtcatgtgcacagccctgggtatcaagagctgtgactttcaggcagcaagaaacaatgaggagcaccacaccaaggccctcagctcccggcgcctctttgtgaggagggggcagcccttcaccatcatcctgtacttccgcgctccagtccgtgcatttctgcctgccctgaagaaggcaaataaagggaaactagagagcttttcttatatctgcttcttctcaattgtcttcggctcaaagaattcttatgccaaagtggcatatttggaggtggcatatcctgccaccttacagaatggtgcccttcgtaaatatctggttctaggagcagccgttgtgaaccagccactctccatacaggtgatattttcaaaccccctctcggagcaggttgaggactgtgtgctgactgtggaaggaagtggcctcttcaagaaacagcagaaagtcttgatcccctga

SEQ ID NO: 141736 - DNA, 1656 bp, Homo sapiens; identical to SEQ ID NO: 127694

SEQ ID NO: 141737 - DNA, 2204 bp, Homo sapiens
cagctaccatggcccaagggctagaagtggccctcacagacctccagagctccagaaataatgtgcggcaccacacggaggagatcactgtggaccacctgcttgttcgccggggccaggccttcaacctcaccctgtacttcaggaaccggagcttccagccaggcctggacaacatcatcttcgtggttgaaactggaccgctgtcagacctggccttggggactcgggctgtgttcagcctggcacgccatcacagccccagcccctggattgcctggctggagaccaatggggccacctccacagaggtgagcttgtgcgctcctcccacggcggccgtgggtcggtacctcttgaaaatccacatcgactccttccaggggtctgtgacggcctaccagctaggggagttcatcctgcttttcaatccctggtgcccagaggatgctgtctacttggacagtgaaccccagaggcaggagtatgtcatgaatgattatggcttcatctaccaaggcagcaagaactggatccgcccatgtccctggaactatggacagtttgaagacaaaatcatagacatctgcctgaagctgctagacaagagcctgcacttccagactgacccagccacagactgtgctctgcggggaagccccgtctacgtcagcagagtggtgtgtgccatgatcaacagcaatgatgataatggggtgctcaatggaaactggagtgagaattacacagacggcgccaaccctgcggagtggacgggcagcgtggccatcctgaagcagtggaacgccacaggctgccagcccgtgcgctacgggcaatgctgggtctttgctgccgtcatgtgcacagtgatgaggtgtctggggatccctacccgtgtgatcaccaacttcgactctggccacgatacagatggaaacctgatcatagatgagtattatgacaacacaggcaggattttggggaataagaagaaggatactatctggaacttccatgtctggaatgagtgctggatggcccggaaggatctgccccctgcatatggaggctggcaggtgctggacgccacacctcaggagatgagcaacggcgtctactgctgtggccctgcctctgtcagagccatcaaagaaggagaagtggacctgaactatgacacgccctttgtgttttcgatggtgaatgctgactgcatgtcctggctcgtccagggagggaaggagcagaagcttcaccaggacacgagttctgttggcaattttatcagcacaaagagcatccagagtgacgagcgggatgacatcacagagaactacaagtatgaagaaggatccctccaggagaggcaggtgtttctgaaggctctgcagaagctgaaggctagaagcttccatggctcccaaagaggagcagagttgcaaccttccaggcccacatcactgagccaggacagccctcggagcctgcatacaccttcccttcgacccagtgatgtggtgcaagtctccctgaaattcaagctgctcgacccgcccaacatgggccaggatatatgctttgtcctgctggccctcaacatgtcctcccagttcaaggacctcaaagtgaacctgagtgcccagtctctgctgcacgatggcagccccctgtccccattctggcaggacacagcgttcatcacactctctcctaaagaagcaaagacctacccctgcaaaatctcctattcccagtacagccagtacctgtcaacagacaagctgatccgcatcagtgccctgggtgaagagaaaagcagtcctgagaaaatcctggtgaacaagatcatcaccttatcttatccaagcatcacgattaatgttctaggagcagccgttgtgaaccagccactctccatacaggtgatattttcaaaccccctctcggagcaggttgaggactgtgtgctgactgtggaaggaagtggcctcttcaagaaacagcagaaagtcttccttggagtcctcaaaccccaacaccaagcaagcatcattctggagaccgtccccttcaagagtggacaaaggcagatccaagctaatatgagaagcaacaagtttaaggacattaagggttacaggaatgtttatgtagactttgcattataaattctggaacaacgcgccagacgtgtgagtttc

SEQ ID NO: 141738 - DNA, 431 bp, Homo sapiens
tgcctgtccgtccaccagcacatcccactgcagaggcgccacctgcagttgctccaggacgagctggttcaggagtccttcaacactcgcttcgccactgcgcttcagggaggggattctccagcagatgcccagcttgctgtggatctccaggcctcgggcttcccgccgctcttcctccagctgcttggggtttgcaaattgccccttctccccaggggactccgggaaactctcaaagttgaacttgtccacttgaatagccattcgctggcactcaccggcgtgcaggatgagtgcctcgctgctcctggtgctgacggtcagctcatgctcggtggagttgaagacatccaggagcaggtgacactgccgggtactggttgctgggagggtgctgactcgggtgaaaaatacagacggctcgactt

SEQ ID NO: 141739 - DNA, 1707 bp, Homo sapiens
atgaatgtaggaggaattatggaaatagaaaagtcaccatttggcaaacacataatcattgaaggtgtgcgcacactcaaacacaatacacgcacagccaggggcctccctgcagttcacccttctgacctgaggaaaaaggcaacaccttccaggacccgcctgaccacctgggagcctgagtggagcacaggtcctggctgtgtcctccgcagccccagggcctttactccagctgctgcttctccctgcctcttccactggcctctgggtccctcttactcctcaaggctcacctttgacagcgccctcagagaccctcctcacttcctttactcctctttggcccacgtggccttccgcttcctgtgctctcacctcacgtcaccacgcagtcaattctcacgtacctttcacgagccaggcccccggctaatggatggtgccacccacactgacggtggatcttcaccacacagtcccccaactcacacgccagtcccctcagggacacacccagcggcaacgcgttaccagttctccaggtattcctcaatccagtcaagaaagcagccctgtgatactggaggaaggcacaatgtcttgggaggccctgacgtgctggacaaaggggccttccctggagttgcacagtcctgccagaggcccggtgcctgcctctggaaccctcagtctgcccgtgtagatggggacggagaaaagaagaggctgccaagtgttcggatgcccttcactgtagaggcatccgacacattggatgtagagccaatgtctgtgatatttctagggctgtacacattttcaccttcagctgcaacagctgtgtttgaatttggcaagttccttaacttgatgaggccccagagaacgcatgcgcagcatcaagccaggctgggtctgccaagcaagctgtcgccctgcttcctctttgacggtgctgttatcctctggacgctgccatcagtggctgctttacctctcagaaatcctcagaaagaatattccagggcaagacagggtcttaccgtcacccagactggagtacaatgtacccggcagtgtcacctgctcctggatgtcttcaactccaccgagcatgagctgaccgtcagcaccaggagcagcgaggcactcatcctgcacgccggcgagtgccagcgcgtaccgtcggtcagctctgatgtcttcaatggcagcacgtgtggcacgctgaccgtcaatgttcactccatgccaccccccgaacacgggttctcagtttaccgccttgcctggtgttggctgtgggctcacgtggagcaaggcatcgaaagacgcttcttcaggccgattcccggtgaagtcacagtgccctgtcctttatcagtggccttcagtgtgaccctggaagctgtcctgaatttcaaatactctggaggcccgggccacactgaaggatattacaggaatctctccctggggctgcatgtagaagtcgagccgtctgtatttttcacccgagtcagcaccctcccagcaaccagatccgtgccatggggccaagttgctgagcctctctgggatgtaggtttttctttaggaaaccaggtgttacatgagaactgcctctcaggtggtctgccagcagccttcgggaagcaggtgctcttcacctccgagctcgtcctggtgttcgtgtccggctag

SEQ ID NO: 141740 - DNA, 298 bp, Homo sapiens
  misc_feature (1)...(298): n = a,t,c or g
gcacgagccgacatgctgcgtgatggtgtggcttcctcgcccctctctggggtgggtgtgggggtggagtggccttncccacgcctctcacctctgccttcatttgtgctgccaccctgcccctccctcgtcctcctctcccacttcctcctctctgtgtgcctcagtctcctgccggaagaaatgggttgagcccgaaaggaggctgtctgaggaagggagagggagggcctggggtnnntnnnnnnnnnnnnnnnnnnnnnnantntntnntnnntnnnnnnnnnnnnnnnatttt

SEQ ID NO: 141741 - DNA, 1299 bp, Homo sapiens
  misc_feature (1)...(1299): n = a,t,c or g
tcccttcctcgtgctcggcgttgagctcctgcagccgccgccgctgcagtggtcgtccctgccctccccggccccggggtgcaccccgcaaggctcccgctggtgtccctggagcatgggaggctgctgagcgtgagtggcggtgtctggcaggagctgcgtggcagggagggcgtccatggctgcagccaacaagggcaacaagcccagagtccggagtatccgctttgcggcaggccacgatgcagaaggatcccacagccacgtccactttgatgagaagctgcatgactcggtggtcatggtcacccaggagagtgacagcagctttctggtcaaggtttggcttcctgaaaatcctgcacaggtatgagatttactttcactctggcccccagtgcacaggcttgagcaaggatgttccgcgaggcaccttgttccccagcctgcacctcaagctcctcagcgtgggtgccccgtccctgaaggttatagtttcaagtgtgagtactcggcgcacaaagagggcgtccttcaaaagaggagataattgttagcctgcgaaggtggcactggcacctgtgtgcgcgtgacggtgcaggcccgcgtcaatggaccggcaccacggcacgcccatngcttgctggaattgttgtcaagttgtgtgggcgccgagctggaatacgactcagagcacagcgactggcacggctttgactgaggcccgaggccccgcctgccccgggcccctcagccttaaaccccgccttgtccccccgacatgctgcgtgatggtgtggcttcctcgcccctctctggggtgggtgtgggggtggagtggccttgcccacgcctctaacctctgccttcatttgtgctgccaaccctgccccctccctcgtcctcctctccccacttcctcctctctgtgtgccctcagtactctgccggaaaaaaatgggttgagcccgaaagaaggctgtctgaggaagggaaagggaggggcctggggtgggtcccccactcccccaccccaagccacagggactcccaccaagggtttgggaaaggaccgaagctggctctgtggcgtcgtggccccattactgctgccttgcttcagccacctctcctgcccctccctagtccccactgctgtccaccaatgagtaggagggaggtgcagtccccggcccccccccctcaggtttgtgtttcttggtttttaaacgactggttgggatagaaccctaaagaaataaacttccagtgggttccggaaaaaaaaaaaaaaaaaaa

SEQ ID NO: 141742 - DNA, 2301 bp, Homo sapiens; identical to SEQ ID NO: 122757

SEQ ID NO: 141743 - DNA, 1719 bp, Homo sapiens; identical to SEQ ID NO: 119497
  misc_feature (1)...(1719): n = a,t,c or g

SEQ ID NO: 141744 - DNA, 1902 bp, Homo sapiens; identical to SEQ ID NO: 116247

SEQ ID NO: 141745 - DNA, 2784 bp, Homo sapiens; identical to SEQ ID NO: 120657

SEQ ID NO: 141746 - DNA, 756 bp, Homo sapiens; identical to SEQ ID NO: 116237

SEQ ID NO: 141747 - DNA, 1743 bp, Homo sapiens; identical to SEQ ID NO: 137823

SEQ ID NO: 141748 - DNA, 1410 bp, Homo sapiens; identical to SEQ ID NO: 118421

SEQ ID NO: 141749 - DNA, 461 bp, Homo sapiens
cgggtcgacccacgcgtccgacgtggtgcaaggggatggtggccctgctgaggaagaaagggaggttgaactgcgatcccacatttgagcttgaagagatgattctagaatccaagccacttcacaaaaagaagaagcgattggcaaagaacagatccagggatggcacaaaggacagctgcccgctgaatggacacctgcagcactgtttggagactgtccgggaggaattcatcatattcaacagagagaagctcaggaggcagcagggacagggcagccagctcttggacaccgacagccgagggggaggccaggcccaaagcaagctccaggacgggtgcaacaacaacctcctcacccacacctgcacccgtggctgcagcagctgagcccacacttgttgctgctcaacaggactgcactcgtctctgccctgcccacccagagcccctctttgt

SEQ ID NO: 141750 - DNA, 2505 bp, Homo sapiens
tcacttcatttcattcatttcatcttccatcgttgataccctttcttccagttgatcacattggctcctgaggcttctgcattcttcacgtagttctcgagccttggttttcagctccatcagctcctttaagcacttctctgtattggttattctagttatacattcttctaaatttttttcaaagttttcaacttctttgcctttggtttgaatgtcctcccatagctcagagtaatttgatcgtctgaagccttcttctctcagcttgtcaaagtcattctccatccagctttgttctgttgctggtgaggaactgcattctatttcttcagcttgatcaattgtgctgttaagagactctgatgcattcttcagcatgtcaattgcattttttagtttcagaatgtttgcttgattccacgtaattatttcaatgtctttgttaaatttatttgataggattctgaattccttctccatgttatcctggattttgatgagcttcctcaaaagagcaattttaaattctttgtctgaaaggtcacatatctctgtctctccaggattggtctgtggtgccttatttagtttgtttggtgaagtagtgtttttctgggtgatcctccaatactcattggcaacaaagaaatgtgtctttccagtgtccttctcataaatggcagcatcaattttcttcaccctttcagggaagacaaaggagctgtagacgtccctggggtagccactcagcagttgatcctcctgaacgacccagtgcttactgcttctgaaatccttggtccttgtttcatcattatcaaaatgaacatctcctccgatacctggtccaggtgggaatgcatgagcaagacaaccatcatgtccataaaagggagaattgtcatggagatctgctccatccttggtccagttttcatcctcatcaaaatgagtgtcaccacccagacccggaccaggaggaaaggcatggccaagcactcccaagggaccatcaaaatagcgaggacaccgaccatggactcgagtcctaaaggcaatcatgatgtctgcaatcccctttgaaatcttggtgaattttagtggagtgactttgctccacacttctaaaccttcttggatagcctcatccacagcagctcgtgccatatccggagtatagtttattattctgtaggtgaggttgtattttctccacccagggagggtgtagccatactggcccacatcaggcaccccacacctgggtgtcttcatgatctcaagggtgtttgagtccagttttccagtcactgtcaatccaaaaaatgcttgcatttcccgaattttgtcatctatgagactcctattcttgctttgaacaagatgattcccttctatttcaagagagtagaactggttgagatatgcctgagccagttgcatattttcttcattttccgtcatccggactttaaaaataaaaacggtgtccctgctgttaacttcatatgcagcatccaaatatgatggaagagagggccaaaatgcagaaatcaaatgaaattcaggttcagggttccagtgggatcttcgccaaaaatatctgtctttaaagaacagatattctcccctcagagtgctgatggcatcgaaggacaaagcaggatcacacttggctggcatctcagatcccgaaggaacagattttgtgggcaccaggggttcctcagtagaggcagggggaggtccgtagagagactgaatgccattcacatcatcttgcgaaaggcggaactgggcgagctctgtgaatgagttgtagagtgggtacatcaaagcttcagtgttggctgagtgaaagagccccagggagtggccaagttcatgagcagcaacgaggaataaattggtgcctgatgcatcttctgtccatttttcatcatcatcaaagtgaatatctccataaagcccaggtccaggtgggtaggcatgagccaaactgtgtcctttaactgcaaaagagatcattatatcagcctctccttcatacagcctggagaatgtgagtggagtcacctcttcccagactttcagagctttctcaatggcagaatcaacagcatctcttggcaaatctggtgtataattcacaatcctgtatgtaaggtgggttttcctccacttcggcatgccaggaaaggagctgaagtgaccaacgtcaggaactccacacctgggcttgcgcatcacctccagagtgtcagtgtctagcttccctgtcacctccaacccaaggaacttctgcattccttggatttttttaacaatgagattactgtcctttcttctaaactgtttcacatccttttcgaggttgtagtacttttctaggtattgctgggcaagatccttgttggagtcctcctcttttgctgccccactcagaggataggcagagcagactggcagacacaacagcacaaggaatgcaagatgcatcat

SEQ ID NO: 141751 - DNA, 1941 bp, Homo sapiens; identical to SEQ ID NO: 116267

SEQ ID NO: 141752 - DNA, 1046 bp, Homo sapiens
cccaaagtaggtctgtgggctatagtttgtcaacccttgatatagagcatagccaggagaaacagctgtatacaaaggctaaaaaccaaaccaaaacaaaaaaggcacaaaacaacaacaacaacaacaacaacaacaacaacgaagtccaggaacgcagttcctcaccagcaacagaacaaagctggatggagaatgactttgatgagttgagagaagaaggcttcagacgatcaaattactctgagctacgggaggacattcaaaccaaaggcaaagaagttgaaaactttgaaaaaaatttagaagaatgtataactagaataaccaatacagagaagtgcataaaggagctgatggagctgaaaaccaaggctcgagaactacgtgaagaatgcagaagcctcaggagccaatgcgatcaactggaagaaagggtatcagcgatggaagacgaaatgaatgaaatgaagcgagaagggaagttgagagaaaaaagaataaaaagaaatgagcaaagcctccaagaaatatgggactatgtgaaaagaccaaatgtacgtctgattggtgtacctgaaagtcatggggagaatggaaccaagttggaaaacactctgcaggatattatccaggagaacttccccaatctagcaaggcaggccaacattcagattcaggaaatacagagaacaccacaaagatactcctcgagaagagcaactccaagacatataattgtcagattcaccaaagttgaaatgaaggaaagaatgttaagggcagccagagagaaagaaatacaaactaccatcagagaatactacaaacacctctatgcaaataaactagaaaatctagaagaaatggataaattcctcgacacatacactctccgaagactaaaccaggaagaagttgaatctctgaatagaccaataacaggagctggaattgaggcaataatcaatagcttaccaaccaaaaagattccaggaccagatggattcacagccgaattctaccagaggtacaaggaggaactg

SEQ ID NO: 141753 - DNA, 3588 bp, Homo sapiens
atgcatgtaggaggattttataggccaggcctggaagtagtgcatactacttcttctcacatttctctggctagaacacagttacgtgaccacaaaagggaaatggatttgactgtatgctcagtaggaggaggaaatgggtttgatgagcatctagcagtctctgccatggtggcagctaggaaaacaaaaagccagttgattaggtttcagataattgccagcacacttgcgttaggaaggagatacctcaagaatgccccaacctatacaaatcagaggatgctgagaagatctgaagaaaactcagaagatagctgccactgtggatttatgaccaaagcttcaggaagtaagacaggctgcagcaagagttaccgctgctggtacccaggcaaacagggtctggagtggacctctagcaaactccaacagacctgcagctggggatcctgtctgttagaaggaaaactaacaaacagaaaggacatccacaccaaaaacccatctgtacatcaccatcatcaaagaccaaaagtagataaaaccacaaagatggggaaaaaacagagcagaaaaactggaaactctaaaaagcagagtgcctctccccctccaaagcaacgcagctcctcaccagcaatggaacaaagctggacggagaacgactttgaccagttgacaggagaaggcttcagacgatcaaactactccaagctacaggaggaaattcaaaccaaagccaaagaagttgaaaactttgaaaaaaatttagacgaatgtataactagaataaccaatacagagaagtgcttaaaggagctgatggagctgaaagccaaggctcgagaactacgtgaagaatgtagaagcctcaggagccgatgcgatcaactgcaagaaagggaatcagtgatggaagacgaaatgaatgaaatgaagcgagcagtgaagtttacaaaaaaaagaataaaaagaaatgaacaaaccctccaagaaatatgggactatgtgaaaagaccaaatctacgtctgattagtgtacctgaaagtgacagggagaatggaaccaagttggaaaacactctgcaggatattatccaggagaacttccccaatctagcaaggcaggccaacattcagattcaggaaatacagagaacgccacaaagatactcctcgagaagagcaactccaaggcacataattgtcagattcagcaaagttgaaatgaaggaaaaaatgttaagggcagccagagagaaagaaatacaaactaacatcagagaatactacaaacaccgctacgcaaataaactagaaaatctagaagaaatggataaattcctcaacatatacacccttcgaagactaaaccaggaagaagttgaatctctgaacagaccaataagaggctctgaaattgtggcaataatcaatagtttaccaaccaaaaagagtccaggaccagatggattcacagccgaatactaccagaggtataaggaggaactggtaccattccttctgaaactattccaatcaatagaaaaagagggaatcctccctaactcattttatgaggccagcatcatcctgataccaaagccgggcagagacacaaccaaaaaagagaattttagaacaatatccttgatgaacattgatgcaaaaatcctcaataaaatactggcaaaccgaatccagcagcacatcaaaaagcttatccaccatgatcaagtgggcttcatccctgggatgcaaggctggttcaatatacgcaaatcaataaatgtaatccagcatataaacagaaccaaagacaaaaaccacgtgattatctcaatagatgcagaaaaggcctttgacaaaattcaacaactcttcttgctaaaaactctcaataaattaggtattgatgggacatatctcaaaataaaaagagctatctatgacaaacccacagccaatatcatactgaatgggcaaaaactggaagcattccctttgaaaactggcacaagacagggatgccctctctcaccactcctattcaacatagtgttggaagttctggccagggcaattaggcaggagaaggaaataaagggtattcaattaggaaaagaggaagtcaaattgtccctgtttgcagatgacatgattgtatatctagaaaaccccattgtctcagcccaaaatctccttaagctgataagcaacttcagcaaagtctcaggatacaaaatcaatgtacaaaaatcacaagcattcttatacaccaataacagacaaacagaaacccaaatcatgagtgaactcccattcacaattgcttcaaagagaataaaatacctaggaatccaacttacaagggacgtgaaggacctcttcaaggagaactacaaaccactgctcaatgaaataaaagaggatacaaagaaatggaagaatattccatgctcatgggtaggaagaatcaatatcatgaaaatggccatactgcacaaggtaatttatagattcaatgccatccccatcaagctaccaatgactttcttcacagaattggaaaaaactactttaaagttcacatggaaccaaaaaagagcccgcattgccaagtcaatcctaagccaaaagaacaaagctggaggcatcatgctacctgacttcaaactatactacaaggctacagtaaccaaaacagcatggtactggtaccaaaacagagatatagatcaatggaacagaacagagccctcagaaataacgccgcatatctacaactatctgatctttgacaaacctgagaaaaacaagcaatggggaaaggattccctattcaataaatggtgctgggaaaactggctagccatatggagaaagctgaaactggatcccttctttacaccttatacaaaaattaattcaagatggattaaagacttaaacgttagacctaaaaccataaaaaccctagaagaaaacctaggcattaccattcaggacataggtatgggcaaggacttcatgtctaaaacaccaaaagcaatagcaacaaaagccaaaattgacaaattggatctaattaaactaaagagcttctgcacagcaaaagaaactaccatcagagtgaacaggcaacctacagaatgggagaaaattttcgcaacctactcatctgacaaagggctaatatccagaatctacaatgaactcaaacaaatttacaagaaaaaaacaaacaaccccatcaaaaagtgggcaaaggacatgaacagacacttctcaaaagaagacatttatgcagccaaaaaacacatgaaaaaatgctcaccatcactggctatcagagaaatgcaaatcaaaaacacaatgagataccatctcacaccacttagaatggcaatcattaaaaagtcaggaaacaacagagcctcaaggtcagccagaggtgagagcttagggccttctcaatcctttcctgagcacgtgcattgccctgggccgttgcacacagccctacacagacccatgacctttcagattcccagggatatgttggaagtttctagtgcccactag

SEQ ID NO: 141754 - DNA, 1191 bp, Homo sapiens
tcaccgggtaagaagacatccttcaggtggagagccagggtgccgttgtgccttaaatgctgctggcccgcaagccttccccattccataggttctctccacctcctgtccttcccaccaacaggaaaaggggaagctaacttcatcttcagtcctttcttccatttgatcgcatcggctcctgaggcttctgcattcttcacgtagttctggagccttggttttcagctccatcagctcctttaagcacttctctgtattggttattctagttatacattcttctaaatttttttcaaagttttgaacttctttgcctttggtttgaatgtcctcccatagctcggagtaatttgatcgtctgaagccttcttctctcagctcgtcaaagtcattctccatccagctttgttccgttgctggtgaggaactgcattcagcacagatcttatcttgctctgcaataattgagggcagtaaagggtgggatggcagggagtgatttactccttgatcttgcctgaggtgggaatcagagaagagctgacatttggcctgcatctggaaggaagagggggacttagttctctcacaccgcccaactgtgataacgagaatgttttcatattttgtcaaatgtctgctagcaggaaaaatcatccccattttgataatcattggcgttgaggaacagtttttgttgttgttgttattgttttgcgtattaatcttatattcgacaaacttgatgaacacatttaatagttcttctgagagctcaggctttctggctggaacctgagccagaccaagcttcttctgttctggaatgcaactgctgtgctccttatgatatggtttgtccgtatccccccaccaaatctcatgttgaattgcagttcccacaatccccatgtgtcgtgggagggaccctgaactgtatccatctcttgctttagaacacatttgaaatttgataaaatccaacatcccttcatgaacaaagccctcacaaaaccaatcatcaaaggaacatatccgaaaataagaagacccatctatgaaaaacctttttctgcctttctgagccaaaatggagttctcagtcattcttttacttaacctgacatcgaccatctcattaagtgtgaaaatatcagaagcacaatcaatgtttgctgaaactcccat

SEQ ID NO: 141755 - DNA, 2233 bp, Homo sapiens
atggggaaaaaacagagcagaaaaactggaaactctaaaaagcagagtgcctctcctcctccaaaggaacgcagttccacaccagcaacggaacaaagctggtcggagaatgactttgacgagttgagagaagaaggcttcagacgatcaaactactccaagctacaggaggaaattcaaaccaaaggcaaagaagttaaacactttgaaaaaaatttagacgaatgtataactagaataaccaatagagagaagtgcttaaaggagctgatggagctgaaagccaaggctcgagaactacgtgaagaatgcagaagcctcaggagccaatgcgatcaagtggaagaaaggactgctagcaagactaataaagaagaaaagagagaagaatcaaatagatgcaataaaaattgataaaggggatatcaccaccaatcccacagaaacacaaactaccatcagagaatactataagcacctctacacaaataaactagaaaatctagaagaaatggataaattcctggacacatacaccctcccaagactaaaccaggatgatgttgaatccctgaatagaccaataacaggttctgaaattgaagcaataaatcatagcctaccaaccaaaaaaagtccaggaccagacagattcacagccaaattctaccagagcctcccaagcagctgtgactacgggcatgcaccagcacacccagatgtgttcagagtttcttccttctggtgggttcgtggtcttgctggctcaggtgtgaagctgcagaccttcgcggtgagtgttacagctcttaaggcagcgcgtctggagttgttcattcctcccgactcaggtgcccagctggcttcacccagtggatccctcaccaggactggaggtggagctgcctgccagtcccatgcagtgtgcccacactcctcagcctttgggtggtcgatgggactgggtgccatggagcagggggcagcgctcatcggggaggctcgggcctcacgggagcccatggaggaggtgggaggctcaggcatggcagcctgcaggtcccaagccctgccccgtgggcagctaaggcccagtgagaaatcgagggcagcgccggaacacagttcctcaccagcaatggaacaaagctggatggagaatgactttgacgagctgagagaagaaggcttcagacgatcaaattattccgagttacgggaggacattcaaaccaaaggcaaagaagttgaaaactttgaaaaaaatttagaagaatgtataactagaataaccaatacagagaagtgcttaaaggagctgatggagctgaaaaccaaggctcgagaactacgtgaagaatgcagaagcctcaggagccgatgcgatcaactggaagaaagggtatcagcaatggaagatgaaatgaatgaaatgaagcaagaagggaagtttagagaaaaaagaataaaaagaaatgagcaaagcctccaagaaatatgggactatgtgaaaagaccaaatctacatctgattggtgtacctgaaagtgacggggagaatggaaccaagttggaaaacactctgcaggatattatccaggagaacttccccaatctagcaaggcaggccaacattcagattcaggaaatacagagaacaccacaaacatactcctcgagaagagcaactccaagacacataattgtcagattcaccaaagttgaaatgaaggaaaaaatgttaagggcagccagagagaaaggtgattctgtagaaaggagtttctccaataaagcagagcttctctttcaactccatggacatcagagagagtccctttcaaaaaaggaggctcaggtctggagagacaaaggcctctactttcgaaaaggcctcttggatcaagcccagagctggtctcggcaagtggcgtccatcttgggggctcagatccaggtcgaagggtcaccggagcagcggttggagaacgtggaactagctggaggacacctgaatactcttaaagcaatccccatggtggcagttgcaggtggaatatcttttaaatgtggggctgtcctgctattgggggcagcagagttgctgccagtggtttgtacttcagctccagtggcagcagccagcagtggtgatgactgtgggcagggaacgtcattggggctccagggatgtagagatgcagggagcgttgagcccgagggcaggatgtag

SEQ ID NO: 141756 - DNA, 1596 bp, Homo sapiens
atggtcctgcctctgaaactgctctttgcccaggggctgtcatctctactgtactgccaggactgccagcgctgccatgggaatgcacatgtttatgcccgggtgctcttgatgttctcagagctgcgggcactgcccttaccagaggactgcgggtacaaagaagtgcacaagagcccccaccccatcgccactactaccaatacagccagtccctcgcggtgtggcgtacaccaccctggctgcttcctgctgctgcccctgccttgtccactccccctgcgcggagagccccgggctccctcgccccgagagcgcggctcagcggggagcccagggggcctaggggctcagatctgctggagccaccgacgccaaggggaacacaaatcctcaccagcaacggaacaaagctggacggaaaatgactttgatgagttgagagaagaaggcttcagacgatcaaactactccgagctacaggaggaaattcaaaccaaaggcaaagcagttaaaaactttgaaaaaagtttagacgaatgtataactagaataaccaatacagagaagtgcttaaaggagctgatggagctgaaagccaaggctcgagaactacgtgaagaatgcagaagcctcaggagccaatgcgatcaactggaagaaagggtatcagtgatggaagatgaaatgaatgaaatgaagcaagaagggaagtttagagaaaaaagattaaaaagaaacgaacaaagcctccaagaaatatgggactatgtgaaaagaccaaatctacgtctgattggtgtacctgaaagtgacggggagaatgggaccaagttggaaaacactctgcaagatattatccaggagaactttcccaatctagcaaggcaggccaccgttcacattcgggaaatacagagaacgccacaaagattctccttaagaagaagcactccaagacacatcgtgagattctccaaggttgaaacaaaggaaaaaatgttaagggcagccagagagaaagaaatacaaactaccatcagagaatactacaaacacctttacacaactaaactagaaaatctagaagaaatggaaaaattcctggacacatacaccctcccaagactaaaccagaaagaagttgaatccatgaaaagaccaataacaagttctgaaattgaggcagtcattaatatcctaccaatcaaaagaagtccaggacctgatggattgacagccacattctatcagaggtacaaagaggaactggaacgcagttcctcaccagcaacggaacaaagctggatggagaatgattttgacgagctgagagaagaaggcttcagacgatcaaattactctgagctacgggaggacattcaaaccaaagtcaaagaagttgaaaactttgaaaaaaatttagaagaatgtataactagaataaccaatacagagaagtgcttaaaggagctgatggagctgaaaaccaaggctcgagaactacgtgaagaatgcagaagcctcaggagccgatgcgatcaactggaagaaagggtatcagcaatggaagatgaaatgaatgaaatgaagtga

SEQ ID NO: 141757 - DNA, 1806 bp, Homo sapiens
atggagggagattctgtggagaatagatcaattgtgagactttgctttgaacctattcatacctcattacagcagaaagcaaaatcagacaaaattcagatatatggaggttttacaaaatctaacccaactattgaatcttatgtggagagacgttatgctacttctaagctaaatcctaactgttgcagagaaacaggcacctctacagatagcagagatattcagagacacacaacagacctcctacaggcagtcaaagagaaacccagtcaaaaagggaaggaggaaggaaaactaacaaacagaaaggacacccacaccaaaaacccatctgtacatcaccatcatcaaagatcgaaagtagataaaaccacaaagatagggaaaaaacagagcagaaaaactggaaactctaaaaagcagagctcctctcctcctccaaaggaatgcagctcctcaccagcaacggaacaaagatggatggagaatgactttgacgagctgagagaagaaggcttcagacgatcaaactactctgagctacaggaggaaattcaaaccaaaggcaaagaagttgaaaactttgaaaaaaatttagaagaatgtataactagaataaccaatacagagaagtgcttaaaggagctgatggagcttaaagccaaggctcaagaacttcttgaagaatgcagaagcctcaggagccaatgtgatcaactggaagaaaggcaccacaccacacctattccaaaattgaccacatacttggaagtaaagctctccccagcaaatgtaaaagaacaagttataacaaactgtctctcagaccacagtgcaatcaaactagaactcaggattaagaaacccactcaaaacccctcaactacatggaaactgaacaacctgctcctgaatgactactgggtaaataaagaaatgaagtcagaaataaagatgttctttgaaaccaacgagaacaaaaacacaacataccagaatctctgggacgcattcaaagcagtgtgtagaggcaaatttatagcactaaatgcccacaagggaaagcaggaaagatccaaaattgacaccctaacatcacaattaagagaactagaaaagcaagagcaaacacattcaaaagttagcagaaggcaagaaataactaaaatcagagcagaaccgaaggaaatagagacacaaaaaacccttcaaaaaattaatgaatccaggagctggttttttgaaaggatcaacaaaattgatagacggctagcaagactaataaagaagaaaagagagaagaatcagagagacgcaataaaaaatgatgaaggggatatcaccaccgatcccacagaaatacaaactaccatcagagaatactacaaacacctctatgcaaataaactagaaaatctaaaagaaatggataaattcctcaacacatacaccctcccaagactaaaccaggaagaagctgaatctctgaatagaccaatagcaggctctgaaattgtggcaataattaatagcttaccaaccaaaaagagtccaggaccagatggattcacagccgaattctaccagaggtacaaggagaaactggtatttggtgcaggttattttggaatgtgggccttggctgcacttcccagcaacttgctaaagctgtctcaactctgtcaggaggcagcagaagtgaacgtcctggtacaatttgtctgtatttgtcctgcacaggaacctaccgaaattgacgtgcttttttctgtgttaccccctctttcccttatcttaaactag

SEQ ID NO: 141758 - DNA, 2110 bp, Homo sapiens
atgcttgttgatcttgtcactggggcctgcatgtcagggaaacatcctcagagcatgtctgagggcagagctctgacggtaatcagagcaggcagatgtcaccgacagctggagctaatgggctgtcagacagggccggaccaacctgggacatcctccgtgctccctggcacgagtccagtccagaccgagggcactcaagcatgggacgccaggggaacggctttgatgcctactggaaaagccaaacttggttgctttggcaacaggggtcttggtgagaagctggtacacaagcaggtgcttccagtgtgccagagaaaggcacagggccttcttcgccccgagtcttcttacttctctgatggagctgagtcatgcatcacctcttgtttaatggtggtgaaatatactcaggaatgcagttcctcaccagcaacagaacaaagcttgacggagaatgactttgacgagttgagagaagaaggcttcagacgatcaaactactccgagctacaggaggaaattcaaagcaaaggcaaaaaagttaaacactttgaaaaaaatttagacgaatgtataactagaatcaccaatagagagaagtgcttaaaggagctgatggagctgaaagccaaggctcgagaactacgtgaagaatgcagaagcctcaggagccaatgcgatcgactggaagaaagggtatcagtgatggaagatgaaatgaatgaaatgaagcgagaagggaagtttagagaaaaaggaataaaaagaaacgaacaaagcctccaagaaatatgggactatgtgaaaagaccaaatctacatctgattggtgtacctgaaagtgacagggagaatggaactaagttggaaaacactctgcaggatattatccaggagaacttccccaatctagcaaggcaggccaacattcagattcaggaaatacagagaatgccacaaagatactcctcgagaagagcaactccaagacacataattgttagatacaccaaagttgaaatgaaggaaaaaatgttaagggcagccagagagaaaggtcgagttacccacaaagggaagcccatcagactaacagctgatctcttggcagaaactctacaagccagaagagagtgggggccaatattcaacattcttaaagaaaagaattttcaacccagaatttcatatccagacaaactacgcttcataagtgaaggagaaataaaatactttacagacaagcaaatgctgagagattttgtcaccaccaggcctgccctaatagaagctctgaaggaagtgctaaacatggaaaggaacaaccgatcccccagttcctcaccagcaacggaacaaagctggatggagaatgattttgacgagctgagagaagaaggcttcagacgatcaaattactctgagctacgggaggacattcaaaccaaaggcaaagaagttgaaaactttgaaaaaaatttagaagaatgtataactagaataaccaatacagagaagtgcttaaaggagctgatggagctgaaaaccaaggctcgagaactacgtgaggaatgcagaagcctcaggagccgatgcgatcaactggaagaaagggtatcagcaatggaagatgaaatgaatgaaatgaagcgagaagggaagtttagagaaaaaaacaataaaaagaaatgagcaaagcctccaagaaatatgggactatgtgaaaagaccaaatctacgtctgattggtgtacctgaaagtgatgtggagaatggaaccatgttggaaaacactctgcaggatattatccaggagaacttccccaatctagcaaggcaggccaacgttcagattcaggaaatacagagaacgccacatagattctcctcgagaagagcaactccaagacacataatttctcatccagatctcatcaaacatgaaccattgttttcttcaccaagtgtccaaagggtcagtatcaatggtcaagggtccactctaaatgccctggccctgcagccacccttaagaacttttgttaacatttccactggagtatttgggaatattcgccaagagttacaaagaaaacatggctag

SEQ ID NO: 141759 - DNA, 6896 bp, Homo sapiens
tggggaatgggggtcacttcaaatattaaggttatattttgcacgtaaaaatgattttataaatatcaaaggtttttcatgtttcctacctaattgggttctccccataatcttgtaatttgaagtggggcagaagtgtttaacccctttggcagatgcagaaaacggaggcacagagagggcgtgacttgtctgaggtcacacgtgaatcagtcatggagatgggaccagaacccaggcttcccagctccaagtccagggctttttctgcatctgatgttttcaggggtgagacagggaccatcagggcacaaacaggggctctgggtgggcagggcagagacgagtacagtcctgttgagcagcaacaagtgtgggctcagctgctgcagccacgggtgcaggtgtggcaaagaaaaaatttccatgttaaagacattctcttcatactgaaaaggaacggcaacattttgatcttcaaggacagagacttaagaccaggaaaatgggcctggggccaagatggccgaaaaggaacagctccggtctacagctcccagtgtgagcgacgcagaagatgggtgatttctgcatttccatctgaggaatgcagctcctcaccagcaacggaacaaagctggagggagaatgactttgacgagttgagagaagaaggcttcagacgatcaagctactgcgagctacaggaggaaattcaaactgaaggcaaagaagttgaaaactttgaaaaaaattcagacgaatgtataactagaataaccaatagagagaagtgcttaaaggagctgatggagctgaaagccaaggctcgagaactacatgaagaatgcagaagcctcaggagccgatgcgatcaactggaagaaagggaagaagttgaatctctgaatagaccaataacaggctctgaaattgtggcaataatcaatagcttaccaaccaaaaagagtccaggaccagatggattcacagccgaattctaccagaggtacaagggggaactggtaccattccttctgaaactattccaatcaatagaaaaagagggaatcctccctaactcattttatgagggcagcatcatcctgataccaaagctgggcagagacacaaccaaaaaagagaattttagaccaatatccttgatgaacattgatgcaaaaatcctcaataaaatactggcaaaccgaatccagcagcacatcaaaaagcttatccaccatgatcaagtgggcttcatccctgggattcaaggctggttcaatatacacaaatcaataaatgtaatccagcatataaagagaaccaaagacaaaaaccgcatgattatctcaatagatgcagaaaaggcctttgacaaaatccaacaacgcttcatgctaaaaactctcaataaattaggtattgatgggacatatctcaaaataataagagctgtctatgacaaacccacagccaatatcatactgaatgggcaaaaactggaagcattccctttgaaaactggcacaagacagggatgccctctctcaccactcctattcaacatagtgttggaagttctggccagggcaattaggcaggagaaggaaataaagtgtattcaattaggaaaagaggaagtcaaattgtccctgtttgcagatgacatgattgtatatctagaaaaccccactgtctcagcccaaaatctccttaagctggaaagcaacttcaggaaagtctcaggatacaaaatcaatgtacaaaaatcacaagcattcttaaacaccaataacagacaaacagagagccaaatcatgagtgaactcccattcacaattgcttcaaagagaataaaatacctaggaatccaacttacaagggacgtgaaggacctcttcaaggagaactacaaaccactgctcaaggaaataaaagaggatataaacaaatggaagaacattccatgctcatgggtaggaataatcaatatcgtgaaaatggccatattgcccaaggtaatttatagatacaatgccatccccatcaagctaccaatgactttcttcacagaattggaaaaaactactttaaagttcatatggaaccaaaaaagagcctacatcaccaagtcaatcctaagccaaaaggacaaagctggaggcatcacgctacctgacttcaaactacactacaaggctacacagggtactccaacagacctgcagctgagggtcctctctgttagaaggaaaactaacaaacagaaaagacatccacaccaaaaacccatctgtacatcaccatcatcaaagacccaaaagtggatcaaaaccacaaagatggggaaaaaaaacagagcgggaaaatctggaaactctaaacagcagagcgcctctcctcctccaaaggaaagcagctcctcatcagcaacggaaccaaagcttggagggagaatgactttgatgatttgagagaagaagtcttcagacgatcaaactactctgagcttacaggaggaaattcaaaccaaaggcccaagaagttgaaaacctttgaaaaaaaatttagaccgaatgtataactagaataaccaataccagagaagtgcttaaaggagctgatggagctgaaaaccaaggctcgagaactacgtgaagaatgcaaaagcctcaggattgcattccagttcatgcgatcaactggaagaaagggtatcagagatgaaaagatgaaacgaaagaaaatgaatgaaatgaagcgagaagcgaaggaaacccatctcacgtgcagagacacacataggctcaaaataaaaggatggaggaagatctaccaagcaaatgggaaacaaaaaaaggcagggggtgcaatcctagtctctgataaaacagacattaaaccaacaaagatcaaaagagacaaagaaggccattacataatggtaaagggatcaattcaacaagaagagctaactatcctaaatacatatgcacccaatacaggagcacccagattcataaagcaagtcctgagtgacctacaaagagacttagactcccacacaataataatgggagactttaacaccccactgtcaacattagacagatcaacgagacagaaagtcaacaaggatacccaggaattgaactcagctctgcaccaagcagacctaatagacatctacagaactctccaccccaaatcaacagaatatacatttttttcagcaccgcaccacacctgttccaaaattgaccacatacttggaagtaaagctctcctcagcaaatgtaaaagaacagaaattataacaaactgtctctcagaccacagtgcaatcaaactagaactcaggattaagaatctcactcaaaaccgctcaactacatggaaactgaacaacctgctcctgaatgactactgggtacataacgaaatgaaggcagaaataaagatgttctttgaaaccaacgagaacaaagacacaacataccagaatctctgggacacattcaaagcagtgtgtagagggaaatttatagcactaaatgcccacaagagaaagcaggaaagatccaaaattgacaccctagcatcacaattaaaagaactagaaaagcaagagcaaacacattcaaaagctagcaggaggcaagaaataactaaaatcagagcagaactgaaggaaatagagacacaaaaaacccttcaaaaaatcaatgaatccaggagctggttttttgaaaggatcaacaaaattgatagaccgctagcaagactaataaagaaaaaaagagagaagaatcaaatagacacgataaaaaatgataaaggggatatcaccactgatcccacagaaatacaaactagcatcagagaatactacaaacacctctacgcaaataaactagaaaatctagaagaaatggataaattcctcgacacatacaccctcccaagactaaaccaggaagaagttgaatctctgaatagaccaataacaggagctgaagttgtggcaataatcaatagtttaccaaccaaaaagagtccaggaccagagaattttagaccaatatccttgatgaacattgatgcaaaaatcctcaataaaatactgggagccaaagacaaaaaccacatgattatctcaatagatgcagaaaaagcctttgacaaaattcaacaacccttcatgctaaaaactctcaataaattaggtattgatgggacgtatttcaaaataataagagctatctatgaccaacccacagccaatatcatactgaatgggcaaaaactggaagcattccctttgaaaactggcacaagacagggatgccctctctcaccactcctattcaacatagtgttggaagttctggccagggcaattaggcaggagaaggaaataaagagtattcaattaggaaaagaggaagcgaaattgtccctgtttgcagacaaaatgattgtatatctagaaaaccccattgtctcagcccaaaatctccttaagctgataagcaacttcagcaaagtctcaggatacaaaatcaatgtacaaaaatcacaagcattcttatacaccaacaacagacaaacagagagccaaatcatgagtgaactcccattcacaattgcttcaaagagaataaaatacctaggaatccaacttacaagggatgtgaaggacctcttcaagcagaactacaaaccactgctcaaggaaataaaagaggatacaaacaaatggaagaatattccatgctcatgggtaggaagaatcaatatcgtgaaaatggccatactgcccaaggtaatttacagattcaatgccatccccatcaagctaccaatgcctttcttcacagaattggaaaaaactactttaaagttcatatggaaccaaaaaagagcccgcatcgccaagtcaatcctaagccaaaagaacaaagctggaggcatcacactacctgacttcaaactatactacaaggctacagtaaccaaaacagcatggtactggtaccaaaacagagatatagatcaatggaacagaacagagccctcagaaataatgccgcatatctacagctatctgatctttgacaaacctgagaaaaacaagcaatggggaaaggattccctatttaataaatggtgctgggaaaactggctagccatatgtagaaagctgaaactggatcccttccttacaccttatacaaaaatcaattcaagatggattaaagacttaaacgttagacctaaaaccataaaaaccctagaagaaaacctaggcatcaccattcaggacctaggcatgggcaaggacttcatgtccaaaacaccaaaagcaatggcaacaaaagacacaattgacaaatgggatctaattaaactaaagagcttctgcacagcaaaagaaactaccatcagaatgaacaggcaacctacaaaatgggagaaaattttcacaagctactcatctgacaaagggctaatatccagaatctacaatgaactcaaacaaatttacaagaaaaaaacaaacaaccccatcaaaaaatgtcaacaggcctcacagctgaaggctttacccacccaatcctgctccccctcttctaacagctatgaaaccttcctagtttcaccccttcacccgttccagttttacataagttttcctcactacacagagatggttcctcccttgacacctgaggattacaattcgagaggagattttggtggggacacagagacaaaccatattatttcaaagttccacaggtctctagagcaggtgcaaaatgctgccagtcggaggagccaagatggccgaataggaacagctcctgtctacagctccggtctacagctcccagcgtgagcgacgcagaagacgggtgatttctgcatttccatctgaggaacgcagttcctcaccagcaatggaacaaagctggatggagaatgactttgaggagctgagagaagaaggcttcagacgatcaaattactctgagctacgggaggacattcaaaccaaaggcaaagaagttgaaaactttgaacaaaatttagaagaatgtataactagaataaccaatacagagaagtgcttaaaggagctgatggagctgaaaaccaaggctcgagaactacgtgaagaatgcagaagcctcaggagccgatgtgatcaactggaagaaaggatatcagtgatggaagatgaaatgaatgaaatgaagcgagaagggaagtttagagaaaaaagaataaaaagaaatgagcaaagcctccaagaaatatgggactatgtgaaaagaccaaatctacgtctgattggtgtacctgaaagtgatggggagaatggaaccaagttggaaaacactctgcagcatattatccaggagaacttccccaatctagcaaggcaggccaacgttcagattcaggaaattcagagaacgccacaaagatactcctcgagaatagcaattccaagacacataattgtcagattcaccaaagttgaaatgaaggaaaaaatgttaagggcagccagagagaaaggtcgggttaccctcaaagggaagcccatcagactaacagcagatctctcggcagaaaccctacaagccagaagagagtgggggccaatattcaacattcttaaagaaaataattttcaacccagaatttcatatccagccaaactaagcttcataagtgaagaagaaataaaataccttacagacaagcaaatggtgagagattttgtcaccaccaggcctgccctaaaagagctcctgaaggaagcactaaacatggaaaggaacaaccggtaccagctgctgcaaaatcatgccaaattctaa

SEQ ID NO: 141760 - DNA, 678 bp, Homo sapiens; identical to SEQ ID NO: 125688

SEQ ID NO: 141761 - DNA, 1357 bp, Homo sapiens; identical to SEQ ID NO: 141725

SEQ ID NO: 141762 - DNA, 1035 bp, Homo sapiens; identical to SEQ ID NO: 123566

SEQ ID NO: 141763 - DNA, 1040 bp, Homo sapiens
aaatggcgaataaccccggtgccaacgggcaggcccgggggccctggtggcccggggatgggaaaaccccgttgctttccggcgaggttttcggcattgtcatccggggccggggttcccgcccggtggacggggccggggccgagagccgcggagctcgcgggagcaaaggccgaggataaagggagtggaatgccgttcaccaagttggggccgctttggtcaaggaccattaaagatcaaagttcccctggaaggagatctatctcttctccctgccccattaaaggaatcagaggatcattgattttctttctggggggcctcctctcaaaggatgaaggttttgaatgattatgcccagtgcagaagcagacccgtgcccggccagccgcacccaggcttcaaggccatttgttgctatcggggactacaaatggccacgtcggtctgggttgttaagtgctccaaggaaggtggccaccggccatcccgtgggggcaatcatccctggccaagctttccattcgtccccggtgcgcagaagggtatttggggaacaaagtattggcaaagccccaacactgtccctttgcaaggtgacaagggccgttgcggcttctgtgctggtacgccttcatcccttgcaccccaggggcaactggcattcgtctccgcacctgtggcttaaaaagctgctcatgatggcttggtatcgatgactgctacaccctcagccccggggctgcactgccacccttgggcaaatttggccaagggccaccctttgatgccatttctaagacctacaagctaccttgaccccccgacctctggaaggagactgtattcaccaaagtttccctatcaaggagttcacttgaccacctcgtcaaagacccacacccagagtcttccgtgcagcaggactcagagctccagcttgtggctacaacatagggtttttatacaagaaaaataaagtgaattaagcgtgtaaaaaaaaaaacacagggcggccgctctagagtatccctcaa

SEQ ID NO: 141764 - DNA, 1737 bp, Homo sapiens
atgtgcacaaccctcggttggaatacaccgcgtcctcttttacggccagcacgtaaccgctgctgtcgaccgcgtcacacgtgggacgacaccggcgaactcatcggcatcagcagccgccgccagaccgggagtcacagctacagcaccaccgccaggctgaccggcgttcacaccaccgcagcgaatctgaatatccgcatcccgtatgccacagacccggcaggtaaccgcctgcccgacccggagctgcacccggacagcaccctcagcatgtggccggataaccgtatcgcccgtgacgcgcactatctttaccggtatgaccgtcacggcaggctgacagagaaaaccgacctcatcccggaaggggttatccgcacggatgatgagcggactcaccggtaccattacgacagtcagcaccggctggtgcactacacgcggacacaatatgaagagccgctggtcgaaagtcgctatctttacgacccgctgggccgcagggtggcaaaacgggtgtggcggcgtgaacgggacctgacgggctggatgtcgctgtcacggaaaccgcaagtgacctggtacggctgggacggcgaccggctgaccacaatacagaacgacagaacccgcatccagacgatttatcagccggggagcttcacgccactcatcagagttgaaaccgccaccggtgagctggcgaaaacgcagcgccgcagcctggcggatgcgcttcagcagtccggcggcgaagacggtggcagtgtggtgttcccgccggtgctggtgcagatgctcgaccggctggaaagtgaaatcctggctgaccgggtgacgccccgcggcctctggagccccttcagtgaccaagatacagagatcaggacgcctttgcgccgcacaccaggtgcacagcccatagctggctctgcttggaccgcgagggaaggtgaggtcgggggcggagccggggcgtgacagccggggtgtgtgtccgccgggcttggtgcctccggtggccctgcagcaccgtcccacctctgccaccctccgatggggccgctacctgtgtgcctgccaatcatgctgctcctgctactgccgtcgctgctgctgctgctgcttctacctggccccgggtccggcgaggcctccaggatattacgtgtgcaccggcgtgggatcctggaaactggcaggaactgggggttgtgttggtccccgaacccccatcgcctatatgaaatatggttgcttttgtggcttgggaggccatggccagccccgcgatgccattgactggtgctgccatggccacgactgttgttacactcgagctgaggaggccggctgcagccccaagacagagcgctactcctggcagtgcgtcaatcagagcgtcctgtgcggaccggcagagaacaaatgccaagaactgttgtgcaagtgtgaccaggagattgctaactgcttagcccaaactgagtacaacttaaagtacctcttctacccccagttcctatgtgagccggactcgcccaagtgtgactgactaccttgacttgaaatgctcttttgcacaaggaaataaagcgtcctctcagtaatgaacaacagcattcagttatttgcagaagggaaccgaagccaagtgataaagccacaaccttgtgtttgctttccctcccaatcccagaactcaggactggagcccatgtggtttgcaggaat

SEQ ID NO: 141765 - DNA, 4090 bp, Homo sapiens
atgggtcccgcgggggtcgcggcgaggccagggcgctttttcggcgtctacctgctctactgcctgaacccccggtaccggggccgcgtctacgtggggttcactgtcaacactgctcgtcgggtccagcagcacaatgggggccgcaaaaaaggcggggcctggcggaccagcgggcgagggccctgggagatggtgctcgtcgtgcacggcttcccgtcctccgtggccgcccttcggtttgagtgggcttggcagcacccgcacgcctcgcgccgcctggcgcacgtggggcctcgcctgcgaggagagacagccttcgctttccacctgcgcgtgctggcgcacatgctgcgcgcaccgccctgggctcgcctcccgctcacgctgcgctgggtgcgcccagacctccgccaggacctctgcctcccgccgccgccgcacgtgcctctggccttcgggcctccaccgccccaggccccggccccaaggcgccgcgcaggtccctttgatgacgcggagcctgagccagaccagggggatccaggggcctgctgctccctgtgcgcccagaccatccaggatgaagaggggcccttgtgttgcccccaccctggctgcctgctaagggcccatgtgatctgcctggcagaggagtttcttcaggaagaaccagggcagcttctgcccctagagggccaatgcccttgctgtgagaagtcactgctttggggagacctgatctggctgtgccagatggacactgagaaagaagtagaagactcagaattagaagagggcagagagcagccctacactccctacaccacacccatactcagcccctgcaggcaaggagagaacaggtcaggttcccgagagctcaggaacatggagctgatccaggacacctcccgcccgccactggagtacgtgaagggggtcccgctcatcaagtactttgcagaggcactggggcccctgcagagcttccaggcccgacctgatgacctgctcatcaacacctaccccaagtctggcaccacctgggtgagccagatactggacatgatctaccagggcggcgacctagagaagtgtaaccgggctcccatctacgtacgggtgcccttccttgaggtcaatgatccaggggaaccctcagggctggagactctgaaagacacaccgcccccacggctcatcaagtcacacctgcccctggctctgctccctcagactctgttggatcagaaggtcaaggtggtctatgttgcccgaaacccaaaggacgtggcggtctcctactaccatttccaccgtatggaaaaggcgcaccctgagcctgggacctgggacagcttcctggaaaagttcatggctggagaagtgtcctacgggtcctggtaccagcacgtgcaggagtggtgggagctgagccgcacccaccctgttctctacctcttctatgaagacatgaaggagaaccccaaaagggagattcaaaagatcctggagtttgtggggcgctccctgccagaggagaccatggacttcatggttcagcacacgtcgttcaaggagacgaagaagaaccctatgaccaactacaccaccgtcccccaggagctcatggaccacagcatctcccccttcatgaggaaaggcatggctggggactggaagaccaccttcaccgtggcgcagaatgagcgcttcgatgcggactatgcggagaagatggcaggctgcagcctcagcttccgctctgagctagagatcttggtagaggagagcaacgtgcagagggtggactcgccagtcacagtgtgcggcgacatccatggacaattctatgacctcaaagagctgttcagagtaggtggcgacgtccctgagaccaactacctcttcatgggggactttgtggaccgtggcttctatagcgtcgaaacgttcctcctgctgctggcacttaaggttcgctatcctgatcgcatcacactgatccggggcaaccatgagagtcgccagatcacgcaggtctatggcttctacgatgagtgcctgcgcaagtacggctcggtgactgtgtggcgctactgcactgagatctttgactacctcagcctgtcagccatcatcgatggcaagatcttctgcgtgcacgggggcctctccccctccatccagaccctggatcagattcggacaatcgaccgaaagcaagaggtgcctcatgatgggcccatgtgtgacctcctctggtctgacccagaagacaccacaggctggggcgtgagcccccgaggagccggctacctatttggcagtgacgtggtggcccagttcaacgcagccaatgacattgacatgatctgccgtgcccaccaactggtgatggaaggttacaagtggcacttcaatgagacggtgctcactgtgtggtcggcacccaactactgctaccgctgtgggaatgtggcagccatcttggagctggacgagcatctccagaaagatttcatcatctttgaggctgctccccaagagacacggggcatcccctccaagaagcccactggacgtgtggacaagaatgcgcccacggtctgtggccacacagcccctgtgctagacatcgcctggtgcccgcacaatgacaacgtcattgccagtggctccgaggactgcacagtcatggtgtgggagatcccagatgggggcctgatgctgcccctgcgggagcccgtcgtcaccctggagggccacaccaagcgtgtgggcattgtggcctggcacaccacagcccagaacgtgctgctcagtgcaggttgtgacaacgtgatcatggtgtgggacgtgggcactggggcggccatgctgacactgggcccagaggtgcacccagacacgatctacagtgtggactggagccgagatggaggcctcatttgtacctcctgccgtgacaagcgcgtgcgcatcatcgagccccgcaaaggcactgtcgtagctgagaaggaccgtccccacgaggggacccggcccgtgcgtgcagtgttcgtgtcggaggggaagatcctgaccacgggcttcagccgcatgagtgagcggcaggtggcgctgtgggacacaaagcacctggaggagccgctgtccctgcaggagctggacaccagcagcggtgtcctgctgcccttctttgaccctgacaccaacatcgtctacctctgtggcaaggtggcctcgtcgggcgggggtgacagctcaatccggtactttgagatcacttccgaggcccctttcctgcactatctctccatgttcagttccaaggagtcccagcggggcatgggctacatgcccaaacgtggcctggaggtgaacaagtgtgagatcgccaggttctacaagctgcacgagcggaggtgtgagcccattgccatgacagtgcctcgaaagtcggacctgttccaggaggacctgtacccacccaccgcagggcccgaccctgccctcacggctgaggagtggctggggggtcgggatgctgggcccctcctcatctccctcaaggatggctacgtacccccaaagagccgggagctgagggtcaaccggggcctggacaccgggcgcaggagggcagcaccagaggccagtggcactcccagctcggatgccgtgtctcggctggaggaggagatgcggaagctccaggccacggtgcaggagctccagaagcgcttggacaggctggaggagacagtccaggccaagtgctgccatggccacgactgttgttacactcgagctgaggaggccggctgcagccccaagacagagcgctactcctggcagtgcgtcaatcagagcgtcctgtgcggttaccatgccagcaatgattccttttgagtttctgacagaagatagtggttttcatccaaataagtcaactactctaccccatccctaagccacttgtatggaaagaaaaagaggaagaagccagtactgtgactgcgtaagcttcccccagcatcacccgctatgagatgtgtggcagctgagaccctggaactgctcg

SEQ ID NO: 141766 - DNA, 723 bp, Homo sapiens
tcacatgcacatcaagtttaaatgggtgccccgatcagctacccatagggcttgtgcctgctgaatagcctgtttggctgccaggaaggtggtttcagccgcatcatcccaattccaggcaagaggctgcgttgctgcttctaaatagtggcaccatcccagttctgttgtcaagtggcctatcaaatccatgatagacggcacagctgccaagccgtgcaaaacatccacccacagcctgtcctcaggcatgggagagacatccacagtgcataagcagggagctaagcggccgatgccgaggtccaaagatacaggtttcactttcactgaccagctttcataaccgtcaataaatgcagctctgcccggaaacttattcaggtttagggaccagtggcttgccgagtccacatattgcctttggttgtccggtgtccccccaagcccggcaccactgggtgagcctgtaacggaggttcgtcctcctccctgcactgcgtccagcagggactgggcatgcccttccagcagcacagtcacaaatgcccatctgactctgttggcaaaggcacactccttctcggtcctgtgcatttccaggtgcttcagcaccttctccacactcgtggagggcctgtccactgccgcccatgtttccaccagagcccatccttgcagcacggctgccactgggtgccacagctcatgctgtggctgcat

SEQ ID NO: 141767 - DNA, 990 bp, Homo sapiens
acatgggcggcagtggacaggccctccacgagtgtggagaaggtgctgaagcacctggaaatgcacaggaccgagaaggagtgtgcctttgccaacagagtcagatgggcatttgtgactgtgctgctggaagggcatgcccagtccctgctggacgcagtgcagggaggaggacgaacctccattacaggctcacccagtggtctgccagaaaatagagcatgaacagccactgggccccaagggtgggcctagagaccccctaccataaacctgaataagtttccgggcagagctgcatttattgacggttatgaaagctggtcagtgaaagtgaaacctgtatctttggacctcggcatcggccgcttagctccctgcttatgcactgtggatgtctctcccatgcctgaggacaggctgtgggtggatgttttgcacggcttggcagctgtgccgtctatcatggatttgataggccacttgacaacagaactgggatggtgccactgtgtggtggacttggccaatgcattcctcttaatcgacattgctccagagagccaggaacactttgcagccaaacaggctattcagcaggcacaagccctatgggtagctgatcggggcacccatttaaacttgatgtgcatgtgaccagatagttttgactggggcttagaacctgacacttggcatgacagtggtaagtaccatatacatgttggctaatagtataattcactggtctttctttttttaaataagagtaaaattaataatggtggttacctacgagaggtgaacggtcagaaactgagtgaaaacggggacaagagtgagaaggaaagtgttagggtgcatgttttaaatgtacttttaattttagagttgattgcattgcaggtctgtgccttggagtaggcggggagggaacgtctgcgcaggcgtgacccccgcccctacacattcactggcctgaagcccccg

SEQ ID NO: 141768 - DNA, 858 bp, Homo sapiens
atggggatattagtagatgacaaggagaaggaggggtggctgatgacaaagctgctggtatgcatgtcaaaggagctgggagttggaaggaagatggaggcaagagtcaagcaggtcacaaggaatgtgagatatactgtgagtgtgagaagaaagtctgcatccaagagaaacagggtgaaattggtgtccacaggagaaaggcctcgttctgatgaggccttagggaagagccttgggaaggactatacttctgacacactggcgaagcctcaggaacgcattgggaatattgccaaggccggcagccaggcaagagggaagaccagctcacagtgtggagctggagtgtttttctttttcctgatgcagacttgcctctcagttagtgcttccctctctcatagatcctatcctcccatgcccccacctttccacccccacccacaccctacatttctctactcagaacctcctcagaaagcaatagaagaactgcttaaggaggcaaaacgtgggaaaactagagctgaaacaatgggacccatgggttgccagaaagagcaaaaatggtcactgatcatcccagagcatataccacatctggtccctttccaaccaacccctcttacacaccatgaaaagatctggatgacaagccctagccttgagctatcagtgggttcatccagctcctgcagcgttcatccaactcctgcagagcaggacactggaactgccttcaatgggaccatcttgtttctgaaggagcttgaggaccaccagtggagggctggggatacacagattagcttacccatctgccattcactcaacaaacacattaaactcctctga

SEQ ID NO: 141769 - DNA, 454 bp, Homo sapiens
cacgaggttatgggacagagcccccgatccgccagcaccacctgaggatccagaaaccgccccagcgatggatagaggatcatgagctggagaggaaagcaatagaagaactgcttaaggaggcaaaacgtgggaaaactagagctgaaacaatgggacccatgggttggatgaagtgtcctcttgctagcaccaataaaagatttctaattaacacaattaaaaacacattgccctctcataaagagcaagaccatgaacaaaaagagggcgataaggaaccagcccaagagccaggcccagaaagaagaaaacccgaagaaacacagaagccatccttacaagcacagcttccgcgctcgaggttccgccagttactccccgccacgaaagcggagcagccaggacaagtacgaaaagcggtccaaccggcggtgaggctggaaccagggct

SEQ ID NO: 141770 - DNA, 769 bp, Homo sapiens
tttcgtgttgatgggtgacccggggagaggtatccggccagaggcgagtcctgcggagtggtagcgcgcacggcctgcggtgtgacacccagcccctgccagtcccccatggccccgtggagccgagaggcggtgctgagtctctatcgggctctgttgcgccagggccgacagcttcgctacactgatcgagacttctactttgcctccatccgccgtgaattccgaaaaaatcagaagctagaggacgctgaggcccgggagaggcagctggagaagggcctggtctttctcaacggcaaattggggaggatcatttaggatcctccaagggaaagaggacaaaggtgccttctgtagacactcctgctctcttccatccccatcttacagatgtattaagaagcctcagatgagcaatggcaggcgctggtgagcgcataggcaagaaggatgacaatggcattggcacggccattgactttgtgctctccaatgccccgactagtgctgggggtgggtggagcggccatgctgggcatcgccacgctggcagttaagcggatgtacgatcgggcgatcagtgcccctaccagccccacccgcctgagccattcggggaaaaggagctgggaagaacccaactggatgggctccccacgactgctgaacagggacatgaagacgggcctgagccggtccttgcagacccttcccacagactcctccaccttcgacacagatacattctgcccgccccggcccaagc

SEQ ID NO: 141771 - DNA, 1392 bp, Homo sapiens
tcacgcagcctcctgtgtgggagggggcctcggctcggcatccaggcggcacaggggactgtcatacaccatctgcaggttcaccttgtggcccaccagctcccggatattgttgatgccatatttgatcatcgttgggcgctccagggagaggccccaggcaatgaccgacacgttctcgggaagccccatgggcagcagcatctctggacggaagacccccgagtttccgacctccacccacttcttcaggccttggtggtagctgaacacctccatgctgggctctgtgtatgggttgtaggctggcttgaagcggagttgcgtgatacccagcttggtgaagaactcccgcagaacgcccatgaggtggcccaaggtgagaccatgatccgccaccacgccctcgatctggtggaactcagccaggtgcgtggcgtccagggtctcattccggaatacgcggtcgatggagaagtacttgaccggagtgaagggcttcttctgggcaaggcggtagagcgcacgggcgctggctgatgtggtgtgggttcgcagtaggtttttccgggcctcgtccagcttccagttatacttgtacccctgtgagccgtagccgccctgagagtgggtccgcttgacccgctggacatagtccattgggagctgcagggcctccgctggatctcgaaggaagaaggtgtcgtgctggtcacgggctgggtgctgctggggctggaagagggcgtcaaagttccagaaggagctctcaatgaagttatcagtcggcatctcggtgaaccccatctccaggaagatctgtcggaactgggagcggaccttgagcagcgggtgaaggtggccgctgtcggggaggacaccgtgggccaagaagttgtagggcttgaagggccggtcccgccaagagccactggagatcatctctgggctcagctctgtctcttgcttggagatgctggtactaaaggcactgcctttgctcacccagtaggtcttcagagtcacttcagccaacagcttcctcttcctcagctcgctcctctccttctcccccagcttctcagcctgtcccccccggaccagctggagccgccgctgcacctcatcctccatgctgtccacccgaatccacttgttggacatggccttgctgaagcccactttgccactgggcagtcgcataagctcgctctgggccaggccctctgggggaatgcttcgaaacacacgggcctcatggctgccctcccgggcaatctcctcgccctccgcagtaagctcccagtgcttggtggaccgaagttcagcctcgatgacctcgcccagcgcctgaaggctcttcacggcgcccaccaccgcctggtgctccat

SEQ ID NO: 141772 - DNA, 1269 bp, Homo sapiens
atgggctctggtggccagaaaaagtcctacggcaaagaaatgcagatactagcagttggacctccagccagtgtagtggatggaatttgggcaaaatttagaaattatgaaaagttatacggcacagttgtgctagcttttgccgagctgccagctgctgccacagttttgccaactatcctctgccttgtagtcgtgcctctgctgctcacccagccctggcttctcttgatatctgctttggggaagcaaaatgctgccccagaacatgggggtgcccgtgaaggtctcaaatccaacggggaacagacagggctcccaaatgcacaagtgggccgccggcacagagtcgcccaaccgcaagatgatgcgccccgggaagagccgccctaccttcccaatgggatgccgcccggaagagacgctcctcacttgccagactgggcagccagccagaggggctcctcacatcccagacgatggccgcccagccagagacgctccttacttcccagacgggttgccgaccggccagaggctgcaatctcggcactttgggaggccaaggcaggcggctgggagaccctcccggaaatggaaataaccatacataacaaaacccgacaatcgaagcgcataactcaccagacaaatcgcccgaatacatcatcaaagacaatcagaatcaccaaaaccgacctaaccagctgggaaactcaatcccccggctcccccgaccgtcatcgcaaaccgagtacagcaaccaagcacaaccgattttcgaaaatttatagcagatttagcatcttccaatgtgaccaagggctcaatgggcgatgtggacaggggaagggggcaggcaaggagcaaaggatgcaggagcaaggagaaaacttccaggctcctcccttccaaagtcacccagccttgagatcattgcagatgcaacaggtgcaaacagaagaacactttgggaccttggaatgcgggaagctggctcagtgttccttccaccctactagagaagaagacaggaaccaggatgggaagacggacatgttacattttaagctggagcttcccctgcagtccacggagcacgttctcggtgtgcagctcatcctgactttctcctatcgattacactcatgtggtattccgagcgtccttagccggtatccttatttctccatgttagcttttggcatcctttcccgtaccttaaggcgattcgtcacggtgtcaagccttttaattacaggaatttag

SEQ ID NO: 141773 - DNA, 1779 bp, Homo sapiens
tgggggcaactgcccactttattagacaataggtggcccacaggtctcctcagggcccaccctcacagtagacacaccacacaggacaacagaaggaacctgctacccagtcctctgtccctgggattctggtcctgggacaggtgggaaagaggaaggtgggggctggcctcacagagcctcataaatacaaggtcactggccagggatgcaaaggagcgcagcagcagggactcggggaggatgacctgtcctagagtggcccatgtcacgcagcctcctgtgtgggagggggcctcggctcggcatccaggcggcacaggggactgtcatacaccatctgcaggttcaccttgtggcccaccagctcccggatattgttgatgccatatttgatcatcgttgggcgctccagggagaggccccaggcaatgaccgacacgttctcgggaagccccatgggcagcagcatctctggacggaagacccccgagtttccgacctccacccacttcttcaggccttggtggtagctgaacacctccatgctgggctctgtgtatgggttgtaggctggcttgaagcggagttgcgtgatacccagcttggtgaagaactcccgcagaacgcccatgaggtggcccaaggtgagaccatgatccgccaccacgccctcgatctggtggaactcagccaggtgcgtggcgtccagggtctcattccggaatacgcggtcgatggagaagtacttgaccggagtgaagggcttcttctgggcaaggcggtagagcgcacgggcgctggctgatgtggtgtgggttcgcagtaggtttttccgggcctcgtccagcttccagttatacttgtacccctgtgagccgtagccgccctgagagtgggtccgcttgacccgctggacatagtccattgggagctgcagggcctccgctggatctcgaaggaagaaggtgtcgtgctggtcacgggctgggtgctgctggggctggaagagggcgtcaaagttccagaaggagctctcaatgaagttatcagtcggcatctcggtgaaccccatctccaggaagatctgtcggaactgggagcggaccttgagcagcgggtgaaggtggccgctgtcggggaggacaccgtgggccaagaagttgtagggcttgaagggccggtcccgccaagagccactggagatcatctctgggctcagctctgtctcttgcttggagatgctggtactaaaggcactgcctttgctcacccagtaggtcttcagagtcacttcagccaacagcttcctcttcctcagctcgctcctctccttctcccccagcttctcagcctgtcccccccggaccagctggagccgccgctgcacctcatcctccatgctgtccaccactcggaacacccggggcccgtcagccgcactcttgtccacccgaaatccacttgttggacatggcctttgctgaagcccactttgccactgggcagtcgcataagctcgctctgggccaggccctctgggggaatgcttcgaaacacacgggcctcatggctgccctcccgggcaatctcctcgccctccgcagtaagctcccagtgcttggtggaccgaagttcagcctcgatgacctcgcccagcgcctgaaggctcttcacggcgcccaccaccgcctggtgctccatgcccagctcagccgccaactcggcgctgtccaggccgccatcagacgcctccagccgccggagcagcagttccgc

SEQ ID NO: 141774 - DNA, 1115 bp, Homo sapiens
atggaactctcatgtattacttgtggaagtctaaattgtataactgtttttggagagctctttggcattatcaaagttggagatatgcttctcagcaattctacttgtcatcgggctgaacttcggtccaccaagcactgggagcttactgcggagggcgagagattgcccgggagggcagccatgaggcccgtgtgtttcgaagcattccccagagggcctggcccagagcgagcttatgacctagtgattcagctgctctacaaggctgtgcagctggggcagcggcggctcccgtggccctaccagcggcgcgacccccggccacccaccaagagcgatgaagctcctgttcacgccggtttggcctcgagcttggccagaaggcagctcctggggtctgcatctagcctgctacatgggcagcaagatgggctctggtggccagaaaaagtcctacggcaaagaaatgcagatactagcagttggacctccagccagtgtagtggatggattggggaatccgttgggggacccttaaggccgccaatacccccggtgttattaaagccaaaggccccccacccgctatagcccccgattggaaccgtttccgcaaaaaagtaaaacgcccaaataacagctccaggacagaaaccgatcaggtctggctggagacaggagataagacttccacttctggaaccacactcggggatgggggaagggtaacagcaacaaccgtgctgatggcgggacttggcacgagctccccgccagcattatcagacaccccagacgttggaggctgctatcaggtctcgctggccctgcccaggcctggagctcacggaaaacgtgggaaacaggctaggtgtacggtcatctttcatcaagcaacacgtagcgtaatcacgcgctacgttcatcgttctctaccaaactcaacccgcgcgggcggcaagcggcccccatctccgcatgtcttcgtcgcggtccacattccccgccccgtatcggtcgacccgtccccaatccccccccggggtgttccgtatccgtcgtacccgtccccttatgccgctacgccgcatcgcaccgctacgcaatcgtag

SEQ ID NO: 141775 - DNA, 223 bp, Homo sapiens
  misc_feature (1)...(223): n = a,t,c or g
cgtggccantattgnaccttnaattccaccacctttcataaagccaccagcagaagatgatgtgtcaaatgtacaaataatgtgtgcctggtgccagaaagtgggaatcaagcgctattccctgagtatgggaagtgaggtgaaaagcttctgcagcgagaagtgctttgcggcctgccgacagcctacttcaagagaaataaggtttatcctttgtctgtgt

SEQ ID NO: 141776 - DNA, 2376 bp, Homo sapiens; identical to SEQ ID NO: 116578

SEQ ID NO: 141777 - DNA, 553 bp, Homo sapiens
ccgcgctcgcaccccgccgctctggccgcgcgcccgcggcccgggatcccgagtgtccggagctccgtggtttctgttggacctcgcgggaggcggttttctcccgcctgctgtgctctgtgacctctctgctgcctcctccacggtctctgggcggagcaatccacactgctgagcctggggtggtttggaattcttcggcgaagtggagcgggccgagagtgggtttcccgtccccgagccctccctcatctcggagatgccgcacttgtgagcgacagggcttcatttgaattttcgcacctcgcgagttgcggagcctgcatctctgaagctgcctcggtgaagagccacagcattattttttttctctttgggagagtagctgtctgggatttgagatcctatcttccctgcaaattaccaggttgcatcttcactgataggaatacatttcttcaccaaaggacatggatgaaaatgaaagcaaccagtctctgatgacaagcagccaatatcctaaagaggcagtaagaggacgtcaaaattcagt

SEQ ID NO: 141778 - DNA, 1405 bp, Homo sapiens
ggttttgcctcctgtgacttaattcctgtgcagaatttggtttgtttttacaatctagccttgacctggccttcagacttggtttctagctcatcctccccaaaactgcatgttttatcccagtggttcttaattctcaacatccatagtcctgcgcagaatcttaaagtttggttaagtgaaacagattttagaatttagtgtatatctcaaaggtcagaattaagaaattgccatgtttcttcaggtggtttatgaaataccagcatgtagacccagaagaagctgtaaggattcacactgatgtccaaacaaagaaatctatggcaattcactggggaacttttgccttagcaaatgagcattacttagagcctccagtgaagctgaatgaagctctagagagatacggacttaacgctgaagatttttttgtcttgaagcatggagaatcaagatacctaaataataatgatgaaaacttttaataaatgtgagcacaggcacttttaatgaaaaaggcatcatctaagtttaaaaacaaatgaaaagacttagaaattcatgaatattgtgattattttacatttggaaacaacttctgcaagtttatgttttatgttttgtgtaataacttgcttcctagtatgatcagctcatgtacactatgagagggttcaggggtgggtcatttaaataatgaattggctaatgtggattttaaatttcatatcatgatataagcactgcaatggaaatgtttttactaaaacattatatttttgtggtactagaatttcctgaggtgaaaaaccgatattgaagattcatttttcttttttccattcttcaggaccttcggcaaggtgagtcaaggctctctacctacctagatgtttttcagaggcctacaaatacaagtatctttcttatatgcacattctaataaatgatgaaattcagtccaacatgcttattataaacatagcaattcttgctctatcaaattagcttatatgccaaatattaaatatcggtttatttaggtaagcataaaaacataggggctatcatttttaaagacttgattttcccctattgggggaaaatatataaatacatatttgcccattttaaacatttacccattttaacccatttttaagtgtacagttctttcgcattaatgcacccatgacccaccattcacttaaatttttaaaagaacagtatattctttttttcctagaagccttcagatgagagggaacagtatattctattgcacgtctacaattcccaaaagacctcttactttgggaggccaaggtgggtgggtcacttgaacccaggagttttgacatcaacctgggcaacatgggtgacctcccgtctctctcggaaa

SEQ ID NO: 141779 - DNA, 1570 bp, Homo sapiens
ggctgatagtgggtttcccgtccccgagccctccctcatctcggagatgccgcacttgtgagcgacagggcttcatttgaattttcgcacctcgcgagttgcggagcctgcatctctgaagctgcctcgttcttcaccaaaggacatggatgaaaatgaaagcaaccagtctctgatgacaagcagccaatatcctaaagaagcagtaagaaaacgtcaaaattcagcacggaattccggagcaagtgattcttctaggttttctaggaaaagcttcaaactgggattatagactagaagaaggtgtaactaaatccaagaaaggaaaagatgggagatttgtgaatccgtggccaacatggaaaaacccctctattccaaatgttctcagatggctgataatggagaaagatcacagcagtgttccaagttctaaagaggaactagacaaagaactcccagtgcttaagccatattttatcactaaccctgaagaagctggagtgagggaagctggcttaagagtcacatggctgggacatgccacggtaatggtggaaatggatgagctcatatttctcacggatcccatctttagctctcgtgcttcaccatcgcagtacatgggtccaaagcgatttcgtcgttccccgtgcacaataagtgaactccctccaatagatgcggtccttatcagtcacaaccactatgaccatctggactacaattctgtcattgctttgaatgagcgatttggtaatgagttgagatggtttgtgcctttgggtctccttgactggatgcaaaaatgtggctgtgagaatgtgattgagttggactggtgggaggagaattgtgtccccggacatgataaggtcacttttgtctttacaccttcccagcactggtgtaaaaggactctaatggatgacaacaaggtgctatggggcagctggtctgtcttggggccttggaatcgattttttttcgcaggagatactggttattgccctgcttttgaagagataggaaaaagatttggaccttttgaccttgcagctattcccatcggagcttatgaaccgaggtggtttatgaaataccagcatgtagacccagaagaagctgtaaggattcacactgatgtccaaccaaagaaatctatggcaattcactggggaacttttgccttagcaaatgagcattacttagagcctccagtgaagctgaatgaagctctagagagatacggacttaacgctgaagatttttttgtcttgaagcatggagaatcaagaataccttaaataataatgatgaaaacttttaataaataatttcctgaggtgaaaaaccgatattgaagattcatttttcttttttccattcttcagagaccttcggcaagagccttcagatgagagggaacagtatattctattgcacgtctacaattcccaaaagacctcttactttgggaggccaaggtgggtgggtcacttgaacccaggagtttgacatcaacctgggcaacatggtgacctcccgtctctctcggaaaaaaaaaaaa

SEQ ID NO: 141780 - DNA, 474 bp, Homo sapiens
attgggtcagaactgaaccaaattacaggaccatctgctagtccatttacccatggcactcagccattttcctggcacaacaaaagacctcagaaaaacaagacctatttttccccttatgcaaaattagtgttatttcttctgctgtactacatcaattaatgagcataaatcagagaagttgaatgagaaggccttataattcagagaaatttgctatgaagttgatttcagtttcaggtttaactgttttccctcctacttttccttttattttcaggttctcttggttacaaactccttcccttctggtgctgcaaaaatgagtgggaaatccctgctcttaaaggtcattctcttgggtgatggaggagtagggaaaagttcgcttatgaaccgttacgtaaccaacaaatttgactcccaggcttttcacaccataggggtagagttcttaaatcgtgatctggaggt

SEQ ID NO: 141781 - DNA, 1050 bp, Homo sapiens
gcgagcggcacgtgtcaggccaccgaggtccaagccgcacttgctgccccattgaggacgaggaggcagcaggagcagtgacggtgactctaaggagccggattcccggcacgcagagctgacctgcctggcacccgcggccctctcctgtttccttcccattgtgttggcaccctaaaaagaaagaataaaacaacaacaggaaaaaaaggaaaatatttaaattgtgacaaaaacccactgggttctcttggttacaaactccttcccttctggtgctgcaaaaatgagtgggaaatccctgctcttaaaggtcattctcttgggtgatggtggagttgggaaaagttcgcttatgaaccgttacgtaaccaacaaatttgactcccaggcttttcacaccataggggtagagttcttaaatcgagatctggaggtagatggacgctttgtaaccctccagatctgggacactgcagggcgagaacgtttccagaagcttaggacacctttgtacaggggagcagactgctgcctcttgaccttcagcgtggatgatcggcagagcttcgagaatcttggtaactggcagaaagaatttatttactatgcggatgtgaaggaccctgagcatttcccctttgtagttctgggtaacaaggtagacaaagaggataggcaagtgactactgaggaggcacaaacctggtgcatggagaatggggattacccttatttagaaactagtgccaaagatgatactaatgtgacagtggcctttgaagaagctgtcaggcaggtgctggctgtagaggaacagctggagcattgcatgttgggtcacaccattgacttgaacagtggctccaaagcagggtcttcgtgctgttaaagatagggagccttttaaaaatgtgccccaaattgatcagtcagtagtgtaagaataactgtgcccctctaagagtgcacacacacgcacacaagagggtaagagacaaggttctgattgtgaaacagagcctttcaaattgaagtgtagattgattt

SEQ ID NO: 141782 - DNA, 457 bp, Homo sapiens
atgggcagcagttgtatgattttgggtcatacgattttgcagaggaacatgcctgatctgggtggtttcttgattgggaagtgtaaaacgatgggtatatctgggaggccggaggacgtgtctggttattacacagatgcacagctggacgtgggatccacacagctcagaacagttggatcttgctcagtctctgtcagaggaagatcccttgagagaggtggggaaaacagcttagatgggttcacaaagctccccgggctcagctctggttctgacaccctcagacacggccagctgaccccagaagaaaggacaagaggaccctgccttggtgtgagagtgagggaagaggaagctggaacgagggttaaggaaaaccttccagtctggacagtgactggagagctccaaggaaagcccctcggtaacccagccgctggcaccatgaacccag

SEQ ID NO: 141783 - DNA, 1497 bp, Homo sapiens
  misc_feature (1)...(1497): n = a,t,c or g
tgcttggtcatgagctgctgggaagttgtgactttcactttccctttcgaattccagggtatatctgggaggccggaggacgtgtctggttattacacagatgcacagctggacgtgggatccacacagctcagaacagttggatcttgctcaatctctgtcagaggaagatcccttggacaagaggaccctgccttggtgtgagagtgagggaagaggatgctggaacgagggttaaggaaaaccttccagtctggacagggactggagagctccaaggaaagcccctcgggaacccagccgctggcaccatgaacccagagagcagtatctttattgaggattaccttaagtattttcaggaccaagtgagcagagagaatctgctacaactgctgactgatgatgaagcctggaagggattcgtggctgctgctgaactgcccagggatgaggcagatgagctccgtaaagctctgaacaagcttgcaagtcacatggtcatgaaggacaaaaaccgccacgataaagaccagcagcacaggcagtggtttttgaaagagtttcctcggttgaaaagggagcttgaggatcacataaggaagctccgtgcccttgcagaggaggttgagcaggtccacagaggcaccaccattgccaatgtggtgtccaactctgttggcactacctctggcatcctgaccctcctcggcctgggtctggcacccttcacagaaggaatcagttttgtgctcttggacactggcatgggtctgggagcagcagctgctgtggctgggattacctgcagtgtggtagaactagtaaacaaattgcgggcacgagcccaagcccgcaacttggaccaaagcggcaccaatgtagcaaaggtgatgaaggagtttgtgggtgggaacacacccaatgttcttaccttagttgacaattggtaccaagtcacacaagggattgggaggaacatccgtgccatcagacgagccagagccaaccctcagttaggagcgtatgccccacccccgcatgtcattgggcgaatctcagctgaaggcggtgaacaggttgagagggttgttgaaggccccgcccaggcaatgagcagaggaaccatgatcgtgggtgcagccactggaggcatcttgcttctgctggatgtggtcagccttgcatatgagtcaaagcacttgcttgagggggcaaagtcagagtcagctgaggagctgaagaagcgggctcaggagctggaggggaagctcaactttctcaccaagatccatgagatgctgcagccaggccaagaccaatgaccccagagcagtgcagccaccagggcagaaatgccgggcacaggccaggacaaaatgcagacnnnnnnnnnnnnnnnnnnnnnnnngggaaagggagcctcctttttcccccaaggggggactgcaggggttaattttgggtatgttggaaattccccctcgggggtacacc

SEQ ID NO: 141784 - DNA, 1142 bp, Homo sapiens
ttaccgactgatttctgctgccaagcggctggctccagaccgactaggcaacaatccggtctccaccttcttgccccaccgtccttgctcaggagggctgagacttggccctctgtccaagagtggggtggtttccaagtctgatttcccctcattgttctgggctttttcccgggtcttaaaggccttaaagttgtgggtgggatcaggtttgggaccgggcagcttctcaatgtggccctctaagctgattccccatccgtacaatgggcacgcaagcatgcctattccatcatgtggcttggtggagctgatgcttaggaacacgtagaacagctcctggcttgtgaaaggctctcgatggttcattaccaatatccttactctaagtgcaggtacctggtaggcactggggtggtgtctgtttcctgcctgcttagatgccaaccgccagccaggaattgccttcttgctgccactcgtagctggcccctcagacacaaggaagattaattggcagtagctgggccgtgtgcaaaggattagcaggtgatgagggacatagcaggctatgcaggttcggaattctttgtctacctccacaaggttgcggcccaaggcttcagccactggatgtttaagactgtaaactccaagcctgtggaaggaggtcatacgggctttcagagcctgcacgaaggggaggatccagtggtggcgcagaaccacactctgggacaggctgaggtggaacaccttcatcctaaccagccggggtacatatgtctgggcatggggcagcaacacatcaagcagatccaggaactcctccttggcttcatatggtacatagacgtgggtggcccagttgcctcgctcgtgggggaaggtgcgcacccgtcctccgtgttttgtgcagtcatctacaggcccctcctcggtgcccgggaacatgttcagcacactgtcaggtacaggaaatctcagcctgggaagggggctatggccgcgacggtggctcaccatcccccggcgtggtccgcataccgtcctcggaatcatcctcggagccgctgctgctgtagcccaccaggggcgcaaagctcatggggcaacatccaagtccaccagagcaggtccac

SEQ ID NO: 141785 - DNA, 744 bp, Homo sapiens
atgaagaagaaagcacttagctgtgtctgcagacatcctcctggaagagcagatgtgggccttggctgtcaaaggacaagaaatatttgcatagcaacattacaggaagagcaaattgtatgtgtaaaggctcagaacaatgagaaagcattgcacagattgagaaccacagaaatacaaactaccatcagagaatactacaaacacctctacacaaataaactagaaaatctagaagaaatggataaattcctcgacacatacaccctcccaagactaaaccaggaagaagttgaatctctgaatagaccaataacaggctctgaaattgtggcaataatcaatagcttaccaaccaaaaagagtccaggaccagatggattcacagccgaattctaccagaggtccctcgactatagggtcaccgtcgacagcgacacacttgcatcggatgcagcccggttaacgtgccggcacggcctgggtaaccaggtattttgtccacatacccgtgcgcaaaatgttgtggataagcaggacacagcagcaatccacagcaggcatacaaccgcacaccgagtaaccacccttgcccccaattatgcatttgtgagttttgatcattgtttaataaacttagaagctgctgtacttgttctagccacctcaaattcctggctctgccctcaggtctccgctcctccagccagagaaggtcacctgactgccaagaataaagcttag

SEQ ID NO: 141786 - DNA, 588 bp, Homo sapiens
tcaacattttccttgcagcatcagaacgtgatgtaactctgtgtattcatgtatttcaaacttgtgaagaggaccggtgccatatctgtgccgtgacttaaaagcacgacctgtttcctcaacaagctggtttccttcaatgtttgctttctcacagtggtaccgatttctgctctttccatttccaaaagtatcgctaatttgccagattgccttccccaagctccagaatgtgaaaaatgccatccttgccatagtgacgtcaccaggacattgctggttgcccttatgggctccagctgggcttctagttacaccagtcatgcactctaaatcaagcatgttgtcttccttgggatttgcagcctcttgaccccgaaccccatctaccaacaatgacagtccacaggaacttgcagtgttccgtaagtgttccttaagacaaatctgggcgccgccgaagccgctcagacgcgagggcgcggccgctggcgggcggggagcggggaggcgggacccggcgcgacggggctgccccgccccccgatgatgcggcggccgccgactcgcccccacgctgtcactcat

SEQ ID NO: 141787 - DNA, 795 bp, Homo sapiens; identical to SEQ ID NO: 123863

SEQ ID NO: 141788 - DNA, 698 bp, Homo sapiens
  misc_feature (1)...(698): n = a,t,c or g
agcttgatccggctgcaggaattcggcacgagccgacgcagacccctctctgcacgccagcccgcccgcacccaccatggccacagttcagctgctggaaggaagatggcgcctggtggacagccaaaggctttgatgaatacatgaaggagcctaggagtgggaatagctttgcgaaaaatgggccgcaatgcccaagcccagattgtatcatcacttgtgatggtaaaaacctcacccataaaaactgagagcactttgaaaacaacacagttttcttgtaccctgggagagaagtttgaagaaaccacagctgatggcagaaaaactcagactgtctgcaactttacagatggtgcattggttcagcatcaggagtgggatgggaaggaaagcacaataacaagaaaattgaaagatgggaaattagtggtggagtgtgtcatgaacaatgtcacctgtactcggatctatgaaaaagtagaataaaaattccatcatcactttggacaggagttaattaagagaatgaccaagctcagttcaatgagcaaatctccatactgtttctttcnnnnnnnnnncattactgggttcaattatctttatcataaacattttacatgcagctatttcaaagggtgttggattaattaggatcatccctttggttaataaataaatgtgtttgtgctaat

SEQ ID NO: 141789 - DNA, 2162 bp, Homo sapiens
tttcctttttttttcagaatacaaggcaaagttgctttctttcagagataaacaaatggaaatacatagatctcttcttaaaagggctcttcctgtcctagtacatacaccatattgtactatgattttgttgttcgtttctccattttcattacttctttggatactactgagtttaaagttaaacactttctgtagtagtccattttcatactgctataaagaactgcctgagaataggcaggaagaggtttaattgactcacagttctgaatggctggggagacctcaggaaacttacaatcatggcagaaggcaaaggagaagcaagtaccttcttcacaaggcagtagggagagagaggggaaaagggggaagccccaggacacttacccaaaaaaccagatctcatgagaactccctcactatcatgcaaacagcatgggggaaactgcccctatgattcagtcacctcccatcaggtccctcccttgacacatggggattacaattggagatgagatttgggtggagacacagagtcaaacccatatcattcctacccctggcccctcccaaaatctcatgtccttctcacatttcaaaaccaaatacgccttcccaacagaaccccaatgtcttaattcgttccaacattaactcaaaagtctacagtccaaagtctcatcctagacaaaacaagttccttccacttacaagcctgtaaaatcaaaagcaagttagttacttcctagatacaatggggggtacaggtattgggtaaatacagctgttccaaatgagagaaattggccaaaacaaaggggctacaggtctcacacaagtctgaaatgcagtgagacagccaaatatttaaagctccaaatttgatctcctttgactccaggtcttacatccagatttgtcttaaggaacacttacggaacactgcaagttcctgtggactgtcattgttggtagatggggttcggggtcaagaggctgcaaatcccaagaaattggtgcttcttgaagaaatggctgattctggatctggagaaggaaatgaaaaagatgaacctagaacatcttgccatatcagtacttttggaaatggaaagagcagaaatcggtaccactgtgagaaagcaaacattgaaggaaaccagcttgttgaggaaacaggtcgtgcttttaagtcacggcacagatatggcaccggtcctcttcacaagtttgaaatacatgaatacacagagttacatcacctccatggcagccttgaaaaccaacagcctcacatccatggaaactatgaacatcagcagcttaccagtcactggaagttgaacacagatttgaagctctttgagaagccctgtacccaaagaaatgtcattttgacttgtcttgaaatccctcttcttccatctctgtgcaattgtagaagagaaagaagctatggagagatgggtagggggtgggatgtaaccacccttgcccccaattatgcatttgtgagttttgatcattgtttaataaacttagaagctgctgtacttgttctagccacctcaaattcctggctctgccctcaggtctccgctcctccagccagagaagaaagggaagaaaggaaagggaaacggactcaagggaaacggactcaagatggatcattggttcagcatcaggagtgggatgggaagaaaagcacaataacaagaaaattgaaagatgggaaattcatggtagactgtgtcatgaacaatgtcacctgttctcagatctataaaaaaatttgtcttaaggaacacttacggaacactgcaagttcctgtggactgtcattgttggtagatggggttcggggtcaagaggctgcaaatcccaagttcctaacgggttacacgtctacagcccaggggatggggacacctgtcttagttcatctggactgcagtaacaaaataccatacactgagtggcttataagtaacagaaatttggaggatgggaagttcaggatcaaggcaccagcagatttagtgtctagtaaagacttgcttccacctagacagccatcttcttcctgtgtcctcacagggtggaagggtctctctcaagcctcttttataaaggcactcatcccaccttcatga

SEQ ID NO: 141790 - DNA, 787 bp, Homo sapiens
  misc_feature (1)...(787): n = a,t,c or g
gttcacatctccatgggaggttagcagagaaaagcaaatatcgaagctgtgttctttgttaacagttccttcagaggtattatttgatctttcttaaataaatgccaagactgccttctgacagtaggcttattctcacatcgtagtgtttggatttgaaaaatgttttacattttcaacctagcaactgtgtttttgttaagaagtaattgttgccatatcacaggtgaagaaacaagctcagaggactttctctagggcaaacctgcgtttgtagataggaataagaaatgaagctctcaggtagtgaataagaatgtagtttgtgagacagtgtatttagaatgattctttagtctacattgctgccctaaatatattgtgctgttcagtattaattatgccaaagaccttaatatttcatccttcaactcatgtatgtgtattactccatttccagggtttgaatgccggtgtggaaatgtttactgtggtgtacaccgttactcagatgtacacaattgctcttacaattacaaagcagatgctcaagaattttgtattccagcaggagttcaaatcttttggatcttttcaccaacaactactggaatacaaaattcttgagcatctgcaaactaaaaattgacttgaggnnnnnnnnnnnctagccattgggaatgtagagcagtgtatcttgcatgtcatcggaagaatagatttttgttttggttttgttttgaaaatgactctgaacatttatttccattgcaatttctgtggctga

SEQ ID NO: 141791 - DNA, 1388 bp, Homo sapiens
atggctcaagaaactaatcacagccaagtgcctatgctttgttccactggctgtggattttatggaaaccctcgtacaaatggcatgtgttcagtatgctataaagaacatcttcaaagacagaatagtagtaatggtagaataagcccacctgcaacctctgtcagtagtctgtctgaatctttaccagttcaatgcacagatggcagtgtgccagaagcccagtcagcattagactctacatcttcatctatgcagcccagcccttgtatcaaatcagtcacttttatcagaatctgtagcatcttctcaattggacagtacatctgtggacaaagcagtacctgaaacagaagatgtgcaggcttcagtatcagacacagcacagcagccatctgaagagcaaagcaagtctcttgaaaaaccgaaacaaaaaaagaatcgctgtttcatgtgcaggaagaaagtgggacttactgggtttgaatgccggtgtggaaatgtttcctgtgaaagtacaccgttactcagatgtacacaattgctcttacaattacaaagccgatgctgctgaggaaaatcagaaaaggaaaatccagtagttgttggtgaaaagatccaaaagatttgaactcctgctggaatacaaaattcttgagcatctgcaaacttaaaaattggacttgaggttttttttttcctagtcattgggaatgtagagcagtgtatcttgcatgtcatcggaagaatagatttttcgttttggttttgttttgaaaatggactctgaacatttatttccattgcaatttctgtggctgaggagacttaaactttacaagtattatccttttaagatcattttaattttagttgagtgcagagggcttttataacaaaccgtgcagaaattttggagggctgtgatttttccagtattaaacatgcatgcattaatcttgcagtttattttctcattgtgtatgtatatatcgcttttctctgcagcacgatttctcttttgataatgccctttagggcacaactagttatcagtaactgaatgtatcttaatcattatggctgcttctgttttttcattaacaaaggttattcatatgttagcatatagtttctttgcacccactatttatgtctgaatcatttgtcacaagagagtgtgtgcctgatgagattgtaagtttgtgtgtttaaacttttttttgagcgagggaagaaaaagctgtatgcatttcattgctgtctacaggtttctttcagattatgttcatgggtttgtgtgtatacaatatgaagaatgatctgaagtaattgtgctgtatttatgtttattcaccagtctttgattaaataaaaaggaaaaccag

SEQ ID NO: 141792 - DNA, 1092 bp, Homo sapiens
atggaaaatgccagaagcttcctggtgggccaggatggtggcgtgtatgaaggggttggatggcacatccaaggctctcacacttatggattcaacgatattgccctaggaattgccttcatcggctactttgtagaaaagcctccaaatgctgcagcgctggaggcggcccaggacctgatccagtgtgccgtggttgaggggtacctgactccaaactacctgctgatgggccacagtgacgtgaatatcaaagataaagctgtcattgatgaaatattccaaggcctggatgctaatcaagatgaacagggcgactttcaagaattcatatccctggtagccattgcgctgaaggctgcccattaccacacccacaaagacttcctggttggggatgatggcagggtgtatgaaggtgttggctggaacatccaaggcttgcacacccagggctacaacaacatttccctgggcatcgccttctttggcaataagataagcagcagtcccagccctgctgccttatcagctgcagagggtctgatctcctatgccatccagaagggtcacctgtcgcccaggtatattcagccacttcttctgaaagaagagacctgcctggaccctcaacatccagtgatgcccaggaaggccaaatatgtcatcatcatccacaccgctggcacaagctgcactgtatccacagactgccagactgtcgtccgaaacatacagtcctttcacatggacacacggaacttttgtgacattggatatcaacgcttaggtggccccagcagtgtgccaggccctgtactggcccaggagacggagcgaggggagcaggtgcagccctcggggagtccaagccggcagggagaaggcacgcgggcagcaaagaggcactacgaggccggggccgagtccatgggcgcttgcggtctgggcacaatctgcaccaattttccccaggcagctgcggttgatgcccacgaaggcacatccttcctgccacagtcaaacaggagtaacagacagcaacaatcacacgcctcacccgatgccagtggaatggttcttcaatgctga

SEQ ID NO: 141793 - DNA, 471 bp, Homo sapiens
tgtagctccacattcctgtgcattgaggggttaacattaggctgggaagatgacaaaacttgaagagcatctggagggaattgtcaatatctccccccaataatcagttcggaaggggcattttgacaccctctctaaagggtgagctgaagcagctgcttacaaaggagcttgcaaacacccatcaagaatatcaaagataaagctgtcattgatgaaatattcccaaggccctggatgctaatcaagatgaacacggtcgactttcaagaattcatatcccctggtagccattgcgctgaaggctgcccattaccacacccacaaagagtaggtagctctctgaaggctttttacccagcaatgtcctcaacgagggtcttttctttccctcaccaaaacccagccttgcccgtgggggagtaagagttaataaacacactcacgaaaaaaaaaaaaaaaagaagatct

SEQ ID NO: 141794 - DNA, 522 bp, Homo sapiens
atgttgaaagtgaccttgggctttcataaaccaggagattataaaaatggatcttcgttctacaagagaagttctgaaaaactccttgcacatctcaggctattcttcatttctgcacttcatgaaggaacagagtgttccctgggaactctgggtagccttgtggagaatgagcttccctgggctgcttgtccttatgctacaggtcagaaatacaaagcattgcctgaattgccgatgtcacttgatggtcagtcagtaaaaaaaaaaaggctggactaccgccagggaactcagcgccaattacctccaggagaagctgcagcgggacctggaggcggagcatgtggaggtggaggacacgaccttcaacctgtagcttccgagtcctggtggtgtcagctgctgcttcagagacaccagctggtgaatgcgtgcctagcagaagagctcccacacatccatgcctttgaacagaaaaccctgaccccagagcagtgggcccgtgagcagcagaaatga

SEQ ID NO: 141795 - DNA, 434 bp, Homo sapiens
  misc_feature (1)...(434): n = a,t,c or g
agtggctcctgtaaggcatctaggtagcgtggccggcgccccgagctggggttgtgtccctgctgggctgccgttccagctggactgccgccatggaactcagcgccgaatacctccgcgagaagctgcagcgggacctggaggcggagcatgtgcttccgagtcctggtggtgtcggccaagttcgaggggaaaccgctgcttcagagacacaggctggtgaacgcgtgcctagcagaagagctcccgcacatccatgcctttgaacagaaaaccctgaccccagaccagtgggcacgtgagcggcaggaatgagggactgggatctgcacagccattaaattataaatctggaccnnnnnnnnnnnnnnnnngggggggccgttttaaaggatccttgggggggcccaagtttacccgtgcttgcaacgttt

SEQ ID NO: 141796 - DNA, 628 bp, Homo sapiens
ggaattcgccggcgcccgagctggggttgtgtccctgctgggctgccgttctagctggactgccgccatggaactcagcgccgaatacctccgcgagaagctgcagcgggacctggaggcggagcatgtggtgagttgagccgccggacaaggggaaaagagctcggggggcgggttcggcaccattcatattcttccgctcggtaggaggtggaggacacgaccctcaaccgttgctcctgtagcttccgagtcctggtggtgtcggccaagttcgaggggaaaccgctgctttcagagacacaggttctgtacagagtaatgagatgtgtgacggctgcaaaccaggtgtttttttctgaggctgtgttgacagctgctaaagagcgtggcatagtcttgcccctcaggtgtgtatcctagcacagactatacattgtgacatgggcatgtacatatggattataccaactggagaattggcagacttgcggcaccaattatatcatctcagtcttgaatttactcacgctgattgttgaacagataaatacgaaactgccatcatcatttgtagaaaaactgtttataccatcatctaaactactattcttgcgttatcataaaa

SEQ ID NO: 141797 - DNA, 947 bp, Homo sapiens
gcacgagcgtgcccctctcctgtttggaggcgggtgtagaattccgaccgcggaagccagactgctgtccagtcggcgagcgcgtaccattcagcatcggctccgcccgagtcccacctttctcaggctctgattggctgacacatggcaagcgcgaaaagcctggaccgctggaaagcccggttgcttgagggcggaagtactgccgtgacgtacgccttagtaagggcggaagtgagttttccagcggaagtggctcctgtaaggcagcaaaggtagcgtggccggcgcccgagcttgggttgtgtccctgctgggctgccgttccaggtggactgccgccatggaacttcagcgccgaatacctccgcgagaagctgcagcgggaccttggaggcggagcatgtggaggtggaggacacgacccctcaaccgttgctcctgtagcttccgagtcctggtggtgtcggccaagttcgaggggaaaccgctgctttcagagacacaggtaaggccctgggagcaccttgcctagctcctgtaccacaaccccagccactccccctacccctgcaacctgactcccgcactccccctggcgtggctcagggaccttgaggatcccgccttcgtgacccctgcttcgagtatttcgatgtaaaccctctctccaagtacgtgttcccacggcctggggactacaaccttggtgacaccagtctaatgaatcaccctagcctcggggtgtgcgatcaccgctggccttttcctaaccccatctctcgccccaggctggtgaacgcgtgcctagcagaagagctcccgcacatccatgcctttgaacagaaaaccctgaccccagaccagtgggcacgtgagcgacagaaatgagggactgggatctgcacagccattaaattataaatctggaaaaaaaaaaaaaaaaa

SEQ ID NO: 141798 - DNA, 404 bp, Homo sapiens; identical to SEQ ID NO: 127040
  misc_feature (1)...(404): n = a,t,c or g

SEQ ID NO: 141799 - DNA, 990 bp, Homo sapiens
ttacataggagggcaggtctgggcagccagtgggagagcagctgccagcatctggctggctggtggggctgcttctgaggcaggactcagcttcaggcctgaggatttccagccagtgtccctccactcaggacctgggtgatcacagttgagggtgtggcccacgttccaaagggctacctgagtgctgcctggctgctgccccagtgaagtggtgaagcgctgccaccacccctctgttcccatcgcccaacgaagcctccttcccccaacaagagctccttgttcactgctgtgactctcagctctgccctctgggccctctagctgcatatagagaatgggttgtactgatctaggataaaagccaggaaactgggtgggatgcttgtgtaggccaataggagatggcttaacctgtcttcggtgaccctgctcaaaatctttctcccaccagctcttgaaaggggaagtgcggccaagcatgtgaccctggatagggcctcctgacattcgatctttgttcattttgccacttgatgcccacgacacagcgaggcacttggaatgtgacaggtagatgctgtgtgagtcatgtgctgggatcagctgcagcttttctgaaggcagtctggcagccactcccagagcccctggaactctggcccaaggctctctgactgactccttcccagatcgtctcagcttagcagctgaagactgacactgcctgattgcctcggaagccccctgctcctctctggttgaagcctgaccctcccacttgccttcctcctccgcacccatccgcttctcactacagtccagcgaagggcagagcttcctttcacatcctggatttgtttcctgagccctgatgatagcttctgttgttgtgcagaagctctttagtttgattagatcccatttgtcaattttggcttttgttgcaattgcttttggtgttttagtcataaagtctttgcccat

SEQ ID NO: 141800 - DNA, 657 bp, Homo sapiens
atcgcccggctgattaattcggcacgagctgacacttaagtcagagcattctgtagctgtattttacagaactgtaattgcacagattgttcctcttacaagagaaatatccagagctctaagaaaacaactgatgaaaacgacatgcgtgacatttggtgctgaagacccaggtcagagagactcctttgggggaccagtccgctgtccttgccctcactctgtgaggagacccacctacgacctcgggtcctcagaccaaccagctcaaggaacatctcaccaatttcaaatcgggaccccactggaaaatggactgtccaactcacccggcagccacttccagagcccctggaactctggcccaaggctctccgactgactccttcccagatcttctcggcttagcagctgaagactgacgctgcccgatcgcctcggaagcctgacacttatactttctgctcccccggctccttcagttgtacccactctttgttgagtcccacaattaccattgttctcggcccggacttcaatccggtctcccacattattccagataccacacctgaccctcatgactgcatctctctgatccacctgacgttcaccccatttccccacatttccttcttccctgtttctcaccctcat

SEQ ID NO: 141801 - DNA, 894 bp, Homo sapiens; identical to SEQ ID NO: 138117

SEQ ID NO: 141802 - DNA, 1699 bp, Homo sapiens
ctgtgtgcggttgaatgccactcttgcaaagacagcttgggacacactggccctcttcagctcatctctgacttgctggtagatatctggagagacttccacggaagagttggttggctctggcttaactgctctggggatgggtggatggttcaggaactgctggttgatggcttgaggatgctggtgagccaggagccggctaacggcaatctgttggtttatcagatgggccatggctatttgttgccttacaagttgtggactaagctggggagaaagaagaccagggctcatgatgggctgtaatgcgggcacttggtttcggattggagtactgtggtgaatttggctgtgaggagactgttcgttggttttccccagggatgccagctggttcatatttggtaaatgcattggacgctggcccagaacacaatagtctgaaaggttttctcgttccactctttccactggcagccactcccagagcccctggaactctggcccaaggctctctgactgactccttcccagattttctcagcttagcagctgaagactgacgctgccggatcgcctcggaagcccctagatctgatgatttaataagagggtatttttccttttgctcagcacgtctcctttctgctgccatgcgtagagggatgtgtttgctttcccttctgtcattactgtaagtttcctgaggcttctccaaccagatataacgatttttatcttcacaggattcatctaaagcatttccatttggattatacgctatgcagttctttgtattaaaagtttcaaatgatggaaatctgccatgagaaattatgttccaagagcgaagtagagaaggcacgatgtgtactttttcagaaagaacagcgttgaattgttgaagctgagcgggccctccacactgggtggcattggtggttttgttggtatgcagaacctccattctccatgcttttttgctgcattctgtgcagctgagctctgacaactgtatcacacagtcttcctcaccctctggcttctgtctgttttcaaccattggaaagcattggtaggagaagagaagctctacctttggaatatcaaatatctggcctagtgtcttttcaatgacaaaaacaagagtaagattatccacttcaataagcaaaaagcagtaatttaatttgatgtgatttttaagaaaatctttgtttcctctgaggaactggtatgttgtctctccagaattcaggagaaatgtgtaattgaccagaccagaggtccccaagccccaggccacagaccggtactgtggcctgttaggaaccctgtagctgccagtggggtggttgccctccacttgcaagggcaaagggccagtgtgacagcctccacctgcacttagtgggtcccaagcttttgtccagcgtccaagaagaatgaggtcacacttgacaactgaagaatggtaagagtggagaattttattgagcgatgaaaacagttctagagtctccactggagcactgcctagtcgagctctgagaagagggccaccattctccaaaccccagaatggtgatccattgacagtttgcaacatgtgcttgggaaagctgcagccactaagcacagccaggagtggggctgtaccctgcaaagccacaggggcagagattcccaaggccat

SEQ ID NO: 141803 - DNA, 952 bp, Homo sapiens
aaggcggaggtttcagtgaccgagatcgcaccatcgcactccagcctgggcaacaaatatggatgtggggaataggcaagcaggtaggtggatgtggctggctgcgtggaaagaacagggtggtgggggcagccaaggatcaatcaggcactggtgagaagttctacttcatcccgaaggcaatgggagccatggagggctctggacagaggagaacattgccagacccaggtgctcacaggaacccttctgggggctacagcgcaacagattgtgaagggagccggcctgcaccaggtgaaataaacagccatgcttctcacacaaagcctgtttggtggttcttcacacagacgcgcatgaaatttggtgccgtgactcggatcgggggcctcccttgggaggtcaatcccctgtcctcctgctctttgctccgtgagaaagatccacctacgacctcaggtcctcagaccgaccagcccaaggaacatctcaccaattttaaatccggagcttgctacacttgctggaaatctggccactgggccaaggaatgcccgcagcccgggattcctcctaagccgcgtcccgtctgtgtgggaccccactgaaaatcggactgttcaactcacctggcagccactcccagagcccctggaactctggcccaaggctctctgactgactccttcccagatcttctcggcttaacggctgaagactgaaactgcccgattgccttggaagccccctagaccattcacggacgccgagcttcgcgtaactctcacagcggaaggtaagcctgtccccttcttaatcaatacggaggctacccactccacgttaccttcttttcaagggcctgtttcctttgccttcataactgttgtgggtgttgacggccaggcttctaaacctcttaaaactccccaactcgaattccaacaga

SEQ ID NO: 141804 - DNA, 5307 bp, Homo sapiens
ttcgcggccgcgtcgacttttttatcagacattaaaatagtttatttctttttccattctgtaatcttaaaataacatcagcttcagtgcctgttcacaatacaaaaaaagtcaaaaaacaaaaacaacacccaaaacataaaaaagaaacaatttgccaaataagttatttgttcctaagagtatcaaaagtgcaaaatattcaccttcttttcagatctctccccaagcataattaccctccttgaacaaactgaacagacagattcagcagctgccacactgcacttgtttttaggggacaatgtcaggacaggtgggatgtgaactacagttcctctgtaaagatgtttggggcatcaggcttttaaaggaattctaggttaacaaaacaggtctgagtatgtgcttccaatctctattcccaaacaaaggaaatcactaaaaaaacagatcacacttctttttataacagaaaaatatttatgtaatgatggcagctgcaaattgattgggatgttaataaataaaaaggaacaagtatccacaagctgcaaatgaggaagaaaccaacctacctgaaaactacaaccaaattctcatggctaataagtgatggcagtgagaccatggcccctaatggaagttagggcagcctcacccactgaaatgttgtttagttggagctgatagcctcagtgttagataaaaattgtgcaacacctgagcaacaaatttttttttttttttggaaattggcatgtattctgcaaagacttgttttaggccagttttaccccatctgctaaacgcaatgcatagtctgtatcaaccagaagaacccatctctaaaaacatcaatgttgatagtcaaagaccactgtgttagaaccaaaatcaggtcttgtatgattacatacatcagacagagcaatggtggcacaggctgagcatgacaatggctcatatgtttgacgcaaaagtaaacaaattcatggatgcattcaggaggaatgccttgcatggacaagggtaaagttcaatttaaaataaaagctccctaatattctcatagggcaccagctctaaaccggtctgtagaagagcttttgggctgaaacatctgccaggaacattgccaatcccatcactaccttcatttcctagtgcaaatggaaggtgcagctgtttgaaggtgctttttaaaagatcaaaagatgacttgaagagataaaaatgtttaaaaatgaacaaatctggcatggtggctcatattgataatcccagcactttgggaggccaaggtggaaggactgcttgaggccaggagtttgggaccagcctgggcaacatagcaagacctcgtctctattaaaaaaaatataaataaatacacttggagagtttttggttttcagaaattaaagtcaggaatttcattagtacagaaattaaaaataaaaacctactaccaaaccaaaagaccactcatataagcaatctggccataaaatacctagaaagtaatattgaggactgatgtatcaaggagccaaatgaattccttgaccatttctagttggaccaggtgccatgagatacagcattcagaggaagtgtccatttttagaggatcatatggaagaatgaagcctggcagtgatttattttttaataaagctacagactccatgaaaactacaggaattcctggccttaaataatttattacttaccaatgtagctcaagatttaaattattcaggatccaagtggcttagtttaaagcattaagattaaagaaatactaacttagccgggagtggtggctcacgcctgtaatcccagcagcactttgggaggctgaggcaggcagatcacctgaggtcaggagttcatgaccagcctgatcaacatggagaaatcccgtctctactaaaaatacaaaattagccgggctaattacatggtggcacatgcctgtaatcctagctactcaggaggctgaggcaggagaatcacttgaacctgggatgtggaggttgcggtgaaccgagatcgcaccatttcactccagcctgggcaacaagagtgaaactctgtctcaacaactaaaaaaaaaaaaaaaaaaagaaatacttagtaaatgtcccatcactgattttcacccttcacaaagccaccaaaggcaccttgctttgacatttgaacggaccactctttgaagctgtccaaactcaaactcagaaccactggtcattctgccctgaaaaataaaaggtatgctctctaactggctggtatgaggcaccctggggtccactatacctggagctcagcacgctcaggtgctgatggccagtctgaccccaatactggtgaagcagctctaagttaagagtgaaaacaatgaagatgagacatcaaaatacagcccagaagtggaaagtaagccttttgcaaaatgggagtctagaacaaatcttggctcacttcctgcaaaagatgacttgaagagacagcacttttagggtaacagtgttcaaaatacaattgttgagaaattttaagttccttgatacaaagacatgtttggtattttactaaagagacactattgaagagattccttaagcctgactcatagcaggtgggaataatttctcttcagtttaacatctactggctttatagcagcttatctctacgttcagagaacaagattacaagttatggctcctaatatccataccctaaaatcgacagaggcagaaaggcatctgaagacatacatgtcaacggctcaaagtcatcacagtacttctcgctgtgcagacccctcccctggctaccagcagcgctggggcggcggatgggatgctcacagcgtgtctcaaggctgcatcgcttcagccactgctcagcctccctttccttttcttgagaactcacatgcagaactcccgtttattcctttccttttcaacctgtggccaacaaactgttgttgggggatacccccaaaatatacatttagccacttactcccagaacaaccagtaaacgtgagattgcttggaaaggggcctttttccagatgcggggctagaagctgccgtgggttgttcagagttaggagcatgcgccatggcagcagcacagcagggccgggattggggaaggggccaatgacctggcctgcacgacaggctcatgagggtccgccagatgccgcttgcagggtggagccctgtgcttctccaagacacaggacaggagggtggggtgagcatgggacaaggacaagaaaggaagaggggatgagcagtctattttcaatggtgtggcattcagtggggaaaaataacacccagaggaaaagattttcatctaggcgattcaaactggtggtgtttttcattcctaggttagaacaggacaaaggaaagattcttctagccatggttctagaagagcaatctaaaatctatactctgttcattgtggtagtttgagtcctgaaaatacctgttcacaggggcatgttaaaaagtctgaagagttcaaatctctttggaaaatcctctcagtctagttcaggccatgatgggatataaaacctctgtaaggagccctccagcaggcgttccatccataaagagagcttgctcaactttcctttgatgggcctggatccaaggccacaggaaggtttccctcgagattcacccaggtagagggaagagtcaacatcactgcacgaccctatggcttcctcctcttcgactgtcttttggggcttgaagaggcagaagtatttcttgtggccattcagagccagtacataaccagtgtagtcacgctccatgaaatgcttatcatattggtttgggattggagctgcatcttgagcaaattctagtaagtattctagccattctctgtgtttatctagactcaggaaggagaagtgtaggcagctgctcccagtaaatgtgtagacctccaaagcaaatttctgtagtaggctggtcttggtagaattcgacaggatgaggaccacattcatgtggcctggcctcagacgtaccaagttactggtgtatgttacatctgtgagttcagttacctccacaaagccttttttaggaatcttgctgctgttttctttggtgaagcttggctcagttttcccagtcttctcttgggcttcctctttttctggagggcttgactctcgctcatcattagagtcgctgaaagcctgaacgatgacagtgccgaagaggatgaagagggcagagaagatcagggacagcaggggcatcatttccctccagttgttgtgaaaaatgctatcccagcagtctgagatgtagtcagaagcagagtagaaccatcgaaggagaaaaacaggggcaagttcatcggtcaggtcaggaagcactgcttcagaggacagaagagctggatctttacgcagctggtcgagatagcccaagaggataaatttgtcactctcactcccaatccaagggtcttccagggttttatacaccacccttcctgctgtgttgcgcctttctaaaatagacaccgctgatttcccttgaaacgcctcactgtctggtagtaaggtgtcggcaaactcctgctgccgattgctgtagacatgcacaaatctcactgtgtcttgagtgtttgccagggcaaaggacaggaaagcctcaaagggtttgctcaacttggtagtctcagcagtcaataaaaccacacagtacttcctctgtcgatgcgaccgtttcacagggcagagttcatggaacaacttctggctggtgagcctggctgccaatagatatttgtttcgggtgatgaagtcgtcaatgatttgcttcttcatacctcgggcctggataacatcggcaggcctgtttatatgttctttaaagaccaagagggtaggggcgtagatattgatgttgtaccgccttgtcatctcttccgtccctctcaaacccacatatacatatccaaatgataaataatctttgtatgcaaaggcagtcaacttgtataacagtggcacaatgggcgtttggtcaaacagaaggacatgaggcttattctcttgctgccagccagagaggaatctgacgtaatttttatttgtaactttctccaccaagttccctggaagaagactttctacaaattgtcgcagattttcacggacaactgcattgtggaagaaggagattttcccgttaatgattcctaggatagagggcgtgctgtgtgccctag

SEQ ID NO: 141805 - DNA, 300 bp, Homo sapiens
atgaaagccttctgttgtttcatgatcaacatgggagactcccacgtggacaccagctccaccgtgtccgaggcggtggccgaagaagtatctcttttcagcatgacggacatgattctgttttcgctcatcgtgggtctcctaacctactggttcctcttcagaaagaaaaaagaagaagtccccgagttcaccaaaattcagacattgaagcactgcgaaaatgacaccagtttacagattaagaaccgggggctcaagaatgttaacgggcctgccagggtcattagccagcaatag

SEQ ID NO: 141806 - DNA, 420 bp, Homo sapiens
tttcgtcgcttgggtactggctgggtccgatgctgggtacgctgcgcgccatggagggcgaggacgtggaagacgaccagctgctgcagaagctcagggccagtcgccgccgcttccagaggcgcatgcagcggctgatagagaagtacaaccagcccttcgaggacaccccggtggtgcaaatggccacgctgacctacgagacgccacagggattgagaatttggggtggaagactaataaaggaaagaaacaaaggagagatccaggactcctccatgaagcccgcggacaggacagatgactccgtgcaagctgcagcctggggtcctgagcttccctcgcaccgcacagtcctgggagccgcctgcagtgcctcaaagccctttgaaaaatgaattaagaaggaaatacttgacc

SEQ ID NO: 141807 - DNA, 2523 bp, Homo sapiens
tgggtccgatgctgagtacgctgcgcgccatggagggcgaggacgtggaagacgaccagctgctgcagaagctcagggccagtcgccgccgcttccagaggcgcatgcagcggctgatagagaagtacaaccagcccttcgaggacaccccggtggtgcaaatggccacgctgacctacgagacgccacagggattgagaatttggggtggaagactaataaaggaaagaaacaaaggagagatccaggactcctccatgaagcccgcggacaggacagatggctccgtgcaagctgcagcctggggtcctgagcttccctcgcaccgcacagtcctgggagccgattcaaaaagcggggaggtcgatgccacgtcagaccaggaagagtcagttgcttgggccttagcacctgcagtgcctcaaagccctttgaaaaatggaattaagaaggaaatacttgacccaagtgggatatactgctacaaggtgccgagtatttttgagtgtgcaggtaacagagctgggaagtgatgtacgtgtgactccgctgccttcactggcctcacctgccgtgcctgcccccggatactgcagtcgtatctccggaaagagtcctggtgacccagcgaaaccagcttcatctcccagagaatgggatcctttgcatccttcctccacagacatggccttagtacctagaaatgacagcctctccctacaagagaccagtagcagcagcttcttaagcagccagccctttgaagatgatgacatttgcaatgtgaccatcagtgacctgtacgcagggatgctgcactccatgagccggctgttgagcacaaagccatcaagcatcatctccaccaaaacgttcatcatgcaaaactggaactccaggaggaggcacagatataagagcaggatgaacaaaacatattgcaaaggagcccagacgttctcagaggagctccaaggagaacttcataccctgctctgagcctgtgaaagggacaggggcattaagagattgcaagaacgtattagatgtttcttgccgtaagacaggtttaaaattggaaaaagcttttcttgaagtcaacagaccccaaatccataagttagatccaagttggaaggagcgcaaagtgacaccctcgaagtattcttccttgatttacttcgactccagtgcaacatataatcttgatgaggaaaatagatttaggacattaaaatggttaatttctcctgtaaaaataggttgccagggccaccaatacgccagggccatggagagaaccgtcagagggagattgaaatccgatttgatcaggttcatcgggaataatgcatgagtcccaggagccagcctcgccggatgtgcctgccggactcctgggccatgaacatgtacagagggggtcctgcgagtcctggtggccttcagggcttagaaacccgcaggctgagtttaccttccagcaaagcaaaagcaaaaagtttaagtggaggctttttaaaacctaggcaaaagatctctggaagcagggaggtgcctgcccaagagcgattcatcttcatcacttccaaagaccaaccccacacacagcgcaactcgcccgcagcagacatctgaccttcacgttcagggaaatagttgtggaatatttagaaagtcagtgtcacccagcaaaactctttcagtcccagataaagaagtgccaggccacggaaggaatcgttacgatgaaattaaagaagaatttgacaagcttcatcaaaagtattgcctcaaatctcctggggcagatgacagtgcctttatgtattgggagtgtctacagataaagcaagtatgggaagtttcgatatcaaacagaaggcttcttaggaaaattaaatccagaccctcacttccagggggtccagaagttgccatcatcacccctggggtgcaagaaaaagtctactgggctcaactggcaattgaggctccttccatctacatgtgtttgctcgtgccatcacgaagggatggcacgaggggaaccatcagttcccctgcaaaaagacccaggctatccagaaacccccaggggctcccggaccgccagggccaattcccctgggtgcctccagatggggtggacaacacccgtcagacccgggagacccagggcagctccttcacagccccaactcatgaagagagaggagagaacacgtccttacaggatggaagagaaaagtgatttccatgcctagaaaaattggaaacctaaaagtgtgtagcctaggttatttcggagtgttatttatcttccccacttgctctctgtttgtatttttgttttgtttttgattcttgagactgtgaggacttggttgacttctctgcccttaaagtaaatattagtgaaattggttccatcagagataacctcgagttcttggtgtagaaattatgtgaataaagttgctcaattagaatttttagggttctctttgataaaaaaaaaaa

SEQ ID NO: 141808 - DNA, 2205 bp, Homo sapiens
tcagaatcccctctctgggcctctgccaaaccacatcctcgtctccctccaaaatccgatttcatgccccagtgtgccatgacggtcccccaggttgggaccatctggctgcagtgtgcagtttccagacttcctagaaacccgctgtctctcttcttccatgtcccacagacgtgcacatgcatccagcacatctggagtgtctgggagcctccagttataaatctccactttaccatttgtttgggcctctcccgcagcctcgccacgtggtccctgctggccccaatgcaccaggtcacccctcacccctcccgcagcctcgccacgtggtccctgctggccccaatgcaccaggtcacccctcacctctcccgcagcctcgccacgtggtccctgctggccccaatgcaccaggtcacccctcacccctcccgcagcctcgccacgtggtccctgctggccccaatgcaccaggtcacccctcacccctcccgcagcctcgccacgtggtccctgctggccccaatgcaccaggtcacccctcacccctcccgcagcctcgccacgtggtccctgctggccccaatgcaccaggtcacccctcacccctcccgcagcctcgccacgtggtccctgctggccccagcatatcaggtcacccctcacccctcccgcagcctcgccacgtggcccctgctggccctctcgcacccaggtggccttcaccttccactcctgcctggagagcccctcctctgttactttctggcgaattcctccttgcattctcaggtgaatttcatgttttcgcctataggaagtcttcctagaggcttgcaggactgagacaaaagcctttgaatccctcttcctataagaatcatgctgacctaatctggaccaatgctcttttagccaaccatgagttgatcgtctgtcattgatactaggacatttaatgaaaacaaatgaagttctttgagcttcctggacagcatccatttcaagaggaagacaaacaccagcccagccattgtgggctggatggaggggtgagacctgagatacgtcctcgcccctcagggcctcttgcttgtgtgggaagctgtcactggctgcaaccacggccagtggcaatcgctgcgtgtccggcactgggccctgggccacgatatagaagacattcgtgaatgtgtgttcattgactgaatggtggattgcgggtccctgatgaggagccaactcttctgagatgaggacccaagctggggagcaggcttgaggtgtgcggtagaagatcctggctggcaccggtgtcttctgggcagagctgtacacacgggcaagtcttccgatgcccaactcgtccaagttcttcggataagaagtctgaaagaatactccagttcccaaacccacaaactggtatttcttattgttttctgtgattcttttctctggagattgtcccggcagctttgacagagcagttgcagcccaccctccttccttccttcccgtcccgtggctgctgtagtcaaagactcctttcttgaagaatggtgaaaactcacaaatggtatgtttcgagagagtcagtcccactttgttgatgtggaggggagatgttgcggactggagcatcacgctgaaaaagtccctgaggtatttctggaaagtgctatcattgtcattaaaaccagcacgtgaggaatgccctccactgtcccaccgggcaagtctgtctacaccgggcatcttagctgcttgggtcagatgcactgcctttcctaggcctgatggtgctttcgtggggaccagcaggcactggttcttcagagttaaaagttctttacaaacacggggaaggtcctgtttctctgcaaggctcacgctcttcagaggcaagacaacttcccagactgagactctactgcttggtgactggcagttgccaacaagtccccagtgtgtaggcggtgaccagcacaggccctggggagcagcgagccgtggctgccagcggtcagatggtacattttctacatacacagaggaaaaacagcttaattctgttacctctaagtgacttcgtctctcagcaatcacacgttcatccttatttccaaatagtttctttggaggaaattcaagggcagcaagctccttttgttcagcatcatgtttgtgagatccaaccat

SEQ ID NO: 141809 - DNA, 875 bp, Homo sapiens
atggaggttctagcttcatgggccaccttcactttgggccaaactgagcagcatgtggactggatttctgctggagcagctccccagggacctattgtgaaacaactccctagcccagttcctcctacagagcaacttgagcaggaaaagcccgtgaccatcggctctgctccctcaacacctaacaagctcctacttagccattccaattgccaactccctaggccattaagatcaataacaaatatctctgcatgcttttctcttgaacttgctatagaccacaggggtttcccacacagccctggagctagatcactgtattcaaattctgtctttggtacttaccagctgtgtgacctttgtgacaatctaaaaacttgtcacacttcacatggatctgtcatggcggaaacagcggttatcaatcacaagaaacgtaaaaatagcccgctaatcgtccagtcaaacgacctcactgaggcggcatatagtctctcccgggatcaaaaacgtatgctgtatctgttcgttgaccagatcagaaaatctgatggcaccctacaggaacatgacggtatctgcgagatccatgttgctaaatatgctgaaatattcggattgacctctgcggaagccagtaaggatatacggcaggcattgaagagtttcgcggggaaggaagtggttttttatcgccctgaagaggatgccggcgatgaaaaaggctatgaatcttttccttggtttatcaaacaaatgaatgctaagggagttatcctcaatgcatttgaacgttatcgccttaaaacatgtattgactttaagccttgggctggagaaacaaactatatatcagtgttcaagggcagtgg

SEQ ID NO: 141810 - DNA, 1044 bp, Homo sapiens
gttcttgcccgcctgatgaatgctcatccggagttccgtatggcaatgaaagacggtgagctggtgatatgggatagtgttcacccttgttacaccgttttccatgagcaaactgaaacgttttcatcgctctggagtgaataccacgacgatgtccggcagtttctacacatatattcgcaagatgtggcgtgttacggtgaaaacctggcctatttccctaaagggtttattgagaatatgtttttcgtctcagccaatccctgggtgagtttcaccagttttgatttaaacgtggccaatatggacaacttcttcgcccccgttttcaccatgggcaaatattatacgcaaggcgacaaggtgctgatgccgctggcgattcaggcagaaatgctgggggcaaagacatacaaggaaaagtcacgactcaacacaatcttcaaaaagattgggaagctcaattccatcagcaagctgggaaaaggcaaaatgccgtgcctcatttgtatgaatcaccggaccaacgaaagcattagccttccattccagggcgggggcagatttagcacccgaagtcccctggaacttcagatgcaagagggcgaacacaccatccgcaacattgtggagaaaaccaggcttcctgtgaatgtgactgtgccaagccctccaccgagaaacccatacgacctccacttcatccgtgaggggcaccgctataagtttgtgaacatccagaccaagacggtggtggtttgctgtgtgctgcggaacaacaagatcctccccatgcactttcctttgcacttgactgtccccaagttcagcctcccagaacacctggtgaagggagagagctggcccgaaaccctggtccatcactggctaggtatctgccaagaacagttcgacatcgatgagtattcacgggctgtccgtgatgtgaaaaccgactggaatgaagaatgcaagagccccaagaaaggttcggtgctctggccacaaccacgtgcccaattcgctcaactacgcccgcgatga

SEQ ID NO: 141811 - DNA, 1448 bp, Homo sapiens
tcattgctgtttcatctactgttgctgtgtttgccttgatgctgatcatcacccttgtcagtgtctattgcaccaggaagaaatatcgtgaaaggatgagctcaaatcgaccaaatttgactccgcaaaatcattctgggctgacatccgcgtctactgtagaggatcccctctttaaagtagaggggaaatggaaccatgtcagtcggtcatggcccagtacttacaatgggtaccaggagtaccaggtaaggatccccccaaccgactggaatgaagaatgcaagagccccaagaagggtcggtgctctggccacaaccacgtgcccaattcgctcagctacgcccgcgatgagctcacccagtccttccaccgactctcggtctgtgtgtatggcaacaatctccatggcaacagtgaggtgaaccttcatggttgcagggacctggggggagattgggctccctttcctcatgacatcctgccctatcaggactctggagatagtgggagcgactaccttttcccagaagctagtgaagaatcagcaggcatcccgggaaagtcagaacttccctacgaagagctgtggctggaggaaggcaagcccagccatcagcctctcactcgctctctgagcgagaagaacagatgtgatcagtttagaggttctgtccgatccaaatgtgcgacttctcctcttcccatccctgggactctgggagcagcagtgaagtcttcagatactgccctacctccacctccagtgcctcccaaatctgaagcctgcaacttacacagaacctacatggagatctttaaggtggtaaatgaccaagcagagcccaatcaaatcaatgctctaccaccaaaacgaatggaaaggaaattagaccagaggattgaaaaggagaagtcagcagttgctgctggaggagaatctgatacacagcagagaataaaatacctaggaatccaacttacaagggatgtgaaggacctcttcaaggagaactacaaaccactgctcaaggaaataaaagaggatacaaacaaacggaagaacattccatgctcatgggtaggaagaatcaatatcgtgaaaatggccatactgcccaaggtaatttacagattcaatgccatccccatcaagctaccaatgactttcttcacagaattggaaaaaactactttaaagttcatatggaaccaaaaaagagcccgcatcgccaagtcaatcctaagccaaaagaacaaagctggaggcatcacactacctgacttcaaactatactacaaggctacagtaaccaaaacagcatggtactggtaccaaaacagagatatagatcaatggaacagaacagagccctcagaaataacgccgcatatctacaactatctgatctttgacaaacctgagaaaaacaagcaatggggatag

SEQ ID NO: 141812 - DNA, 4777 bp, Homo sapiens
caaccctgaatgtcatagttagctactttcaactggaagctacaacatggatttatggaatctgtcttggtttctgttcttggatgctcttctcgtgatttctggcttggcaactccagaaaactttgatgtagatggcggaatggaccaggacatatttgatatcaatgaaggtttgggactggatctttttgagggtgacatcagacttgatagggcacaaattagaaattccatcattggagaaaagtatagatggcctcataccattccatatgttctagaagatagcttggaaatgaatgctaagggagttatcctcaatgcatttgaacgttatcgccttaaaacatgtattgactttaagccttgggctggagaaacaaactatatatcagtgttcaagggcagtggctgctggtcttcagtaggaaataggcgggttgggaagcaagaactttccatcggggcaaactgtgaccgaatagcaacagttcaacacgagttcctccacgctctgggattctggcatgagcagtcgcgttctgaccgggatgactatgtcaggataatgtgggacagaattctgtcaggcagagagcacaattttaacacctatagtgacgatatatcagattccctgaatgttccctatgattacacttcagtaatgcactacagtaaaactgcattccaaaatggaacagagccgacaattgtcacaagaatctcagactttgaggatgtgatcggccaacgaatggatttcagtgactctgatctcctaaagttgaatcaactgtataactgctcctcttccttgagttttatggactcatgcagttttgaactggaaaatgtgtgtggcatgatccaaagttcaggagataatgctgactggcaacgggtttcacaggttcccagggggccagagagtgatcactccaacatgggccagtgccaaggttctggtttcttcatgcatttcgatagcagctctgtaaatgtgggggccacagcagtgctggaaagtagaacgctgtaccctaaaagaggatttcagtgcctgcaattttacttatataacagtggcagtgaaagtgatcaactgaacatctatatcagggagtattctgcagacaatgtggatggcaatttaacccttgtggaagaaataaaagaaatacccactgggagctggcaactttatcatgtaacattgaaagtgaccaagaagtttagagtggtgtttgaaggacgcaaaggctctggtgcatcactgggtggtctgtctattgatgacatcaatctttcggaaacacggtgccctcatcatatctggcatataaggaatttcacacagttcattggcagcccaaatggaactctgtatagccctccattttactcttctaaaggttatgcctttcagatttacttaaatctagcccatgtgactaatgcagggatatatttccacttgatctctggagccaatgatgatcaattacagtggccatgtccttggcaacaagccacaatgacacttttggatcaaaatcctgacattcgacagcgtatgtccaatcagcggagtataactacagacccatttatgaccaccgataatggaaactatttctgggacaggccttctaaagtgggaacagtggctttgttctctaatggaactcagtttagaagaggtgggggctatggaaccagtgcctttataacccacgaaaggctgaaaagcagagattttataaaaggagatgatgtttatatcctactgacagtggaagacatatctcacctcaactctacacaaatccagctaacaccagcccctagtgttcaagacctctgctcaaaaaccacctgtaaaaatgacggtgtctgcactgttcgagatggcaaagctgagtgcaggtgccagtcaggggaagactggtggtacatgggagaaaggtgtgaaaagagaggctccacccgagacaccatagtcattgctgtttcatctactgttgctgtgtttgccttgatgctgatcatcacccttgtcagtgtctattgcaccaggaagaaatatcgtgaaaggatgagctcaaatcgaccaaatttgactccgcaaaatgttgcttcaggtgaatgcaatgaagacactgaagtttacaacatcaccctgtgtactggggatgaactcactctaatggggcaggcagaaatcctttatgcaaagacattcaaggaaaagtcacgactcaacacaatcttcaaaaagattgggaagctcaattccatcagcaagctgggaaaaggcaaaatgccgtgcctcatttgtatgaatcaccggaccaacgaaagcattagccttccattccagtgcaagggcagatttagcacccgaagtcccctggaacttcagatgcaagagggcgaacacaccatccgcaacattgtggagaaaaccaggcttcctgtgaatgtgactgtgccaagccctccaccgagaaacccatacgacctccacttcatccgtgaggggcaccgctataagtttgtgaacatccagaccaagacggtggtggtttgctgtgtgctgcggaacaacaagatcctccccatgcactttcctttgcacttgactgtccccaagttcagcctcccagaacacctggtgaagggagagagctggcccgaaaccctggtccatcactggctaggtatctgccaagaacagttcgacatcgatgagtattcacgggctgtccgtgatgtgaaaaccgactggaatgaagaatgcaagagccccaagaagggtcggtgctctggccacaaccacgtgcccaattcgctcagctacgcccgcgatgagctcacccagtccttccaccgactctcggtctgtgtgtatggcaacaatctccatggcaacagtgaggtgaaccttcatggttgcagggacctggggggagattgggctccctttcctcatgacatcctgccctatcaggactctggagatagtgggagcgactaccttttcccagaagctagtgaagaatcagcaggcatcccgggaaagtcagaacttccctacgaagagctgtggctggaggaaggcaagcccagccatcagcctctcactcgctctctgagcgagaagaacagatgtgatcagtttagaggttctgtccgatccaaatgtggcgacttctcctcttcccatccctgggactttggggagcagcagtgaagtcttcagataattgccttacctccacctccagtggcctcccaaatttgaagccttcagagaagaatgccggctcctgaacgccccacctgttccaccccgaagcgcaaagcctttgtccaccagtccctccatccctcctcgcacagtcaagccagcgcggcaacagactcgctctcccagccccaccttgtcctactattcttcagggctacacaacatcagcgtcactaaaactgacacaaatccttctgaaagcactcctgtttcctggctatccatgtaaccgagtgaaaactgattctgtgggacctgaaatccccgtttggtaagtccttctggctgaagctgtgtcctctcggctctcatggcctaaccattattcaggagcatcagaaagccagaccaggagtgacttcctgctggatccaagcaggagttatagttacccttagacaaaagacgccaggcacaccaaagagaaactgcccagcacccttttgattttgatgggctgtgagctcctggccagccccactagcccagtcacttcagaattcagtagcagcgtctctggttgtcccaagttcagccagctactctctggagagcacagatgtgaaatctcttgcagctggtgtgacaaagcagagtacgtcatgcccctgcctttaccccccagggctcccaaaaactagtggaagagaaggtcgcctccgaaacatctcctttgcctctgaaaattgatggtgctgaggaagaccccaagtctgggtcaccagatctctcggaggaccagtattttgttaaaaagggcatgcaggacatcttctctgcctcctaccctttctcatctccgctccatctccagctggcccccagatcctgtggcgacggttcccccccagggcagcccaccctgcctgacccctatccaggacctcccctatagagggaagtgtcccaagtccacctacggttccattggtttggtcccgaagatgtccatatccattcctttgttaactgaaaagattgatgggaaccctgccttgttccagcctaacggaagaaatccctctcagaggatttcaaattgagcaaattgccaggtgaagaagataatgcaattcattaatggctggaggcccaaaatatagccaaataacccccggccagcatggacacacactctgatcactgcgtgtgctagaraggggtgggctgggacacaatttcatgtttttgcactaaaaaccttctctgtaaatagggataagagaaactcttactatgcagattacgtttttgaatggtgaacaggctattttgtacatcaataaaaatgctgtacagaacacttggaggtgtgccttgtacgtcactcaacaaacactcagcagctgctaaaaggaaaaaaggcatgtgcagagaaatcattcttacccaagtaggtttatgtgagaaggtatgatatttattacaaaatagccaaagctgaaagacataaaaatcttt

SEQ ID NO: 141813 - DNA, 168 bp, Homo sapiens
aggaaaggcggggtgctggcccagatcaagagccagaaagtgcaggacatcctcgccttctatctgggccgcctggagaccaccaacgaggtgattgacagtgacttcgagaccaggaacttctggatcggaaccctgggccatggcggctgccagcagatggcaagg

SEQ ID NO: 141814 - DNA, 1934 bp, Homo sapiens
tgcttggcacgaggcaggaggctgtctggacacactgattactcactcaccagcctttttcttttgtccaccaacccagcctgactcctggagattgtgaatagctccatccagcctgagaaacaagccgggtggctgagccaggctgtgcacggagcgcctgacgggcccaacaggcccatgctgcatccagagacctcccctggccgggggcatctcctggctgtgctcctggccctccttggcaccgcctgggcagaggtgtggccaccccagctgcaggagcaggctccgatggccggagccctgaacaggaaggagagtttcttgctcctctccctgcacaaccgcctgcgcagctgggtccagccccctgcggctgacatgcggaggctggactggagtgacagcctggcccagctggctcaagccagggcagccctctgtggaaccccaaccccgagcctggcgtccggcctgtggcgcaccctgcaagtgggctggaacatgcagctgctacccgcgggcttggtgtcctttgtcgaagtggtcagcctatggtttgcagaggggcagcggtacagccacgcggcaggagagtgtgctcgcaacgccacctgcacccactacacgcagctcgtgtgggccacctcaagccagctgggctgtgggcggcacctgtgctctgcaggccaggcagcgatagaagcctttgtctgtgcctactcccccagaggcaactgggaggtcaacgggaagacaatcgtcccctataagaagggtgcctggtgttcgctctgcacagccagtgtctcaggctgcttcaaagcctgggaccatgcaggggggctctgtgaggtccccaggaatccttgtcgcatgagctgccagaaccatggacgtctcaacatcagcacctgccactgccactgtccccctggctacacgggcagatactgccaagtgaggtgcagcctgcagtgtgtgcacggccggttccgggaggaggagtgctcgtgcgtctgtgacatcggctacgggggagcccagtgtgccaccaatgtgcattttcccttccacacctgtgacctgaggatcgacggagactgcttcatggtgtcttcaagaggcagacacctattacagagccaggatgaaatgtcagggtggggttacagaggaaaggcggggtgctggcccagatcaagagccagaaagtgcaggacatcctcgccttctatctgggctgcctggagaccaccaacgaggtgattgacagtgacttcgagaccaggaacttctggatcgggctcacctacaagaccgccaaggactccttccgctgggccacaggggagcaccaggccttcaccagttttgcctttgggcagcctgacaaccacgggtttggcaactgcgtggagctgcaggcttcagctgccttcaactggaacaaccagcgctgcaaaacccgaaaccgttacatctgccagtttgcccaggagcacattctcgcggtggggcccatgggtcctgatggcctgaccacatggctccctcgcctgccctgggagcaccggctctgcttacctgtctgcccacctgtctggaacaagggccaaggttaagatcacatgcctcatgtccaaagaaggtctcagactttgcacaatgccagaagttgggcagaaaaaggcagggaggccagttagggccagggagtgagtgttaaaaaaagctggggcccttcgcctgcttttgattgggaaaatgggcttcaattagatggcgaaggagaggaccccgccagtggtccaaaaaggctgcttttttccacctggcccagaccctgtggggcaacggagcttcccctttggcattaaacccccacgggttattaaatttatgaatcagctgaaaaaaaaaaaaaaaaa

SEQ ID NO: 141815 - DNA, 6258 bp, Homo sapiens
tcaaatttcctcgtctgaaagacaaggatcatcaccctcgtcctggctctggagagcatttgcagatgtaaaaatctctggctgatctaggatatagttgcgtttcttgcgggcagcaatctggatgaggcggttgaggcactgggtggcctgctggatcaggacatcccagcggccagcatagttccgctgccggcgtaggcccatcacccgcatcttatccatgatggcattggtacccaggatgttgtacttcttggaagggttggaggctgcatgtttgatggcccatgtggtcttgccagcagcaggcaggcccaccatcatcagaatctcacagtactggtatcgggattcaaaaagatcaggcttgtcagactctgagcacagtgcctcacattctgccttgctctttggtccaacggtgccccggatacgctcactaaggggaaggtgctggatgaaggtaaaccccgggaggacagaacagtagggctctgctctctgtccgaagttgaactccactgcgcaattcttcaccaggacatgaggatagagggcctgaccccccaaggcttccttctggattcggaaagcaatgcccatccactttccattcttggtaaaagacagttccacgtcatttccacattcaaaatccgcaaagcagccaatcacatcgttctctgcaaacttgtctccgtagttttcaaaccggctattggtggacttcttcccagtgcctccatagccataggagaaaggctcttcgcctagctgggtgctgcaggagtccagggaccagccgatacggaccacgtgggggtcaggctctgtagacggaaggtgcttcacggagatttcctcattgatcttcatctcgaagcatacacggccccttctgaccccatagctggcacgggctcctgaccacaggtatgcaaagccctcaattgtgagcggatagccactactccgatctcgggccaccttgaagtggaggtcgcagttataggtgtcaatagcaacaagggtatcatcaaagtcatcttcatcctcttcagcaggaggctgaggagagcggcccctcctatcctctcggtgctcaaagtacccccgtccccggttttcttcataaggcctctttcgactctggaattgctgcctgtctggcttgagttgagaagcttcaggcgggaggaagctggtgggtgctccttgcttcatctctgtcttcatttctggacgataggcctgctgctgctccatttccagtggtctcctctcgtagcctgactcgttttcttgtttgatgacttgggtatcgtagaattggttctgcctggtaatattgtccatggcataatgtccgtccggccccgagtagccgccgggctccgcgtgcggctgcagcccgggcggcggtggctgcgcggtcccctccagctcggagcccccctcggtctcgacctcctcgttgatgtgcccgggtcgccccggttcgtcgtcggcgtcgagctcccgctcgtcgtcaggctcctcggcctccaacgccgcctgcagccgctcagcaagctcggccttgaggcctcgagtgtccaggccgcggcgctgcagctcctcgcgaagttcgttcaccttcagacggcgcacatccatggcccgggcccccggggtggcccccgagcccggcccggcctcccagggctctgtcccccttaaacctttcctgacgtggaacgggcgctctgcacgcgaccatagagccttcccctcccgaaagacatccagaagttcaccgaccgctctcccgaatcctctaatcggctgttcccgtaaatcgggctgtctggcgtctccaccctcatccatgttgacatagaggatttcgtcaggctcctgggcaggaggcaaggccttcagtgtgttctccaaatcttcccgcagctctgtaaaacttggccggtcctggggatttagctcccagcaccgcgacatcaaggcatacagtccatccagacagtccgcaggctgcttcaggcgatttccctggcgcagatagtcataaatctcgctgttctccacgcccggatatggggtttggcctcttgtggcaatctcccacattgtcaccccgaaggaccacacatcgctcttgctggtgtagacacggtcagctagactctcaatggcaatccacttgactggcatcttggcgatacgtccctggcggtagtagtccccattgtagatcttcttggagagcccgaagtccgccacacacacggacatgttctcattcagcatgcagttcctggccgccaggtcccggtgtatgaatctcttggtactcagatactccatgccactggcgatgtctgccatgaacttcactagcatctgagtgggcaggtacactggctggtccccgagccgggaatagaggaggaagctgtgtaggtctccatgtttcatgaaaggtaagatgaccacaggtgctgggaagctctctcgttcagaaccctggaaacagacaccgatgagcctcatgacgttgggatggtcaaattccttcatgcagaccgcttcactcaggaaatcctccagctctgacctcgtgcagatggcaatcttcatcgtcttcacagccaccttgaggatggagtcgtcctggttgagctggccttccatcacagctccaaactctccctctcccagagtcttccccagggccaccttgtgccggtccaccatcacatcccgcagcttctccttcagctcttcactgatgcccaggctgttcaaggtagcttcagtggtccgacgactgtaggacttgcgcacgcggtacctgactaccagttcacctctttccactgttggttcaaacacttctccataacgggtctccttctttcgccggtggacaaggaagagagccaagatgaggacacaggcagcggccacgactgctcctagcagtacataccaccagggccacgagaaggcaggagttgaaggttccttcaccagctggtggactggctgtgcttgccctgggcgccaggcctccaggggtactgggaggctccagggtccatccccagcagcagtgtaggctgccacacacactgtcagattggacacagacccgtccccctgcagctccagggtcacctcttgccttagccctatgtccattagcacctctggggtgtcctggccttgatacgccagccggtaccctaacagggtaccctgcaggggcgcccggggctcttgccaatgcacgaaggcctggctcccattccgcgtagcactaatgttctcaggggggcccaggggcactccctccggcgtctccacaggaagccagtgggtccaggatgaggggccctggctgctggtgcatgccacgcggatgtgataaggggtgtgaggatggaggctgcctagccgaagctgatgggggggcacggatgcttgcgaggtgaggggctcctctggggggtctggttctcccgcctggatgcccatcccatcgtttgacagcacagcctgcagggtgcagtgggtcagggggtagatgccgctcaggcctggagtccaagccacctccagctccgtgggttggcgggagaccaggtggaggttacggggctgctgggggagcactgtgatggtggctgtgcgggatgtggtgacccccttggcgttatgggcttcgcaggagaaagaggatgtcttgttcagccctggcacgtggggccccgccagggtcagcgcgcgggagctggcgccgccggccggagaagccctggggctggaggtgggttctggagccgggtcccgttccgaccgcagcattcctgcccccgcgtgagtcaccgggggcacctccccaccccagcgcttccggccggcttcgggggcgcggagccagagccgggatcccccttcccaggccccaacggccgcacctggaacatgcaggctgcgctgggggccgtgacctggagccgtggccagggggacagcatcctggagccagagtaggtccacgggctctgggggtccctgagcttggcagctcaggttgaagggggtgttggcggccacagtcctgtcttcgggctcctccaggaagtaaggcaagccctccagcccaacatagccaggctgggacacgaaggtctgatgtcccagaaacaccaaacactggtactgtcccgtgtcggaaagctgcagggaggtgattctgagctggctgaccactatccagtcatcctgttcatcctcacccaggggcacctgggtctgggtgctgtccgcgagctccaggatctgtccatcccgaagccaatgtacctcggggggctctccctgaacctggagctgacaccgaagggtgcccgtgagtccccgggcacctgtgatattccctgggttgcccacgaagggactttcttcagcctgcgtgccccttccactgggtctagtggggactctgacgccgaacaggggctgtagatcagtgagtgtgtatgtgtgtgtggaggggcagcaggggccgctttccacgtggttacataagcacgtgttggggttgggcaggtgttcctccggtctgagggtcctcgtatgtccaaagtctctgtgcataatcgcagacccagatgtgtttgcatttggtagaatcagggtgcttaaaaaggggtgactgagggctgcagttgcagaggtggctggggactgtgcctctgtgggggcggcgtgtctcagtgggaagatactctggggagccaggacgatgtcgtacgtgggtagggtgggcttgaggctcagggtgtccggcgggcacgggctctccagggagaaggcttgtaggatggtggtgaagaagaggaagagctccgcttttgccaggccctctccaaggcagacacgcttccctaaggagaagggcaggaacgcctcatgcttcctgaaccgtccatctgcatccaggaaacggtctgggttgaactcttctgggtgcttgaagatgttggggtcatgcaggatggagccaaggagggggaagacctccgtgccctggggcagggtgtaccctcggaagcgggtggtccgcatgagggtgcggggtattcccatgggcaccagcgccagcagccgctgcgcctcatgcagaaccgcgtcggtgtaagggaggcgggtacggtcccctaggcttggtgcctggccagcccccagctcccgattcagctcctcacgtacccacttttggacatgagggtatttcatcaggagcaggagggtatagccgaccgtggtgctgaccgtcatcgtcccagcaaacagcaaataaatgactgtcatcagcatgttcttgttggtgaattctgtgcctgggttttgttcctcctgtgccatcttcagcaggaaggcatcgacaaggtcacgtgcggggcccgaagcatccaggttcccctggtgctgctgcacctgccggactgtgaaggcagccaaggtgctgacgtggtggaggagctgcttgtgggggcctggcaggggccgcaggaaccaggagaacatctcgtaggtctgacccccctgggagctgactcccagcagggtaccaccagctgcccggaccacggcctggaactccttatcctcataggagaagcggaggccaaagaggagggagcagactacgttggaggtggcctgggccagcagcagggagggatcgaatgggcgtccttctgtcccctggaatgtctccaccagacaccgggcctccgcctggatcagctcctcgccttctcgcttccccatgcccaggtcccgcagagcaagcatggtaaacttcctcagctgcctccaccgctccccgttggagaagaaaaccccatggccatcaaaagtcccttccagcatcgctacggttccccggccgctgaactcctcagcctgacctcccagggcctcccgcacagcctcctgcccaaccaggaccaccacaggccgccacggtcccaggtagatggtgaacaccggtccgtacttcttactcagccgcatgagccctgaatacagcgccccgggccgtagctgcaggaggtttcccagcagtggtagcggcgtgggcccggggggcaggtggcctcgggccctggtcccggacagcgccagcgtcagcagcaggagcagcgccagcgccagcagcagcgcccaggtgccggtcgcctccat

SEQ ID NO: 141816 - DNA, 1150 bp, Homo sapiens
cggaaccgaactgaggtccactcgctaggcctatcctatttgcctggaatttcccttctaggaacgcaggggtgttctttattttcatgctggcgaaggctcattaggcccctaagagagggccccttccccatctcaggactaaaatgcaatgaagatgttgctcagaggcagctgcagagggatgggcctgtggaggatgccccgcagagtgaagacgagatgatgcagccaccagggccgcaggggagggacattccactttttaaatcagctttctgaagcatgatctccatataatcacctagaagcgtacagcacaatgatcttgacagatgccagcatcctttggaccactgccaccaccaacgtctcaaaccattccatcaaacccagaacactcctggtgccctgaagcgtctcccttcagtggcagaaccagcagagattcagtggtcacaaggccgcacttaagacaccccagaggatgaacacgcacgtctttcgttcacagacgcagtctccagcctcaccccctgggccacccaccctcccccgctggactacagccttcccgtaccatccagaggccatggcctactttgtcaaccctccttgtgaagatcctcatcttcctgccatgcctgcccagccagactctagcctgcatcagccagacccactgctccctagtagcacgtctaaccaggaccaaccctgccagagagaggaagctggggtccccaactctgagctacccatcctgcagaggtgccgtagcacagctctggttatccggaacaaagaatttctccccacagccctggaagacctgctatggggcctctccaattgtaaagagattctgggaagaagctgctttctgttccttgagagtaggaaacctggagctcccatctgcaagtaccagcccaggcttggtggatggggcctgcctctcaatggcctctatgtatttctgagcccagttcccatcccccagaaagagaatgtgaacaaaacccaggcacagaagtcaccaacaagacatgctgatgacagtcatttatttgctgtttgctgggacgatgacggtagcaccacggtcggctataccctcctgctcctgatgaaataccctcatgccaaa

SEQ ID NO: 141817 - DNA, 717 bp, Homo sapiens
atgccctggaagcatattaaaaaacacagtcccactccagaccaactgaaccagaagcggcatttccataagatcccctggtgtttcgtgtgcacgttcaagatccagtcagatcatgcttctccagcatcaccttattgccagatccaatcagatcacgcctccttactccatgcttataaaacctgctccagcccccagctcagggagacagagtcagccacggtcaaccccaccgtgttctttgacatcgccgttgatggagagcccttaggccacgtgtccttcgagctgtttgcagataagtttccaaagtcagcagaaaaggttcatgctctgagcactggagagaaaggatttggttataagggttcctgctttcacagaattattccagggtttatgtgtcagggtggtgacttcacacgccataaagacaccggtggcaagtccctctacagggagaaatttgatgatgagaacttcatcctaaagcatacagggcctggcatcttgtccatggcaaatgctggacccaatacaaattgttcccagtgtttcatctgcactgccaagactgaggggttggatggcaagcacgtggtctttggcacggtgaaagaaggcatgaagattgtggaggccatggagtactttgggcccaggaatggcaagaccagcaaggagatcaccattgctgactgtgaacaactctaa

SEQ ID NO: 141818 - DNA, 558 bp, Homo sapiens
ccggcgcgcccacgcgtgcgcgaggagaaggagaaagaaagaaatgcttggggtaaatgttttaactagtcattcttcccaggagcggatgaagctgacttttaaaaagaaggctgtgaactttgcagatgctgctgccgcccagggccccctgcttccagccatggtcaaccccaccatgtttttccacattgctgtcgatggcgagcccttgggctgtgtctccttcgaggtaaggggcctggaaagcaagaagtgactgctcatctaatccataaaactatgttaacagattggagctgtttgcagacaaggttccaaagacagcagaaaatttccatgctctgagcactggagaaaaaggatttggttataagggttcctgctttcacagaattattccagggtttacgtgtcagagtggtgacttcacacgccatacagcattggtggcaagtccatctgcagggagaaatttgatgacaagaacttcatcctgaagcatacgggtcctggcatcttgtccatggcaaatgctggacccagcgtgaacgtttc

SEQ ID NO: 141819 - DNA, 951 bp, Homo sapiens
ggcacgagggacgccaccgccgaggaaaaccgtgtactattagccatggtcaaccccaccgtgttcttcgacattgccgtcgacggcgagcccttgggccgcgtctcctttgaggtaaggggcctggataccaagaagtgactgctcatctaatccataaagctatgttaacagattggaggtagtagcattttcattacaagtgactaaaagaacagctgtttacccctgatcgtgcagcagtgcttgctgttccttagaattttgccttctgtttgcagacaaggtcccaaagacagcagaaaattttcgtgctctgagcactggagagaaaggatttgggttataaggggttccctgctttcacaggaattattccagggtttatgctgtcaggggtggtgacttcacaccgccataaatggcacctggtggcaagtccatctatggggagaaaatttgaagatgagaacttcatccctaaagcatacgggtcctggcatcttgtcccatggcaaatgctggacccaacacaaatggttcccagtttttcatctgcactgccaagactgagtggttggatggcaagccttgtggtgtttggcaaaagtgaagaagggattgaatattgtggaggccatggagcgctttgggtccaggaatggcaagaccagcaagaagatcaccattgctgactgtggacaactcttaataagttttgacttgtgttttatccttaaccaccaagatcattccttctgtgctctcctctcaggagagcacccctctaccccatttgctcgcaggatcctaagaattttgtggctctcgctgcagttcctttggggttccatgttttccttgttccctcccatgcctagctggattgcagcagttaagtttatgattattgaaataaaaactaaataacaaaaaaaaagtcgacgcggg

SEQ ID NO: 141820 - DNA, 801 bp, Homo sapiens
gggacatctgaagaaagacatggcaatggagagtaccagcatctagagaaagacgtggtaatgctgggtacacgcagccttaacgctgactcctacttctactgttacctgcggtccctagtggcccagatcccggacacctgggctcccgcccaggatcctgcaggcccagggcggtcctggagcggaaagaatgccacgcggggcattcagaccctgtttgccggcgctgtatttcgctttcctgacctgccctactccagagcagagaatgagagttggttgttaaaaatctaccagtacacccccaagaaactcatcatcaccaatgacttcttcccaaatccagagtcacttttcagacttgagattgacctctcttcagcatatggactattgctggaacttttgggaaaagagaagcctggactcttcctggaaataaaagcatgctataaaggggattcttctagagtcgcaaatgcagttattcaagccctagttgtgatccttggagaagaggatcctcataccactgtgctaaagaggagaaatgaaaagattactgttgactgcacagttccaggggccaaggcagaagaaatcctggagaaaggtccaaaggagaaccagttcttcagcccaatgagcacctatcaagagtcacgcgtctacgttttggtcatagctggggagtgccccatctacatcctcatgcctgatcccgtccctgtccctgccccagccacattgacatcctcagcatccctgcctccatctccgtctccctcaggaacctaa

SEQ ID NO: 141821 - DNA, 625 bp, Homo sapiens
cccacgcgtccgcccacgcgtccgcccacgcgtccgatcatggcgcaggatcaaggtgaaaaggagaaccccatgcgggaacttcgcatccgcaaactctgtctcaacatctgtgttggggagagtggagacagactgacgcgagcagccaaggtgttggagcagctcacagggcagacccctgtgttttccaaagctatgatacactgtcagatcctttggcatccggagaaatgaaaagattgctgtccactgcacagttcgaggggccaaggcagaagaaatcttggagaagggtctaaaggtgcgggagtatgagttaagaaaaaacaacttctcagatactggaaactttggttttgggatgcaggatcacatcgatctgggtatcatatatgacccaagcattggtatctacggcctggacttctatgtggtgctgggtaggccaggtttcagcatcgcagacaagaagcgcaggacaggctgcattggggccaaacacagaatcagcaaagaggaggccatgcgctggttccagcagaagtatgatgggatcatccttcctggcaaataaattcccgtttctatccaaaagagcaataaaaagttttcagtgaaaaaa

SEQ ID NO: 141822 - DNA, 1698 bp, Homo sapiens
atggctctagcgcggccggtgcggctcttttccctcgtgactcggttgctcctggcgccgcgacggggcctcacggtccgcagtcccgacgaacccctgccggtggtgcgcatcccagtggctctacagcggcagttggaacagcggcagagcaggcggcggaacctcccgaggccggtgctggttcgacccggaccgctgctggtttcggcgcggcggccggagttgaaccagccggcgcgcctcacactgggccgttgggagcgcgcgccgctagcctctcaaggctggaagagtcgacgcgcgcgtcgggaccacttctccatcgagcgcgcgcaacaggaggcgccagcggtgcgaaagctctcgtctaagggcagctttgctgacctgggcctggagccccgtgtgctgcacgcactacaggaggctgcgcctgaagtcgttcagcccacaaccgtgcagtctagcaccatcccctcactacttcgcggccgccatgtcgtttgcgccgcagaaaccggcagtggcaagactctcagctacctcctgccgctgcttcaacggctcttgggccagccaagcctggactcccttcctatccccgcgccccgaggcctggtccttgttccttcccgagaattggcccaacaggtgcgggctgtggcccaacccttgggccgctccttgggcctgctggtgcgggacctggagggaggccacggcatgcgtaggatcaggctgcagctgtccagacagccttcagcagatgtgcttgtggccactccaggggctctgtggaaggccctgaaaagtcgactgatcagtctggagcaactctccttcttggtgttggatgaggcagacacactgctggatgaaagcttcctggaactggtggactacatcttagagaagaaggacctggctgtctttctgtaccatctgcgccttgaggccgaggtggaggtggtggagatgctgggtcctcacggccaaccctgtccccagcataacagtgacatctctgcatacacctacgagcggacgctgatgatggagcagcggtcgcagatgctgcggcagatgagactgaccaagactgagcgggagcgagaagcccagctggtcaaggatcggcactcggccctgcggctggagagcctgtactcggacgaggaagatgagtctgcagtgggggctgacaagatccagatgacgtggaccagggacaagtacatgactgagacctgggaccccagccatgcccctgacaatttccgggagctggtgcacattaagccggaccaatccaatgtgcggcgcatgcacactgctgtgaagctcaatgaagtcattgtcacgcgctcccacgacgcccgcctggttctcctaaacatgcctggcccacccaggaacagttggtgcacaactagtagccgaacagagaagcgacaatggaactgcccagccgtcagaaccgaaaaaaacgcacaaacccgacagacaataatcgccgaaacgaagacgcaaaaaaaagacaccgaaccaagaataccggaagcagacctagcggtgcagtatgacaaccactacaccaacaccaagtactgcttgtgccagatgctacgagaacagctggagtcgccccagggaaggttgctccatgctgcccagtcttcccgggaaatttggtaa

SEQ ID NO: 141823 - DNA, 621 bp, Homo sapiens
tcaggagttagtggggacagaatgggaattgactttataggtgttcaccaaaggcatctggaagaccaccctgttctgctctctttcacaggtgcggaagacaactcgatcatcaggggcgacaaagtccactgtgctgagcacctcctcggagcacgaacacggctgaggacatgtgtctgtgtacgtagtggcatatgcatgtgtaattgtgcttgtacaagtgtgtagctgggcgcccacgaggccatctctaagcctgtccaggctggtctggccgtagctgaaattgcgcaggttaacatcctgtagccctttctggtaaacctgccttaggaccaggggcaggtcgttgtggccgtccacgagcgggaagtcccgcatcagggcccgtgcctgctcttgcaggccctgggtgctgggactactgagtgtggtcgagggagcgtaggtgcccggcatggtgtgggctctgggggcgcccagcgtggtgagggctctgggggggcctggcgtggtgtaggcacaggttacaggctggagcagcagcagcaggagcagcagactcagcagaggccaccgaccaaacgtgccgggaccctcgaggccggagggctgcat

SEQ ID NO: 141824 - DNA, 1941 bp, Homo sapiens
atggcttacaccctcaactctagattgccaggctggagcctggccttgacctctgtaggcatggagaagctgctggtggccaggcccagcctgacatcaggtccccagctgccgaggaggctgctcttcgccaaccgccctctgtgccgcaggttctttctgatgtgctacctgttcgtgaacctcgcctgtgcggtgcagacactcctgaggacccccaactggcggccccggttcaagtactatcactgggcgctgtccttcctgggcatgagtctctgcctggcccttatgtttgtctcctcctggtactatgccctggtggccatgctcatcgccggcatgatctacaaatacatcgagtaccaaggggctgagaaggagtggggtgacgggatccgaggcctgtccctgagcgctgcccgctacgcgctgttgcggctggaggaggggcctcctcacaccaagaactggcggccgcagctgctggtgctgctgaagctggacgaggacctccacgtgaagtacccgcggctcctcaccttcgcctcccagctcaaggctggcaagggcctgaccattgttggttctgtcatccaggggagcttcttggagagctatggcgaggctcaggccgccgagcagaccatcaagaacatgatggaaattgagaaggtgaagggcttctgccaggtggtggtggccagcaaggtgcgggaggggctggcccacctcatccagtcctgtggcctgggaggcatgcggcataactccgtggtgctgggctggccctacggctggcgacagagcgaggacccccgtgcctggaagaccttcattgacaccgtgcgctgcactacggctgcccacctggccctgctcgtgcccaagaacatcgccttctaccccagcaaccacgagcgctacctggagggccacatagacgtgtggtggatcgtgcacgatggtggcatgctcatgcttctgcccttcctgctgcgccagcataagccattccaaaaattccagggcaggtctggacatgcctgccaggctgaagctgctcagacaccacctgagatccccagtaaatctgaatatggcctaggcctagggactgcctgtgagctacacaactgtgttcccaccagcaactgtgactgcaccagtggcagcggaggatctcatgaccacatccaacagtattcggacatagaggactttcgacaagccacggcagcctcttccgtgatggtggcccgagcagccatgtggaacccatctatcttcctcaaggagggtctgcggcccctggaggaggtcatgcagaaatacatcagatacggaggaatgggagctgccctgctgtcagaccctgacaagattgagaaggcacccagcatgggcaccctcatgggggtgtacctgccctgcctgcagaatatctttggggttatcctcttcctgcggctgacctggatggtgggcacagcaggtgtgctacaggccctcctcatcgtgcttatctgctgctgttgtaccctgctgacggccatctccatgagtgccatcgccaccaacggtgtggttccagggtacctgcacacactggtgcagaacctggtcaacaatggctacgtgcgggacgagactgtgcgcgccgccccctatgactggcggctggagcccggccagcaggaggagtactaccgcaagctcgcagggctggtggaggagatgcacgctgcctatgggaagcctgtcttcctcattggccacagcctcggctgtctacacttgctctatttcctgctgcgccagccccaggcctggaaggaccgctttattgatggcttcatctctcttggggctccctggggtggctccatcaagcccatgctggtcttggcctcagggagtggcaccagggcccagcactga

SEQ ID NO: 141825 - DNA, 1713 bp, Homo sapiens
atgcctgagcctcccaacccctccatgggctcctgtgcggccggagcctccccgtgtttgcataaatcaagacctgcagaggaggcagcagtagaaacagtttgctccaaggaccaaacttattctggccgcgagcccgggggcggcggcgccggcgccccgtcctcgccaaagacgagtttgaagtcgagctcgtcgtgggcgccacagtttgcagtagtcatcggcgtggccaagggtgctgcagctcctcctcaggcggcggcggcggcagcggcaagcggcggcagcagctcctcaacgccgcttcatgccgggccgcgcgggccaagaggtcgcgactccacggcaaactttccgggcggggcccgcgacgccgagcgttccgttccgaaagctggccgcgcgccgagcagcaccaggaaccgcagccgcccgccaccgatcctcagcactcttgttaaagggacacgcagacctgtgacctgcaagattcgcatcctgccatcgctagaagataccctgagccttgtgaagcggatagagaggactggcattgctgccatcgcagttcatgggagctctttgatatcttatgagtctggagggcaggcagaccctgaatgggcttttgcatttgcctttctttcattcatggagtgcctattgaggacctacattgccccaccagctgccattttttacccatcgggtgctcatgacacgtcgaatgccactttgaacaatatgcgtgtgtatgggaccattttcctgaccttcatgaccctggtggtgtttgtgggggtcaagtatgtgaacaaatttgcctcgctcttcctggcctgtgtgatcatctccatcctctccatctatgctgggggcataaagtctatatttgaccctcccgtgtttccggtatgcatgctgggcaacaggaccctgtcccgggaccagtttgacatctgtgccaagacagctgtagtggacaatgagacagtggccacccagctatggagtttcttctgccacagccccaaccttacgaccgactcctgtgacccctacttcatgctcaacaatgtgaccgagatccctggcatccccggggcagctgctggtgtgctccagggctgccccaaactacctggggtagtggggggcagctgtggtggtgacacagctacccctgcagaaaacctgtggagcgcctacctggagaagggtgacatcgtggagaagcatgggctgccctccgcagatgccccgagcctgaaggagagcctgcctctgtacgtggtcgctgacatcgccacatccttcaccgtgctggtcggcatcttcttcccttctgtaacagacttcagcagtgtggttctctttggtgcctgcattgagggtgtggttctccgggacaagtatggcgatggtgtcagcaggaacttggtggtgggcacactggcctggccttcaccctgggtcatcgtcatcggctccttcttttcaacgtgtggcgctggcctccagagcctcacaggggcaccacgcctattgcaggccattgccaaggacaacatcatccccttcctccgggtgtttggccacgggaaggtgaatggtgaacccacatgggcactcctcctgacggcactcatcgccgagctgggcatcctcatcgcctccctcgacatggtggcccccatcttatccatgtga

SEQ ID NO: 141826 - DNA, 2004 bp, Homo sapiens
ggaattcgaggctcagtacggtgtgtggagctggagcaccgtgaggaagaagcgaggttctttttaagagttcagctgcgagatatcaaacaaagaattactctgtacaaagccagaacacatatatcaaagtaatcctgaagtatcagaacaaaataataggctgtaacagaggaggaaatgattttgaatagcctctctctgtgttaccataataagctaatcctggccccaatggttcgggtagggactcttccaatgaggctgctggccctggattatggagcggacattgtttactgtgaggagctgatcgacctcaagatgattcagtgcaagagagttgttaatgaggtgctcagcacagtggactttgtcgcccctgatgatcgagttgtcttccgcacctgtgaaagagagcagaacagggtggtcttccagatggggacttcagacgcagagcgagcccttgctgtggccaagcttgtagaaaatgatgtggctggtattgatgtcaacatgggctgtccaaaacaatattccaccaagggaggaatgggagctgccctgctgtcagaccctgacaagattgagaagatcctcagcactcttgttaaagggacacgcagacctgtgacctgcaagattcgcatcctgccatcgctagaagataccctgagccttgtgaagcggatagagaggactggcattgctgccatcgcagttcatgggaggaagcgggaggagcgacctcagcatcctgtcagctgtgaagtcatcaaagccattgctgataccctctccattcctgtcatagccaacggaggatctcatgaccacatccaacagtattcggacatagaggactttcgacaagccacggcagcctcttccgtgatggtggcccgagcagccatgtggaacccatctatcttcctcaaggagggtctgcggcccctggaggaggtcatgcagaaatacatcagatacgcggtgcagtatgacaaccactacaccaacaccaagtactgcttgtgccagatgctacgagaacagctggagtcgccccagggaaggttgctccatgctgcccagtcttcccgggaaatttgtgaggcctttggccttggtgccttctatgaggagaccacacaggagctggatgcccagcaggccaggctctcagccaagacttcagagcagacaggggagccagctgaagatacctctggtgtcattaagatggctgtcaagtttgaccggagagcatacccagcccagatcacccctaagatgtgcctactagagtggtgccggagggagaagttggcacagcctgtgtatgaaacggttcaacgccctctagatcgcctgttctcctctattgtcaccgttgctgaacaaaagtatcagtctaccttgtgggacaagtccaagaaactggcggagcaggctgcagccatcgtctgtctgcggagccagggcctccctgagggtcggctgggtgaggagagcccttccttgcacaagcgaaagagggaggctcctgaccaagaccctgggggccccagagctcaggagctagcacaacctggggatctgtgcaagaagccctttgtggccttgggaagtggtgaagaaagccccctggaaggctggtgactactcttcctgccttagtcacccctcccatgggccctggtgctaaggtggctgtggatgccacagcatgaaccagatgccgttgaacagttttgctggtcttgcctggcagaagttagatggtcctggcaggggccatcagcctagagcatggacccaggggccgcccaggggtggatcctggcccctttggtggatctgagtgacagggtcaagttctctttgaaaacaggagcttttcaggtggtaactccccaacctgacattggtactgtgcaataaagacaccccctaccctcacccacggctggctgcttcagccttgggcatcttcataaatgg

SEQ ID NO: 141827 - DNA, 421 bp, Homo sapiens
  misc_feature (1)...(421): n = a,t,c or g
ttttgccacagctgcagcggggtgaggcagaccactttccgactgctcatcaaccgacctccctggggccgagaggcaagccgggtccgcgcggggtgcagcgccacctgctggaattcatgcgatggagcagcagcctggagtggctgcggagtccagaagtcctgtccttgaggtttgctttcagacaacggccagtcctgaatgagaaatggcaaagggatattctgcttgcagtcttttgccctctggcaaaaactttccagacagggtgtcatcgtgtgcagcttccgtgatgcagtttgatcatgtgaagcagagctgggtgccagcttgtcatggcctggactgttggctctctctgtgatcccacnnnnnnnnnnnnnnnnnnnnnnnnnnnnnnnnnnnnnnnnnnnnnnnn

SEQ ID NO: 141828 - DNA, 447 bp, Homo sapiens; identical to SEQ ID NO: 137740

SEQ ID NO: 141829 - DNA, 440 bp, Homo sapiens
aaaggccagatgctgttcctgcccggtctttggagatgaaaaggtttcccatgcccccacctcctcccgagttaattctctccaggtgcttctcttgatgtaaacccagggtgctataagcaggctccttcttgttctcttgctcaaatcctttccaacctatccaacctgtggagctctgctgtttctaatttctaacccccatcttgtttctttcccccaatattgaattctgccataatcttcagatcaactctagttgtctccattttttttctgaatgctaaaaccttccagccgtcttctcttccactccctgaccactcacgagtcacctgcatttcttaccccagtcgtcatccttgtttccatgaacgatcctctccagggcttcctgccagaaaagtaatttgcaagtttcatttgaatttctacacagt

SEQ ID NO: 141830 - DNA, 379 bp, Homo sapiens
acaaagacaggcttcctttatcatctccagagcctggtttgtggtgtgcaattagcatacactgtgtgtcctgtaaggacggctgttggacaaagcaggaataccacatctccatttccttccggtggcttgggatgtcagcattgaagacgatcaccactccatgagcatccttcatcagggccggccagcaggactcaaaccgagccttagctgccttcccgcggggcagggctcgggacctgcagcccgctatgcctgagcctcccacccactccatgggctcctgtgcagcccgagcctccccgacgagcaccaccccctgctccagggcgctcagtcccatcgaccacccaagggctgagaagtgcgagcgcat

SEQ ID NO: 141831 - DNA, 444 bp, Homo sapiens; identical to SEQ ID NO: 116839

SEQ ID NO: 141832 - DNA, 591 bp, Homo sapiens
ctgatagagtccagacggttcctcattagcagaagcaggcagaggaggcagctctggctgcccctgggagtggctcatgtgatgtatggagtcacttttggcgatctgtccagaacacaaacattcccgagttcctatgaaaagcattgcatagtgagaggtgacagcgtgctggcagtcctcacagccctcgctcgctctcggcgcctcctctgcctgggctcccactttggcggcacttgaggagcccttcagcccaccgctgcactgtgagagctcctttctgggctgggcaaggccgaagccggctccctcagcttgcaggcaggtgtggagggagaggcgcgagcgggaacccgggctgcgcacggcgcttgcgggccagctggagttccgggtgggcgtgggcttggcgggccccgcactgggagcagccagctggccctgccggccccgggcaatgaggggcttagcaccccggccagcggcagaaggaagaaactccgaacacatccgagcatcagaaggaacaaactccagacgcgctaccttaagagctgtaacactcaccgcgagggcccacggcttcat

SEQ ID NO: 141833 - DNA, 1608 bp, Homo sapiens; identical to SEQ ID NO: 120299

SEQ ID NO: 141834 - DNA, 1972 bp, Homo sapiens
gcaattgtggcttgtgtttgaactgaacgatgaagaaagatctcaggcagttttgagtcagccttcaggttcctcagaaactttaaacacaggaatcaatgaggtcactgaggtcaggaactctaggcgcccctgcctcatgcttggagcatcaacttctggagcacctcctctgcctgggctcccactttggcggcacttgaggagcccttcagcccaccgctgcactgtgggagcccctttctgggctggccaaggccgaagccggctccctcagcttgcagggaggtgtggagggagaggcgcgagcgggaaccggggctttgcaggcggcgcttgcgggccagctggagttccgggtgggcgtgggcttggcgggccctgcactccgagcagccgagtggccctgccggccccgggcaatgaggggcttagcacccgggccagcggctgcggagggtgtactgggtcccctagcagtgccggcccaccggcgctgcgctcgatttctcgccaggccttagctgccttcccgccgggaagggctcgggacctgcagcccgctatgcctgagactcccacccactccatgggctcctgtgcggctgagcctccccgacgagcgccgccccctgctccagggcgcccagtcccatcgaccacccaagggctgaggagtgcgggtgcacggtgtgggactggcgggcagttccacctgcagcccaggtgcgggatccactgggtgaagccagctgggctcctgagtctggtggggacgtggagaacctttatgtctagctcagggactgtaaatacaccaatctacactctgtatctagctactctggtggggccttggagaacctttatgtctagctcagggattgtaaatgcacgaatgtgcactctctatctagctcaaggatcaaactgcatcacggaagctgcacacgatgacaccctgtctggaaagtttttgccagagggcaaaagactgcaagcagaatatccctttgccatttctcatccaggagcaggccaggccacccttctggacacagtctatcccacgtggggacagactggccagccccagcccgtgggtctcaacgcggccagagctgctgtgagaaatcttgtttgttttagcctttggagtcctgtctgttctctgacctctgacccagaactgtgtgttccaaccacttcccagtctgttgtcctggctcaaaacaaagtgaacgaaagctctttcctcaagccctgctctcatactccagggctctgtgaaaatgagtggtatgggcacatggctgtcaggactggccgttgtctgaaagcaaacctcaaggacaggacttctggactccgcatccacttcaggctgctgctccatcgcatgaattccagcagaattatactgtgtagaaattcaaatgaaacttgcaaaatacttttctggcaggaagccctggagaggatcgttcatggaaacaaggatgacgactgggtgacttacacagaagccctgatgcccctgataaaactgatgaccatcgaatggaaagaactgaatctccctaaaccccacgtctgcggcaaagtcttcgtggtgaaacagatgacaaatccggatgtttctattgcatggttgttatttgccacatgcttcctggacaagtttctaggtaaccttaatgtctgtgcttctggggaaggaggagtagaaaataactcacctcttcaacaaatgtctgagggaactatacctgctttgataagggttgagtcaaaagtagatgaaggaactgctatgaatagaaaaaaggaaactcaagctgctggtaagaactatagactctgggaaatgacattaataatatgcagcagctacttaaaggttcagaagagtgagcagaagcatatggatcttgacgagaaatccatgcttggaggaggcaagggaaattaa

SEQ ID NO: 141835 - DNA, 3822 bp, Homo sapiens
atgactgtatttgaagataaggcctttggaaggataggagccagaagcgctggtgcaagtcaagccttcatcgacattttgaccacacacgtaatgggtttttcagctggaagtctgacgatccagccagccagtgcttctcagcccccttgcagtaagaagcagccagtgggagctcagatgaggcaggaatctagctcccgtaggcctgacagtacctcaggcagcgattcgcgaagggccatctgcagatttttgagggtccctgaatccaatttaggaaggtatgaagtcaaaactcttcgtaacaatagtaagacgtttgcctttgtcactgtgttgatatttgtactgatgcccttggctgcaagtaaggcaggggctgtcgagttggcagctgagtgtgcagctaagaagaaaaggagaacgggctctgagagggctcgggacctgcagtctgccatgcctgagcctcccacccactccatgggctcctgtgtggcccgagcctccccgacgagctccaccccctgctccacggcgcccagtcccatcgaccacccaagggctgaggaatgcgagcgcatggcgcaggactggcaggcagctccacctgcagccccggtgcgggatccactaggtgaagccagctgggctcctgagtctggaactaacatttccattacacctggaaatgccacatttgtgacccgggtgcagggacaggcttggtttgcctcatgtatcactggtcatgatatgtctagtttaaaaacttccagtgtcgtggtattaaggagacaatctgaggcacttctaccagccaatttgacatgcaattggcaagattcttctgcccttgccaccttagaaagtgccctgtcccaggtcagacacaaaagattcacatttacacttatggtctttacaggctcagccatagacattatggcaactgttagcattgctgttgtatctattactgaatcagtacaaacaactgcttttgtagataatctggccaaaaatatatgtgatgaacttctcctacaggacatggatgaagctggaaaccaacattctcagcaaaataacacaagaacagaaaaccaaacaccacatgttctcactcataagtgggagttgaacaatgagaacatacggatacagggaggggaacattacatactggggcctgttggtggcaggttgccaacatccaaactcgctgttgattgccagctcctgctccttgcagcagcccagcatgctctctgctggtgccaaaatacccttccaccaaaccccgctaacttctggaactgtcctagagggtttcctaccctagcaagtgagcttgcctatgtcagccctaaccttgctcttgtcattcagctgagccagaggaaaaaatttgagctattctggggtggtctacagagaaccatcttctttcccttcagtgttctcagaatattgactgttgatgaacaagccaatgatgtgagtgtggctgcagcaaggacccttcaaattttcagagatgacatgattgtatatctagaaaaccccattgtctcagcccaaaatctccttaagctgataagcaacttcagcaaaatctcaggatacaaaatcaatgtacaaaaatcacaagcattcttatacaccaacaacagacaaacagagagccaaatcatgagtgaactcccattcacaactgcttcaaagagaataaaatacctaggaatccaacttacaagggatgtgaaggacctcttcaaggagaactacaaatcactgctcaaggaaataaaagaggatacaaacaaatggaagaacattccatgctcatgggtaggaaaaatcaatatcgtgaaaatggccatactgcccaaggtaatttacagattcagtgccatccccatcaagctaccaatgactttcttcacagaattggaaaaaactactttaaagttcatatggaaccaaaaaagagcccacactgccaagtcaatcctaagtcaaaagaacaaagctggaggcatcacactacctgacttcaaactatactacaaggctacagtaaccaaaacagcatggtactggtaccaaaacagagatatagatcaatggaacagaacagagccctcagaaataacgctgcttatctacaactatctgatctttgacaaacctgagaaaaacaagcaatggggaaaggattccctatttaataaatggtgctgggaaaactggctagccatatgtaggaagctgaaactggatcccttccttataccttatacaaaaatcaattcaagatggattaaagacttaaatgttagacctaaaaccataaaaaccctagaagaaaacctaggcattaccattcaggacataggcatgggcaaggacttcttgtctaaaacaccaaaagcaatggcaacaaaagacaaaattgacaaatgggatctgattaaactaaagagcttctgcacagcaaaagagcttctgcacagcaaaagaaactaccatcagagtgaacaggcaacttacaaaatgggagaaatattaaaccttcttaatttatctggcaattcagagatttctttttcaactgcaaccattgctgaggatctgggatttttgccctggtgtaccagaagaatcggatcacacctgggcttggagaatgagtgccaggttttactgagtggaagtagctctcagcagatgaaggagccagaagggagatggagtgggaaggtttcccctggagtcgggcctctcagcagctggactcttctccaactgccctggccaaactccgcattgttctgccggtggatggcctgcctgagtgctgggtcttcgggtttttatacgcacaggatcggggtatggtgggccaggggtgtcttggaaaatgcaacgtttgggcacaaaggcaagagtgcctgtcctcacctaagtccgtgggcctatgcccgagggacacaatatccttttttcaagcctgttctttggaagacgagttctcattatagttgcatggtaacaccaatccctggtaacaccagagtaaatggtcagtgccataaggctatgtctgggcagtttaactgcagtctcatgctgtaccaaacatcacgcactttgaccatcaatcaggtcctgcaactgattacctcaggcaatgaggggcttagtacacgggccagcggctgcggagggtgtactgggtcccccagcagtgccagcccacctgcgctgcgctggatttctcaccaagccttagctgccttcccgcggggcagggctcaggacctacagccagccatgcctgagcctcccacccactccatgggctcctgtgcagcccgagcctccccaatgagcgcctccccctgctccacggcgcccagtcccatcgaccacccaagggctgaggagtgccggcggacgacacctggactggcaggcagctccacctgcagccccggtgcgggatccactgggtgaagccagctgggctcctgaatctggtggggaagtggagaacctttatgtctagctcagggattgtcttgaagtcagtgagaccaagaacccaccaattccggacacaagagcagagcagacggcatcagctggagcctggaagggcagtcatgccctgtgtttctgggacaaacgtcccttcacagatagagttttgctcatctccccgctgctggtggagcaggggccaggtgaaggggacctggagagaggggcggctgcgtagctgggacagccccaagctgtcaaacccaagct

SEQ ID NO: 141836 - DNA, 439 bp, Homo sapiens; identical to SEQ ID NO: 132756
  misc_feature (1)...(439): n = a,t,c or g

SEQ ID NO: 141837 - DNA, 381 bp, Homo sapiens; identical to SEQ ID NO: 119823

SEQ ID NO: 141838 - DNA, 357 bp, Homo sapiens; identical to SEQ ID NO: 114504

SEQ ID NO: 141839 - DNA, 534 bp, Homo sapiens; identical to SEQ ID NO: 129830

SEQ ID NO: 141840 - DNA, 1685 bp, Homo sapiens
atggtctccactctgctaaagatcaattctgagaaggaagagttcacaatgtaccctaagataattcataaactgaagatggaagaagaactgtctgagtccccccaggatgtcataacaaaggtgatggaagccctagatgcagcaggcagcctgctctgtgggagagactcagcccccctgcacccaggtgaaataaacagctttattgctcacacaaagcctgtttggtggtctcttcacacggactcacatgaaatttggtgccgtgactcggatcgggggacctcccttgggggatcaatcccctgtcctcctgctctttgctccgtgaaaaagatccacttacgatctcagggcctcagacccaccagcccaaggaacatctcaccaattttaaatcaggaccccactgaaaatcggactgttcaactgcacctggcagccactcccagagcccctggaactctggcccaaggcgctctgactgactccttcccagatcttctcagcttagcagctgaagactgacactgcccgatcacctcggaagccccgtagaccatcacggacgccgagcttccggtaactctcacagtggaagactcagcccgcctgcacccaggtgaaataaacggccatgttgctcacacaaagcctgtttggtggtctcttcacacggacgcgtgtgaaatttggtgccaagacccgggacttggatcaggggacttcccttgggagatcactcccctgtcctcctactctttgctccatgagaaagatccacctacgacctcaggtcctcagaccgaccagcccaagaaacatctcaccaatttcaaatccaagacaaaggagacaggttttatccatggacccaaaactccggcaccggtcacggactgggaaggcagccttcccttggtgtttaatcattgcagggacacctctctgattattcacccatgtttcaagggtgtcagaccacgcagggatgcctgccttggtccttcacccttagcggcaagtcccgcttttctggagaaggggcaagatttaattaacctcgccttcaaggtgtacaataatagaaaaaagttgcaattccttgcctccactgtgagacaaaccgcagccacatctccagcacacaagaacttccaaatgcctgaaccgcagcggccaggcgttcctccagaacctcctcccacaggagcttgctacatgtgccggaaatctggccactgggccaaggaatgcccgcagcccgggattcctcctaagccgcgtcccatctgtgtaggaccccaccgaaaatcggactgttcaacttacctggcagccactcccagagcccctggaaatctggcccaaggctctctgactgactccttcccagatcttctcggcttagcagctgaagactgacactgcacgatcgcctcggaagccccctagaccattcacggacgccgagcttcgcgtaactctcacagtggaagcccctggcccacagcctggtaccctggagctccataaatacctgttgagtgaatgagaggatgaaggcttctgcagagagagagtggaagaaaagtggcgtcttttgacttcggacttggctttccttgcagaggcctcagggaggaacaacacggaaacaaagatggccttgtcctgggccc

SEQ ID NO: 141841 - DNA, 407 bp, Homo sapiens
  misc_feature (1)...(407): n = a,t,c or g
gccacctgaatgtagttgtttgttggtcttgcagcnccgtcctgcccgggacaccagccgcccacccctgaggctgcctgtgggcctctggcttttcctgtcctgcagggggatgggaaagatctggggccacgacttcctctgaggccccgcccagcggcaatgctggcattgttgtgaagtccaccctgtgtgcacacagcatccctgccctgggcccgctggttgccagtagtaannnnnnnnnnnnnnnnnnnnnnnnnnnnnnnnnnnnnnnnnnnnnnnnnnnnnnnacagtcaccctgggggacggctgctggtgagcgctcacagatgtgtgtccatagcagctgactctcctttgcatctcctccccgaggacgcagtggcaggcaggccacgcccct

SEQ ID NO: 141842 - DNA, 423 bp, Homo sapiens
  misc_feature (1)...(423): n = a,t,c or g
cctgaacacctgaatgtacttgtctgttggtcttgcagccccgacctgcccgggacaccagccgcccacccctgaggctgcctgtgggcctctggcttttcctgtcctgcagggggatgggaaagatctggggccacgacttcctctgaggccccgcccagcggcaatgctggcattgttgagaagtccaccctgtgtgcacacagcatccctgccctgggcccgctggttgccagtagtaannnnnnnnnnnnnnnnnnnnnnnnnnnnnnnnnnnnnnnnnnnnnnnnnnnnnnnnnngtcaccctgggggacggctgctggtgagcgctcacagatgtgtgtccatagcagctgactctcctttgcatctcctccccgaggacgcagtggcaggcaggccacgcccctccgtgtgtaaga

SEQ ID NO: 141843 - DNA, 2673 bp, Homo sapiens
tcttgcccctcggtcgctgttccccgtcgccggcgccccgctctacgttgtcgggcgccgccatggagcccgcgcctcgctggctggcggggctgcgcttcgacaaccgcgccctgcgcgccctgcccgtggaggcgccgccgcccggtcccgagggcgccccgtccgcgccgcggcccgtgcccggggcctgcttcacccgcgtgcagcccaccccgctgcggcagccgcgcctcgtggcgctgtcagagcccgcgctggcgttgctgggcctgggcgcgccgcccgcgcgcgaggccgaggccgaggccgcgctgttcttcagcggcaacgcgctcctgccgggcgccgagcccgccgcgcactgctactgcggccaccaattcggccagttcgccgggcagctgggcgacggcgccgccatgtacctgggcgaggtgtgcacggcgaccggcgagcgctgggagctgcagctcaagggcgccgggcccacgcccttctccaggtgggccggggcgggcgaggggcgcgggtgggtcctccccgccggggcgtgcagcgaagccatgttccacctgggagtccccaccacacgggccggcgcctgcgtcacgtccgagtccacggtggtgcgcgacgtgttctatgatggtaatcccaaatatgaacaatgcacggttgtgttgcgtgtagcttccactttcataaggtaatgccgggggcctttcggcctgtctacacgcacttgcttagagtccgcaccagcagggggctccagggccacgggcaccagagaagggtccctgcctggtgcttctgggggggagggggtccctgagcctgaggctggggacagtgtccagagctgtttgctggagtttatgacaaggaactacttagacttgactgaggaaatggccactgaagaagcaggagccgcaagctgtgcgcggtgtcctgctcaggctttctgatctgatggtccagttgctcgcggcaatgctggcattgttgtgaagtccaccctgtgtgcacacagcatccctgccctgggcccgctggttgccagtagtaaccccagttgtgacaacgaaaaatgtgtccagaccttgcctgatgtcccctggggggcagtcaccctgggggacggctgctggtgagcgctcacagatgtgtgtccatagcagctgactctcctttgcatcgcaggccccagcgtggggaggaacgacattcgagtgcagctgctcgactatgtcatcagctccttttaccccgagatccaggctgctcatgccagcgacagcgtgcagagaaatgctgccttcttccgggagggtcagtgggccgcacgccacccctccctgcgggtggatgctgggtgtcctctgccacggcgtgctcaacaccgacaacatgagcatcctggggctcaccatcgactacgggccctttggcttcctggacaggtaagtggccctggggcccagcaaagtgcaggccccagggctggggggtgcgtacagcaagcagcccgaggtgtgcaggtggaacctgcggaagctggccgaggccctgcagccggaactgcccctggagctgggggaggccatcctggccgaggagtttgacgccgagttccaaaggcactacctgcagaagatgcgcaggaagctgggcctcgtgcaggtggagctggaggaagacggggcgctggtgtccaagctcctggagaccatgcatctgaccggtgagtgacccagccgtgcccacagcaaggcgcctcccgtgctgttgtggctagagtcgccaggcctggcggaattcctggccaggctgatggagcagtgtgcctccctggaggagctgaggctggccttccggccccagatggatccccggtgggtactcagttcctacttctttggatttgtttccagaaaaggaagcgcgcttatgggcacccgggcaggcatcgccagggagctggagcgtgtggagcagcagtctcggctggagcagctgagtgcggcagagctgcagagcaggaaccagggccactgggctgactggctacaggcgtacaggtgagccctgcgtccatggtcaccgggggacggcgggtcgcgtgctggacaggctgagcacgtgcgcgtgatgcacgccaacaacccgaagtacgtgctgaggaactacatcgcgcagaatgccatcgaggctgccgagcgcggggacttctcagaggcaagcacacgcctgtccctgtggtccctgggaggggggtcggccccagacccctctcaccctcctgatcctccaggtgcggcgggtgctgaaactactggagaccccttaccactgcgaggcggcagcagtaagcccccgctctgggcagcagaactgtgcgtgacatgatcttcgtaacggcctcggcacgctccacacccctggagtctcccgaggcccccatgtgctgctgagtggccaagatgatgccaggctgccctatacactgggggattctgccctggcccatgcacacccgtctttccatgatggcagagacatccagtcaggacctgacccgtctctgtctgaggccggctcagcagtgcagcctggtccctgggggctggacccaggctcctaaataaaccagcaactccctcgaaa

SEQ ID NO: 141844 - DNA, 1071 bp, Homo sapiens
ttttccgatatgcttcgtgatctgctcaagaacgttgatcttaaagggttccaccctcatgtaggtattttggttaccaaatacagcaatagtaacggccccccctcacagtggatggaggagcaaaaaaaggatgcctggggaagcatggttctaaaaaatgttgtacgtgaaacggatgaagttggtaaagcaagtcagaagcagaaggcttggttgctgccagccaggcaagggacagcctccagcagagtccacccacccacagttgtctccttagaacaaacagaaagtttcacacgcacactttgttcagttctgcagcttaccagttttcccatcttcaaaacaggagagaaaattggcgggcactttgcagggctgctgggaggaggagaaatggagcaggcccggacacctgtctgcagcatggataagtatgacgacctgggcctggaggccagtaaattcatcgaggacctgaacatgtatgaggcctctaaggatgggctcttccgagtggacaagggtgcaggcaacaaccccgagtttgaggaaactcgcagggtgttcgccaccaagatggccaaaatccacctccagcagcagcagcagcagctcctgcaggaggagactctgcccagggggagtagaggccctgtcaatggagggggccgccatgggcccacaggcccgccagctggcgaggatgacggggcagaactgaaaagtgaataccacgacgatttccggcagtttctacacatatattcgcaagatgtggcgtgttacggtgaaaacctggcctatttccctaaagggtttattgagaatatgtttttcgtctcagccaatccctgggtgagtttcaccagttttgatttaaacgtggccaatatggacaactttttcgcccccgttttcaccatgggcaaatattatacgcaaggcgacaaggtgctgatgccgctggcgattcaggttcatcatgccgtttgtgatggcttccatgtcggcagaatgcttaatgaattacaacagtactgcgatgagtggcagggcggggcgtaa

SEQ ID NO: 141845 - DNA, 527 bp, Homo sapiens
ccaggtgggaccagccgtgggggcagaggcactgggccgactgtgatggggtgtcagagatgggacagggacagtgggcaggagtgtgggtgcatgggcacgtcggcagggtcccctcaccttccccctggagccctttctccctgagatcccctccctccagggcctccccctgccacacgctggagagggctgaggcctgtgggtgtgtgtccacagtcttctggaagtactactatgggcattacttggacgactatcacacaaaaaggacttcatcccttgtcagcctgtcaggcctcggcgccagcctcaacgccagcctccacactgccctcaacgccagcttcctcgccagccccacggagctgccctcggccacacactcaggccaggcgaccgccgtgctcagcctcctcatcatgctgggcacgctctggctgggctacaccctctaccaattcgggggtccttctagagtcgacccagcggcgcattctagtctcgaccttgctacttccatttaa

SEQ ID NO: 141846 - DNA, 1912 bp, Homo sapiens
atcacaagagaagcagacaagggaaccaacactaactgtaggcagcaggaacaggctaaatatagcaaccagaagacaggaaagacgcccagtctttcttgagcagatgggtgaacaagaagtgggaagtaaaggaaacggaaagtctcaaggagaaaaagtggaaaggccacggatgttcggaggaagctgtggtgtacacaagggcaaaacacatacacggcctagaggcctaggagggaagaatggttttgtgggctgggcccagggccctgctaccctgcacaaacctgggacactgctccttgtatcccagttgcttctgttccatccatggctaaaagggcctaagatatcgcaggctgttgctccagagggtgcaacccataaaccttggcagctttcacatagtgttaagcctgtgggtgttgagaggacaagagttgaggcttgggaacctccacctagatttcagaggatgtatggaaactgctggatggtggaagttggctatagggctgagccctcatggagaacctctactagggcagtgcagaggggaaatgtgggattggagcctccacacagagtctccgctggggcactgcctagtggagttgtgacaagagggccactgtcctccagaccccagaatggtagatctattgacagcttgtactgtgtgcctggaaatgccacagtcactaaatgccagcttgtgaaagcagctgagggggctgtaccctgcagagccccaagcagggagatccccaaggccttggaagcccaccccttgcatgagtgttgtctggatgtgagacatggagtcaaaggagatcattttggagctttaagatttaatgactgccctgctgggtttcagacttacatggggcctgtagcccctttgttttggctgatttctccctttcagaatgggcatatttacccagtcctcttctttgccttccgccaagattgtaaatttcctgaggcctccccagccatgcttcctgtacagcctgaagaactcaaaaacctgaagaaggtgaagtacccgctttgcagcaaatatgcaagaacagcaagtgctaaggccctaatgcaggatcttcggtgttcaaggagatcacaaagtgaccgtaactttattaaattaatgtcaaatggtgacaattcactgggcatagaagttttagggtactccagatacattgtgcatcctcctgtggttgtaaggttacttactagttttcaaagctactgtagagctcgaaagagggtgacaggaatagggtggacaactctagaggactaccccagccccagagggttccagcagcaactgcaaagcggtcggtttagctctctccctgccagtgttgcttctttcactccccagggactggaggctgggaaattctggacagaagagggcaggtccctggtgagggacccacccttgagcctggagctgtggcccaaacatccctgttttcccgctggaaagttgccttttccaaaaccacccacggcctgccccactcctcatcccatgccaataaaaaaccctatacccataaaaaccccaggttctgccagcagagaggggagaggaagagaagaggagaagcagctagacattggagactatggtttgacgtcaaagagaagcagcttgacttcagagggatggtttgatggtgtcgctttggaaagccggactccaggggaagatcatcttcctgctccatccccttctcagctccccttcccactgagagccactttcatcagcaataaaatcttctgcattcatcacctttcaattcagccgtgcgacctgatttttccagatgccaaaaaagagcttggacaccaagcgtgtggatgcaaaaggctgtcacactga

SEQ ID NO: 141847 - DNA, 1050 bp, Homo sapiens
tttcgtgtcgggatggaagcttcctggcgccgggtggccggtggccgaggccgatcccggggacgggccactgccgccccctcaggaaatggagtccatctccgcggcgccggaggagggcgagagaaggggtcggtgggcgcagttccttctggcaccagtcccggaggagtcgcgaccacggcggctgcagggagcaggcacagccccgcaggatcccaagccctgcagactaccgcagccagcgagctaatgtctcagaaaaaatttgaagaaatcaagaaagctaaccaagctgcagccagaaaacttgttgaagaacagtttagctcttcatctgaagaaggagatgaagattttgaaggaaaacagggaaaaatacttgcaaatacgtttataacatacactgctcagacaggctcgtcgggggacccctcggacgcggtctcctgtacccactttccaaccagtcccaacgagatgaaccaggtacctcacttggaaatgcagaaatcacctgcagaaatcacatatctgcagaaatgcagaagtcacatatctgcagaaatgcagaagtcacatatctgcagaaatgcagaagtcacatatctgcagaaatgcagaagtcacatatctgcagaaatgcaaaagtcacgtttctgcagaaatgcagaagtcacatatctgcagaaatgcagaagtcacgtttctgcagaaatgcagaagtcacatatctgcagaaatgcagaagtcacgtttctgcagaaatgcagaagtcacgtttctgcagaaatgcagaagtcacgtttctgcagaaatgcagaagtcacgtttctgcagaaatgcagaagtcacgtttctgcagaaatgcagaagtcacgtatctgcagaaatgcagaagtcacgtttctgcagaaatgcagaaatcacctgtcttctgtgttgatctcgctgggagctgtagaccagagctgttcctattcagcaactcccccatcaaaacaatttcttattcaacatactagcagagctaggattgcaaatgggtag

SEQ ID NO: 141848 - DNA, 1218 bp, Homo sapiens
tcaatgcagcattatcaaatctaggacactatctggattgataccactctcagcaaacacaatgaccttgctggcatcttcctgcaagaggttgatgggacaggatggctgggggcagctcaaatacctttggctttccccctcctcctctcccatatcgctcctgtgagaggtgacagcgtgatggcggccctcgcagccctggctcgctctcggtgcccccttggcctcggcgcccattctggccgcacttgaggagcccttcagcccgccgctgcaccgtgggagaccttctctgggctggccgaggccggagctggctccctcggcacaaaggtctgcagcttcactcctgaagccagcaaagaccacgaacccaccaggaagaaggaacaactccagacacgcagccttaagagctgtaacactcactgccaaggtcttcagcttcactcgctttgggtccacactacctttatgagctgtaacattcactgtgaaagtctgcagcttcactcctgaagtcagtgagaccacgaacccaccagaaggaagaaactctggacacatctgagcatctgaaggaacaaactccagacacaccatctttaagaactgtaacaccgcgagggtccgtggcttcattccaattcctgagatcttattgggaagctgctgatcagcagtttcaggtgtttctatcagttgggagactgcctttcccagtgctggctgcaaccacttattatttgagaaattaacaactgcctgaacatcacctgatggttgcctgtagttccctgtactctttaaccaatcaacaatctccatactttggcccactccaaagcccttaaagaccctagccccaaactcatcagggagatggatttgaggtcttttcccatctctttgttctgcgacctcatgatcaaacatctttctctgctgcaaatccagtgtctcagtatactgacttgacgtcctgctggcaggactccggagtctgcattcttccccacatggtgccctgcattttccactggcagccaaagcctcttgataggtcagagtacaggaccgtgacacagcttcaggaagtcctgatgacatgtgcgcaaggtggtcagggcacagcttggttttatacattttagggagacatgagacatcaatcgatatatgtaagaagtacattggttcagtcatcctcagcat

SEQ ID NO: 141849 - DNA, 2087 bp, Homo sapiens
ccttggcgcccattctggccacacttgaggagcccttcagcccgccgctgcaccgtgggagcccttctctgggctggccgaggcgggagccagctccctcggctttcggggaggtgtggagggagaggcacgggtgggaaccgggactgtgcatggtgcctgtgggccagctagagttccgggtgggcgtgggcttggcggccctgcacttggagcagctggccagccctgccggccccaggcagtcttcagcttcactcctgaagctagcgagaccaccaaacccccagaaggaagaaactccgaacacatccttacatcagaaggaacaaactccggacacgctgcctttaggaactgttacactcaccgcagctgctgccaccccagacccagtcccagatccttctcctactcctattattcctcccccttataaatctgactcttgggaattaccaccaccccatgagtctgctccttgtcagcctaagtatccttccctaaagggactacaacgtgaagtacagcaatgtaaaaaagatattcaaaatcttcctttcccctctacctctaaggaatcagctccaactatcttccctttgagagaggtgccccagggaggaggagctattggctttgtaaatgctcctttgactagttcagaagttagaggtttaaggaaagaatttaagccattgctagatgacccatatggggtagcagaccaaattaatcaattcctaggcccccagttatatacgtgggctgaattaatgtctatcctgggaattataaagggtccaaacccctgtttggaggacccaagcctccaactaggggacctggaccctcagttaccaggccctctaaagagtatggaggagcaacgtcaaagaatcccggaactgagggagaggaagaatagaataggtgcttcaaatgtggaagagcaggccacttcaaaagagaatgcccccagtgggaaaaagaaaaagaaattgttctgctcatggcattcaaggaggaataaggagttatttcttgtggggatctccaaagccagagacagcttgcagcagcagagaaatatctctgccccatccacagcagatgcttctaaattgtttaagtacctgttttgtcatacttgggaatatgtcatttggaccactcaatgtcaagactgggtcccctcagaggatttcccgctagcagttctaaagccctataaccattttactaaaggaagtgcccctcccaactgtcaacataaccagtgtaaccctgtgcaaatttccatcaccatcccaactctccaagattcctcccctaccctaaactgtttttatggtatgggagcagatgtaacaggaaaagaccctataggtttcttcgagttgcacctcattacatcctcatccctcacatttccacctctatcctcttctaaacctgctgaccagaccactgtctcttctccacctaatgacaaaaccaacatagctattgtagaggttaaaaatttaaaacaaacactggcaattgaaaaaggataccacgatgcaaatgcctggatggaatggattgaatattctgttcgcactctaaataaaagtgactattacgcttgtgcgcatggtaggccagaggcccaagttatcccctttccacttggatggttttctgaccagctgggcatgagctgtaaggtggcacttttccaagaccccacagcctggggtaatgaattctgtcgaactttctgctattccctgaagttcaacatcgtgcagatgaaaaaactgaggcacagagagattaagaaacttgttctcaggttatacacttgcacagctcgagcgctttccgcggggtttggctcctgtcgcttcccgtctcgccgaaccggcatcgccgccgccggagccgcagcgagtcctcagagcctggctgctggcggccgggagcgccgggacggggcgcgaagccggaggctccgggacgtggatacagcccatttcagtatcggcgtcgcagtcgcttttgttgcagccttgggtccggagtgtacgactttctgctag

SEQ ID NO: 141850 - DNA, 412 bp, Homo sapiens; identical to SEQ ID NO: 136727

SEQ ID NO: 141851 - DNA, 390 bp, Homo sapiens; identical to SEQ ID NO: 136728

SEQ ID NO: 141852 - DNA, 2295 bp, Homo sapiens; identical to SEQ ID NO: 122132

SEQ ID NO: 141853 - DNA, 1074 bp, Homo sapiens
atgggttggggccagggccctgatgtccagctaatgaatggccatgagaggtcaccaagccattctccccgagaggcgaagaaatctggttctcccttacccactgatatccactgtttctctcctcaatctcagcctgcgatggtgatcactggggtccccactgcaccagccggtgccagtgcaaaaatggggctctgtgcaaccccatcaccggggcttgccactgtgctgcgggcttccggggctggcgctgcgaggaccgctgtgagcagggcacctatggtaacgactgtcatcagagatgccagtgccagaatggagccacctgcgaccacgtcacgggggaatgccgctgcccaccaggatacaccggagccttctgtgaggatctttgtcctcctggtaaacatggtccacagtgtgagcagagatgcccttgtcaaaatggaggagtgtgtcatcacgtcactggagaatgctcttgcccttctggctggatgttgtctttccctggctggaggcccatctaattttccaagtctctttgaatgcagggcacagtgtgtggtcagccttgccccgagggtcgctttggaaagaactgttcccaagaatgccagtgccataatggagggacgtgtgatgctgccacaggccaatgtcattgcagtccaggatacacaggggaacgagcagcagttccggatgttagaaaggtgccaggatgagtgtcctgttgggacctatggcgttctctgtgctgagacctgccagtgtgtcaacggagggaagtgttaccacgtgagcggcgcatgcctctgtgaagcaggctttgctggcgagcgctgcgaagcacgcctgtgtcctgaggggctctacggcatcaaatgtgacaaacggtgtccctgccacctggaaaacactcatagtataagtcttattgcagcaaaaaaaagtaactccttacatgctatagcattagactttagagcacagtgccaaagtgtcaaggaccgatgtcatgcatcggatctccccatcgacatcgtctctactgaaacccttagataa

SEQ ID NO: 141854 - DNA, 1299 bp, Homo sapiens
cttcgtattggtcaggcctttattacaagtatagcagtaaagtaaatgggatttcaattttggggaaccatgggcatagtctcagagagtaaatcataattggtgcatatttgaacgtgtatccaaatccactccttgaaggacttaataaaaggcatcagaaaaccaacttcgacaccaccagaaaccactgctgcagctaccccaacccctattccttttcccctataggaaaaaactaagaaactcaagaggagtcatcagaattcctgccatgtgggagtcatcaacccaatgggtgacttcttttctgctccacatataagagatgcctgtgcaactggggcccctgctaggcctactgaagagcctgcccatgccctgcccttcagcagtgtccagacatctgccacaggcacagttggccatcccgtgtgcaccacagcagcagcagctaagcagatgcctgtcctttccttcatccctgctccaagaccccaacactccaggagatacagaaaagacgaaggaagagcgggaagcagaggagcaggagagaagcaatgtacacacaattcccccaggtggctacagaacactgtcagcaatcagggatccagcatgcctggatttcagtctcacgtgccctctctgctgggagcctttgtgcagtgcacaaactgcacgcgtgtatgtagtagccctgctaataagatctttacaaccttcagattaggagatccccttgtgagcccatgccatcagggttttgggtccaacacacactgctgtgtggagtcttggcagagcagctgctccggcatgcacaaagacctgggagctttacatactccagccccaggatccccaacaaatgtggctgcaactcaggcaaggagggagcctcgctgccgccttgcagttctgtcaacattagacagatcaacgagacagaaagttaacaaggatatccaggaattgaactcagctctacaccaagcggacctaacagacatctacagaactctccaccccaaatcaacagaatacacattcttctcagaaccacatcgcacttattccaaaactgaccacttagttggaagtaaaggactcctcagcaaatgtaaaagaacagaaattataacaaactgtctctcagaccacagtgcaatcaaactagaactcaggattaagaaactcactcaaaactgctcaactacctggaaactgaacaacctgctcctgaatgactactgggtacataacgaaatgaaggcagaaatagatgttctttga

SEQ ID NO: 141855 - DNA, 1332 bp, Homo sapiens
gaaaaaactaagaaactcaagaggagtcatcagaattcctgccatgtgggagtcatcaacccaatgggtgacttcttttctgctccacatataagagatgcctgtgcaactggggcccctgctaggcctactgaagagcctgcccatgccctgcccttcagcagtgtccagacatctgccacaggcacagttggccatcccgtgtgcaccacagcagcagcagctaagcagatgcctgtcctttccttcatccctgctccaagaccccaacactccaggagatacagaaaagacgaaggaagagcgggaagcagaggagcaggagagaagcaatgtacacacaattcccccaggtggctacagaacactgtcagcaatcagggatccagcatgcctggatttcagtctcacgtgccctctctgctgggagcctttgtgcagtgcacaaactgcacgcgtgtatgtagtagccctgctaataaggaagccagctgctatgatattcggatgctcaagcagccatatggagagaccaacacaaccacaattgaactgggctgtgggaaacttggagcaatttcccaggagagcaggaaagacaaaggcttaaagaagaagggccatgcgacacctgtgaggatctttgtcctcctggtaaacatggtccacagtgtgagcagagatgcccttgtcaaaatggaggagtgtgtcatcacgtcactggagaatgctcttgcccttctggctggatgtcacccattccaggatactcagtgcatacacatgcaggagactttagcacaaaggaaagttaccatgatggttgaagattccaaaattggaaagactcaagccattttaaatctgaaactcttcagttctgaggagacagaagaagcttcatttctccagagaaagcgaatcattgtaagcagcgctgcttgcagcagaatcgtgaatggacaaaggagatggccaggggtcccttctccagtccagctcccattctttttgccccacatgccttgtcttctcctgctggatactgctgtaaaggaagggactgttctgatgattattttctttggggtagacttaagtctgctaactctgtttttgttagatggagaaagtcaaatggtaactcaaagttcaagttctaatgggggcgtccaggcaagtgtggcttgtaagaaggacagagggaagaggtttggggactgggtaactcactttattgcctggcaggccagctctgatggtgagagatcagttcccatggatgtgtcctgcctgtcgttggcactggttaagagaactttggaaccgtaa

SEQ ID NO: 141856 - DNA, 473 bp, Homo sapiens
atgatcctcgctctgaggatggcaactgggttcctgccccatggtcgggcccctccagggctgccttagtcagcaagaggcaagcccctgcctgcccagccagcccagctccactcccattcatctccaccaaggggcatggccgcccccatgccacagagagaggccgggtgcggagggagcgtggccaccagggggtaggcccagcccgcagttgccgctgcgtggcagggtggggaggagccactcccaggagtgactcaccaggcctggctgttctcttcagggttgtttacgactcccccgactcccccgtgtgagtcagaaacacagccttcctcggcttcctccttcccaggggaaagataggggttttgattatttaaagtgcgtgttgatctgcaatggcaccattctgctcagtcaaaacgaattccaccacatggactagggatcgacaaatggtctcaaaa

SEQ ID NO: 141857 - DNA, 1058 bp, Homo sapiens
tttcgtgttttgactgagcagaatggtgccattgcagatcaacacgcactttaaataatcaaaacccctatctttcccctgggaaggaggaagccgaggaaggctgtgtttctgactcacacgggggagtcgggggagtcgtaaacaaccctgaagaagaacagccaggcctgttcccgcaagcccagacaatgccggtggaggaatttgtggctggctggatctctggcgctctgggcttggtcctgggacacccgtttgacactgtaaaggtgaggctgcaaacccataccacctaccggggcattgttgattgcatggtcaagatttaccgccatgagtccctcctgggctttttcaagggaatgagcttccccattgccagcatagctgtggacaactctgtcctgtttggggtctatagcaacaccctgctggtgctcacggccacctcccaccaggagcggcgggcccagccgcccagctacatgcacatcttcctagcgggctgcaccggggggttcctgcaggcctactgtctggctccttttgacctcatcaaagtccggctacaaaaccagacagagccaagggcccagccagggagccccccaccccggtaccaggggcccgtgcactgtgcagcctccatcttccgggaggaggggccccgggggctgttccgaggagcctgggccctgacgctgagggacacccccacggtggggatctacttcatcacctatgaagggctctgtcgccagtacacaccagaaggccagaatcccagctcagccacggtgctggtggcagggggctttgcaggcattgcttcctgggtggcagccacgcccttagacgtgatcaagtcccggatgcagatggatggactgagacgcagagtgtaccaggggatgctggactgcatggtgagcagcatccggcaggaaggactgggagtcttcttccggggggtcaccatcaacagtgcccgcgcctttcccgtcaatgctgtcaccttcctcagctacgaatatctcctccgctggtggggatga

SEQ ID NO: 141858 - DNA, 1116 bp, Homo sapiens
ttatagctcatttgggagtccttccgttgagtcagagagtaagaaaagattcatgtggttcagctgtccaagggtactgagcgtgagaaaccagcacaaagtgaaggctcccttaggatggcctctcttattcccactgctgtgccattccacaatgcttgtcttctcaccctcagcagtatgacaggtgctacactcagagcatcttctgaaacagcctccaagctgcacccctgcttcctttgcttttggatgaccccctccagcagctttggtgctgatgggaataagtcgactggtagttgctctgggtttcccagggatggagctctcagaagaaaccaacagcttctccgctatggctcctgcagtggttctgcccttgctgccccaggaccagggctgattgtaccaactggtagtggctctgcatatctctgcagtggagccccaagaaacaagtgaaagtcctgctgccacaaccattgccaaggtcccatctcttgcttcctccaagcttaagtcatctctctcaagttcaaagttccaaagatctctggggaaggggcaaaatgccaccagtctctttattaaatcatgacaagagtcacctttgctccagttcccaacaagttcctcatctctatctgagaccacctcagcctgaactttattgtccctatcactatcagcattttggtcaaagccattcagcaagtctctaggaaactccacactttcccacattttcctgttttcttccaagccctccacagtgttccaacctctgacttcaaaccataccacaaggccacagtaatcaaaacagcatggtactggtacaaaaacagacacatacaccaactgaacagaatagagagcccagaaataatgccagacagcttcctgctgttcccacacctgccaaattccatccctctttctggaaaaatctcccactagaacttgagaagcttcagtcacatcatttagatttctgcttgatagcttctcctcagagaggctttccttgagatcattaattagcacagcagaactagctctctgttggttagtgattatcatgctttcttccattatttcactttcaaccat

SEQ ID NO: 141859 - DNA, 477 bp, Homo sapiens
atgcgacggacaggcgcacccgctcaggctgactctcgggggcgaggtcgagccaggggcggctgccctgggggcgaggcgacgctgtctcaacctccacctcgcggcggaacccgaggagaggagcctcagatgaaagaaacaatcatgaaccaggaaaaactcgccaaactgcaggcacaagtgcgcattggtgggaaagtgaatatgtttacaaaccaaggaacagtgatccactttaacaaccctaaagttcaggcatctctggcagcgaacactttcaccattacaggccatgctgagacaaagcagctgacagaaatgctacccagcatcttaaaccagcttggtgcggatagtctgactagtttaaggagactggccgaagctctgcccaaacaatctgtggatggaaaagcaccacttgctactggagaggatgatgatgatgaagttccaggaggcttccaagaatga

SEQ ID NO: 141860 - DNA, 464 bp, Homo sapiens
ccaagccggaggggtcctgaggtgacagcgcctgcaactgaaatttcagcagcgggagaagatggacaagagaaagctcgggcgacggccatcttcatccgaaatcatcacagaaggaaaaaggaaaaagtcatcttctgatttatcggagataagaaagatgttaaatgcaaaaccagaggatgtccatgttcaatcaccactgtccaaattcagaagctcagaacgctggactctccctttgcaggtgtgggaaagaagcctaaggaataaagtcatctctctagaccataaaaataaaaaacatatccgagggtgtcctgttacttccaagtcatcaccagaaaggcaactcaaagttatgttgacgaatgtcctatggacggatttaggacgaaaattcagaaagaccctacctagaaacgatgctaatttatgtgatgccaacaaggtgcaatcagacg

SEQ ID NO: 141861 - DNA, 1263 bp, Homo sapiens
atggggaatttaaagaatttctctcaacttcaggaggatgccaaacaagccactattagcaaatttgaagaccttaacagtggaagtagaggttgtgatcatctcgaacaggaaagcagaaacaaggatgttaaatattctgattcaaaagtggaactcactctgatttccaggaagacaaagagaaggcttagaaataatttacctgattctcaatattgtacttctttggataagtcaacagaacagacaaaaaaacaagaagatgactcaacaatatccactgagtttgaaaagccaagtgaaaactatcatcaggatccaaaactgcctgaagaaattacaactaaacctacaaaaagtgattttactaaactatcctcacttaacagtcaggagttgactttgagtaatgccaccaaaagtgcctctgccggttcaaccactgaaaccgttgagaactctaattccattgatattgtggggatttcttccctggttgagaaggatgagaatgagttgaataccatagaaaagcctattctaagaggacataatgaagggaaccaatcactgatctcagctgaaccaaattgttttggttcttctgagcctctagcaattaatcatcagatcagtttgtccatttctgcaaaacaggctgttggaattttgtgggaaagaagcctaaggaataaagtcatctctctagaccataaaaataaaaaacatatccgagggtgtcctgttacttccaagtcatcaccagaaaggatgaaagaaacaatcatgaatcaggaaaaacttgccaaactgcaggcacaagtgtgcattggtgggaaaggaactgctcgtagaaggaagaaggtggttcatagaacagccacagcagatgataaaaaacttcagttctccttaaagaagttaggggtaaacaatatctttggtattgaagaggtgcatatgtttacaaaccaaggaacagtgatccactttaacaaccctaaagttcaggcatctctggcagcaaacactttcaccattacaggccatgccgagacaaagcagctgacagaaatgctacccaacatcttaaaccagcttggtgtagacagtctgaacagtttaagcagactggctgaagctttgcccaaacaatccatggatggaaaagcaccacttgctactggggaggatgatgatgatgaagttcctgatcttgtggagaattttgatgaggcttccaagaatgaggcaaactga

SEQ ID NO: 141862 - DNA, 1189 bp, Homo sapiens
ccgcgtgtgtgcgcctaatctcaggtggtccacccgagaccccttgagcaccaaccctagtcccccgcgcggccccttattcgctccgacaaggtacaaaaaggctctggacggcggcgtggtaggaggacgggagcgggggcgggaagttccctgaaggagcgagacagggagggacagggcagaggaggagaaggaaggcgatgcgacggacaggcgcacccgctcaggctgactctcgggggcgaggtcgagccaggggcggctgccctgggggcgaggcgacgctgtctcaacctccacctcgcggcggaacccgaggacaggagcctcagattgaaagaaacaatcatgaaccaggaaaaaactcgccatacctgcaggcacaaagtgcgcattggtgggaaaggaactgctcgcaaaaagaagaaggtggttcatataacagccacagcaagatgacaaaaaaacttcagtttctccttaaaggaagttgaggggtaaacaatatctctggtattgaaggaggtgaatatgtttacaaacccaaggaacaagttgatccacttttaacaacccctaaaagttcagggcatctcttgggcagcgaacacttttcaccatttacagggccatgcttgagacaaaagcagctggacagaaatgctacccagcatctttaaacccagcttgggtgccggataggtctgactagttttaaggagactggcccgaagctctgccccaaaccaatctgtgggatgggaaaagcaccactttgctacttggagaggatgatggtgatgatgatgaaagttcccagatcttgtgggagtattttggatggagggttccaaggaatgaggcaaacttgaatttgagttcaactttttgaaggttaaaacctgaagaaagtttacttggggagctgctattttaatattaatggacttgctttttaagaaattttttgtttatggatctgataaaatctaggatctcttaatatttttaagccccaagcccccttgggacactggcaggctctttttcagtttttgcttatacacaattcattctttggcagctaattaaggccgcaagaggcctgggaatcaagtttgaaacaaagattaataaagttctttgcctagtaaaaaaaaaaaaaaagccgaccgcgcccgcatat

SEQ ID NO: 141863 - DNA, 611 bp, Homo sapiens
ggctaatggatgggtggatgcaaatgaatgtttgcatttgaatgaaatgactgagaacaaatctttgcctgctttcaagttgctgagcgtccctctactgcctaagatgaggggtttttctacttgtatgttattccttgcctggtcataacaacagtgtttttgggacaattgggtgaaaggagctccctcttttgattttttgtagatggcagtttgaatccctgcatgaactgaatgttccatttttcaaagttggatctggagacactaataattttccttatctggaaaagacagccaaaaaagggtcgcccaatggtgatctcccagtgggatgcaagtccaatggacacccatgaagcaagtttatcagatcggtgaagcccctcaacccccaacttctggcttccttgcagtgtaccagcgcatacccgctccagcctgaggacgtcaacctgcgggtcatctcggtgagcaggagggagggggttcccttcttgggccatttactatggggaaggcgtagtcttttttataaccaaaattctaacaaacatggcatactttataatttgaacatcctttgacagtcttgctaataccaaaac

SEQ ID NO: 141864 - DNA, 1417 bp, Homo sapiens
cacctgctgtggtaccaggcacgcaagcaggcactcgaaactgctttggtggatgcagcagtggggtgcactggaaaacggaggcaaatgagggatgtcagaggtcacaagcctccaccagagactgaaggtgttgactttcaccccccacaccctccagagtgtgatggggggtttgctctctcaggggctttgccctgggttcagtgctgggaaggtactccaaatggttccttaactgaaggcgcctacactctagagggaatgacagacaaaagaggcagatgtcataaagggggctggcacagtgttttaagagatgtctgtggagttcagttgaatgatgagaccagcagttgggatgtgttggggaagagtcagaacctctaaagagaaagtgctgatggtgttggtgctggattactcaggtcgcccaatggtgatctccagtgggatgcagtcaatggacaccatgaagcaagttattcaaatcgtgaagcccctcaaccccaacttctgcttctttgcagtgtaccagcgcatacccgctccagcctgaggacgtcaaccctgccgggtcatctcggaatatcagaagctctttcctgaccattcccattagggttattctgggcatgaaacagggcatagccgatatctttggcccccagtggctctgggggcccaaggtgttgggaacgtctcacataaactttgggacaagaccggggaagggggagttgacccactcggcctcgcttggagccttggagaactggccgaagctggtgcggtcagtgcgtcttgtggagcgtgccctgggctccccaacctaagcagctgctgccctgtgagatggcctgcaattgagaacctgggcaagtctgtggtggccaaagtgaaaattccggaaggcaccattctaacaatggacatgctcaccgtgaaggtgggtgagcccaaaggctatcctcctgaagacatctttaatctagtgggcaagaaggtcctggtcactgttgaagaggatgacaccatcatggaagaattggtagataatcatggcaaaaaaatcaagtcttaaaaatccaagtgccattctttgaattctcagttcccaagctcatgctgtcaggtgtgtttgataaagaagagggcaggaatgacggtctccagggacctggctgtcatccacctccacctgctcattagacagcagatgtttctgggtgaggccctgtgtcagcccactggagacagaaaaaaatccatgtatgcaatctctccttcaagatggccagcttagtgccctggccagcagtgcattataaacagagctccagaagaaggggtggttccaagcaaagtccatatcctccagttgctgggtgtctgcagagaggggcgtacgcgtggg

SEQ ID NO: 141865 - DNA, 645 bp, Homo sapiens; identical to SEQ ID NO: 126042

SEQ ID NO: 141866 - DNA, 510 bp, Homo sapiens; identical to SEQ ID NO: 126135

SEQ ID NO: 141867 - DNA, 4083 bp, Homo sapiens
tcaggctgtccggcctctgtgtctgggtagcagtgccccaggagaaagaccctccctggcctggtggtcccatctggccccgtactccaacccgcacgggtgcccatacatgtctgccagccgggcgaagcggggcccccagtctctgaggtagtcgtagtcctggtcctcatcgccctggctggacaggatggagctcagcgtccccgccaccgagccgtcaccctcgtagtcatagatgagggctgtgtcgtaaggcggcacactggggtcactatctgcagcctccaagcccgccgtggccacagcccagggcaaagtcagctcaaggcacgggctcaggaaggggaagctgcccacgtccggggggcgaaggtctacatcattgatgaagtcggcgatgtccagggggctggtgggcagcactcggggtggctgggggtgcaggcggccctgcggggcatctctgcgaagtggcggcggtcccagaggcaggctcagcgctgtcgggtgacgcagctggctgatgtcgtaggcgtcctggtcctcctccccgcctccttgctcatcgtagttgaggacattgtctcgaaggtcgtcctgggggccgtgcagcagccccttgccccgagactgcttccagaaccgcgcccggagtgccacgagcaggaccagcactggggaggaaaagggcggtggcttagtaatgagggggccggggttggcgatccaggggccgggttgggtgcaagcggcgtggctggtaatgagtgggtggtgttgcggagcaggtggaacgttgacctggctgaggctccagttccggccgagctctgggagcctggggctcagctggaagtggaagggggccccgtgggggggcaggtcctcatccgtggcgcccaggaggaggcctgggccttggtgtggctcgctgcacaggctgcccggcggcggcggggccagcacaggtgcatggtcgttcacctccaggatctcgatggacagggtgccggtggcggtgcggggctgggaggctgtgcgtgccggcatctgtgtgtgggcatctgtgtgtgtcggcatctgcgtctgccggcatctgtgtgccagccgggggccgctcaccttcacaatggacagaacaccctcgttggtcttggggtccgtgcggatggtgaactgcccatcggggtcgccttccaggatggtgaacctggccacccagtttggggagcctggcaggtccctgtcctccacttccaggcgtcccacatccactccgctgacggcctctatggcctccatgaagaaccactgggtgtcctcaggtttgtctgttttgtgagtcactgtcccccacgtgcccccatggtcctcctctgtgggctcaacttcgtgctcccttcccatacagcaaaggccggagggagacttgctctcatccctggtgaactcgggggcattgtcattgatgtcatcaaaggtgatgatggctgaagcagtggctgtgaggccgtctccagacatgtccgccacctgcagggtcagattgtacaccgcgaccaccagcggggagccgttgccatgaggctcgcggtccagccccacttgcactgtgcggatctctcctgtgagctcgtcgatgctgaagagctcggggctgccctgctgcaggatggagaaccgcagcgctgcgttgtccgtctcggggtcgtcggcatctgtggcctctgccctggtcacataggtgcctgggactgcaccctccagcacgcggccagtgaacgcctcctgcaggaaggctggccggttgtcattctgatccacaactacaatctccaggtccgtggggtcctccagggtggatcctcccaggtccagggcaaaccctcttagctgttcaaacatagagcaagggctggctcttgtggcccccaaatttctgtggctcccgttaggcccatgcgaaagagacagcacgttcagactttgtctccagctgaaaacaccagctgccccctcacttaagggtgcctggatcttgcagtctggcctgaagcccaccgagcggggaggagaagcctggtggggaggaggggcactggctttccaccaggcctgcttgaggggcacaggtccgaccacgcagctccgcaccctgaagcgatcagtcttctcgcggtccagcatggcattgaggaagaccttccctgtgaactgggcgatagagaagacgccccggggctcctcatccacgccggggccctgaaccagggggtaggggagacgcttgtggttctcggatacgctgatcggggggatgacccaggccctccgcacgcggctcagggcaggcgcccggcgccaggggtacagggtggtgggcctcctccatccaggaacccccaaagacaggcagaggctctgagattcacccggcggggacacagcctcgccccaggtgccagggtagcggtgcacacggaaagcccctgggccagccagggctggggagagcgtggggtcctgaacacgggaaatgacccccaagaagccagtggcggtgcctgtgatgctggggtgggccagcaggtgccactccacctccagggcgctgaccttgtagcctccagtcttgatgatgtccactgaggtccggcctcggatccagtactggccatccttaaacaccacggtgtccccttggtcggcacccttggcgcagaggctggcaccagccagacgagccttggttgggtcttggggccccaccaggaggcctgtgttccttcccttgccccacagagatgcccagtgtcctgtgaaggcagcatggccaggagggttttggtcaatgagacaaaggccccagggcttctgaaaaggtccctccctcggcaaaggctgccatggggcactgttggccccacgccgtttgagcgccctgaggggctgctgctgctgctgctcccgcatctgcccggcaagaggagcccaaccatccacggtcaccttccaactcgccccagggtggcaaatgtgagcgtgtgtctctgagcgagggcaagtggagtcaaagcatctgcagagatcattgtggccgtcaaagaagtaacctgagacagacctttgacgtctgaagacatcgtagtggccggtcagaggagttacctgagacagacctttgacgtctgaagacatcgttgtggccgtcagaggagttacctgaaacagacctttgccatctccttgagcagcagcggagacccctggcctcacaagcccgctgtgtgatcttgaggcagaagcgggcgcatggcccaagattccattccttggaatccataaggccaagaaccccaggtcagagaacacgacgcttgccaccatcttggaagcagcctgccgccattttggaagctgcccgctaccatcttgggagctctgggagcaaggaccccctgtcttaaaccagccatctagggtgaatgcactcttagtttcttctggtttattccagtattctcgaaacacggagggtcccctcaccagcagctccccctccttttcttcaaaccctggggtcaccttggtccccctctcgtctccctctgcgtggatggtgtaggagcaggcttccctctgtgggttttctgagacaatgcgcacctgtactccaggcagtggggtccccacggaacagctgcccacagattctggtgtcattcccacttttacacacttgctggccagggagggctggcgccttgccctgatggccccggggctgtccacgatgaggggacctgtgtgtgcccggcacacgacgggctggcaccaggtctgctgtccgcgtccgtggtttttctgttctgggcgtttcataagaagaggaccatcacaggcggcctttcgcctcttcctggtgatgcctctactggggcggggacgcagcgcaaggacacggcacggcctccacccagcttctctctctctcttccgagcacggacagtgcactgagcagcgaggccaagcatgagctcagagcctgtggctagagccgaccctagggtcaaggccat

SEQ ID NO: 141868 - DNA, 963 bp, Homo sapiens; identical to SEQ ID NO: 127641

SEQ ID NO: 141869 - DNA, 736 bp, Homo sapiens
cctctttgggtcccctccctttgtatgggagctctgttttcactctattaaatcttgcaactgcactgtcttctggtccgtgtttgttacagctcgagctgagctttcacttgctgcccaccactggtgtttgccgctgtcacagacccgccgctgtcgcagacctgccgctgacttccaaccctccagatccagcagggtgtccgctgtgctcctgatccagcgaggcgcccattgctgctccaaatcgggctaaaggcttgccatcattcctgcacggttaagtgcccgggttggtcgtaatcgagctgaacacttgtcactgggttccacggttctcttccatgacccatggcttctaatagagctataacactcaccgcatggcccaagattccattccttggaatctgtgaggccaagaaccccaggtcagagaacatgaggcttgccaccattttggaagtggcctgccaccatcttgggagctctgggagcaaggaccccctggtaacagtagtagatacatagaatttttaaataaacatacttatattaagggtactcttagggtctatactaagaaattttgcatgcttgtcattaaaagctttgagtccaagtcctgtgtgtggagatatgactttgactctaaatcaagtgtaaatgtaactgtatagatatgccatgtatataatggtaataaaatatatacatatatttataaatgaggcag

SEQ ID NO: 141870 - DNA, 651 bp, Homo sapiens
atgaaagtctccatggacccttcaaccagaggctctgtgacttgtcccgtcttcagtgcgacacgttggctggtgcagtcctggagacccacggagctcacggtcgtcaggggtcctcaaggattcagagaacccccaaatgtcagggctgctcccttcttgtcctgcctctctgctcacacccttggacagactccagaatcttctcggttctcagagaaggctgaatccacctatgacctagtgggagcaccctgtgccgaaactgtttaccttctggtccccggagccatgggtcacgacctgggcctcatcccagacctcaccctggcccggggacctggcctgatggtccagccccccacacactgctggctctggggctgtgccctcctgatacgcccccagcacctgatggcatcccccaaacagaacaagaaccgcaaacagcaacagcccgtttttgctcttaggaagctcagagcagcatctatgccaaaatcgttcacactctggtccccggagctacaggggcagctgctgggagaccaagtgtcaccggctggcaatcagggccccaagcctggagacttctggacaagcggaggcaagccgaccatgacggcttgggtgcagggagcaggtgtctga

SEQ ID NO: 141871 - DNA, 1650 bp, Homo sapiens
tcaggctgcgagcacggccaccgccaaggaggtgctataagctctgagatgccttatgcaggaaaaggctcctgacatttctgcccggactgtccccaaggctgcctgtaaaccttgcagcagcaggaacaggttctgcttgagtcccggcagaagcattggtccttgaaggtgacaggcctcctttctctttgcccttccttcctcattcgcagggcactgtgcaacatgtgtggagggtgggccagtgccctctccaggaccccctggacctgtctgctgtgtgcacatactgctcttggcactgaggactgtgtggagcaggatggccatgggcccttctctctggcagcttccatctagtgtagacagatagacaatattaagagcaaagcagattgtgttggacaaagtaagtgcccaaggagaggctgtctccagagccccagtgctgggcagctcttcctcattcctcggcatcccgtgtttcctgctggtatcgtcctgagaagcttcgtgggatgagatgtcatctctgctgccatccgcatgactgcagacctttgggaagccaaacaccacctccctgggagcgctcttccttcccatccttgccagcatggccacagaccggaagtggcccttcccagagctgatgttccagtgtggtccagtttctgtcctgtgggactggtgtttgtgatagccctggaatgtgagcaccaggaaacactgaatgtcactcacctccttggaccccttgcctctgcaggtgaagccactgaggcaggggctagacatctgtggggctctgctgaccttgaccctccagagcaggcaggccccagggtcggaagtcagctgacagtctccacagtgctccctgtgcgtgcttggcagatggcagctgctgtcatcaccatcatcaccataaccaccgttactttcagcgtcacaagcaccactgccaaaaccaccatcattgtcatcatccagcgtggagggtccaactggaacgctgtcgccagcttgtcttgttatgacgttagttttactgctagaaatatctagtagatggctggaaatcagtcctgcctcttcattgagtttgggcttctctgaggtggaggctgttctccttctgctcccagttcccatcgcctgctgcagggtcagcattttccaattgaggcaggctcggtggggccaagtgaccaggcggtagacaaatagctgcaaagtggccaggcctgggtaccctcttcccccaactataagcagctcaaggcctggtggcttgtggcccaccaggtgccctctggatgccctgtgtctctctgaggatggggcggtggtcagaaagggccctgtcttcctagcctgctggccgctccaggagccgcccagcgtgcaccgctgtgcctcatcttctgagccttccatcctcactgctcctgggggcagccctgtgggggaaatcacgtttttaattagcctggttcgggatggcggctctaaagctccgggccgtgaatgcagcctcttcgcctttggaatccgctgccagtggacacaatgtagtctgctctgccgcagcgggggctgtctttttcctcctcctctcttcctgcgctcggggctgtattgcat

SEQ ID NO: 141872 - DNA, 465 bp, Homo sapiens
  misc_feature (1)...(465): n = a,t,c or g
aggcaaagttgtttgcttcgaggcctttctccagcagatcctggggaaacaccaattttattggtgcctcgaaggacttggccactgtcaccatcacattggtgccaaatacccagaagacatcgtagatgaagagtccgcccagcaggatgcagccagtgctgacattgttgaggtgcaggagctctactccattaagggagaaggccaggccaaaaaggttgttggcaatccagtgcttcctcagcaggtaccagacgccaacgatgctgctcaggcccaggcacaccaggtccttggtgtcaaattcataattgatgatctctgagcagagaggccaggtaagtccactccctgaggcagggctacccctcccaccttccttgttttccccagaaccctgtgtgaaggaattccnccgcntgtcgtaggatctcatggancatcagtgnnngggctcgtcct

SEQ ID NO: 141873 - DNA, 427 bp, Homo sapiens
tgcgtgtggcgcccgcgccggccttcctgcaggggactccaccggagccttgccaattccgtttgtttccctgttgtcgcccgcttcaccctggatcatgttcaagaagtttgatgaaaaggaaagtgtgtccaactgcatccagttgaaaacgtcagttattaagggcattaagagccaactggtagagcaatttccaggtattgaaccatggcttaatcaaatcatgcctaagaaagatcctgtcaaaatagtccgacgccacgaacatacagaaatccttaccgtaagtggggaattattgttttttatacaaagaaaggggcctttttgtccaactctaaggttgcttcacaaatacccttttatcctgccacaccagcaggttgataaaggagctatcaaatttgtactcagtggcgcaaat

SEQ ID NO: 141874 - DNA, 699 bp, Homo sapiens
ccctgctgcagcaaccggagctggagtcggatcccgaacgcaccctcgccatggactcggccctcagcgatccgcataacggcagtgccgaggcaggcggccccaccaacagcactacgcggccgccttccacgcccgagggcatcgcgctggcctacggcagcctcctgctcatggcgctgctgcccatcttcttcggcgccctgcgctccgtacgctgcgcccgcggcaagaatgcttcagacatgcctgaaacaatcaccagccgggatgccgcccgcttccccatcatcgccagctgcacactcttggggctctacctctttttcaaaatattctcccaggagtacatcaacctcctgctgtccatgtatttcttcgtgctgggaatcctggccctgtcccacaccatcaggtcagaaggcatctctctgcaacatttgaagcagctttctcgggaaccagtacagggtcttggatgagaacatgacttttggcatcattcagagccagccccttcatgaataagttttttccagccagctttccaaatcgacagtaccagctgctcttcacacagggttctggggaaaacaaggaagagatcatcaattatgaatttgacaccaaggacctggtgtgcctgggcctgagcagcatcgttggcgtctggtacctgctgaggaagcactggattgc

SEQ ID NO: 141875 - DNA, 793 bp, Homo sapiens
cgactacagctccgactgtcagtgccggccttcctcgtgtgaggggatctgccggacccctgcaaattcaatttctttcccattccgggcccttccctatcgtcgcccccttcaccttggatcatgttcaagaaatttgatgaaaaagaaaatgtgtccaactgcatccagttgaaaacttcagttattaagggtattaagaatcaattgatagagcaatttccaggtattgaaccatggcttaatcaaatcatgcctaagaaagatcctgtcaaaatagtccgatgccatgaacatatagaaatccttacagtaaatggagaattactcttttttagacaaagagaagggcctttttatccaaccttaagattacttcacaaatatccttttatcctgccacaccagcaggttgataaaggagccatcaaatttgtactcagtggagcaaatatcatgtgtccaggcttaacttctcctggagctaagctttaccctgctgcagtagataccattgttgctatcatggcagaaggaaaacagcatgctctatgtgttggagtcatgaagatgtctgcagaagacattgagaaagtcaacaaaggaattggcattgaaaatatccattatttaaatgatgggctgtggcatatgaagacatataaatgagcctcagaaggaatgcacttgggctaaatatggatattgtgctgtatctgtgtttgtgtctgtgtgtgacagcatgaagataatgcctgtggttatgctgaataaattcaccaaatgctaaaaa

SEQ ID NO: 141876 - DNA, 1309 bp, Homo sapiens
  misc_feature (1)...(1309): n = a,t,c or g
gccttccacgcccgagggcatcgcgctggcctatcggcatcctcctgctcatggcgctgctgcccatcttcttcggcgccctgcgctccgtacgctgcgcccgcggcaagaatgcttcagacatgcctgaaacaatcaccagccgggatgccgcccgcttccccatcatcgccagctgcacactcttggggctctacctctttttcaaaatattctcccaggagtacatcaacctcctgctgtccatgtatttcttcgtgctgggaatcctggccctgtcccacaccatcagccccttcatgaataagttttttccagcccagctttccaaatcgacagtaccagctgctcttcacacagggttctggggaaaacaaggaaaaagatcatcaattatgaatttgacaccaaggacctggtgtgcctgggcctgagcagcatcgttggcgtctggtacctggctgaggaagcactggattgccaacaacctttttgggcctggccttctcccttaatggagtagagctcctgcacctcaacaatgtcagcactggctgcatcctgctgggcggactcttcatctacgatgtcttctgggtatttggcaccaatgtgatggtgacagtggccaagtccttcgaggcaccaatgaaaatttggtgtttccccaggatttgctggagaaaggcctcgaagcaaacaactttgccatgctggggacttgggagatgtcgtcatttccagggatcttcattgccttgctgctgcgctttgacatcagcttgaagaagaatacccacacctacttctacaccagctttgcagcctacatcttcggcctgggccttaccatcttcatcatgcacatcttcaagcatgctcagttatgaggagtcaaatcctaaggatccagcggcagtgacagaatccaaagagggaacagaggcatcagcatcgaaggggctggagaagaaagagaaatgatgcagctggtgcccgagcctctcagggccagaccagacagatgggggctgggcccacacaggcgtgcanggggaagagggcacaggaggccaagggcagctccaggacagggcagggggcagcaggatacctccagccaggcctctgtggcctctgtttccttctccctttcttggccctcctctgctcctccccacaccctgcaggcaaaagaaacccccagcttcccccctccccgggagccaggtgggaaaagtgggtgtgatttttagattttgtattgtggactgattttgcctcacattaaaaactcatcccatggcca

SEQ ID NO: 141877 - DNA, 1859 bp, Homo sapiens
aatgcttcagacatgcctgaaacaatcaccagccgggatgccgcccgcttccccatcatcgccagctgcacactcttggggctctacctctttttcaaaatattctcccaggagtacatcaacctcctgctgtccatgtatttcttcgtgctgggaatcctggccctgtcccacaccatcaggggagaagggcaccaggatgtggcttgtcagtgggaagcaatgacctttacgtttgacatgagccatcaagggccaggaagaatctctgcctgctacaaaagtctgcattcagagtcattcagcaagcattttagcagatgtctagcaggcaccagccccttcatgaataagttttttccagccagctttccaaatcgacagtaccagctgctcttcacacagggttctggggaaaacaaggaaggggactccaccggagccttgccaattccgtttgtttccctgttgtcgcccgcttcaccctggatcatgttcaagaagtttgatgaaaaggaaagtgtgtccaactgcatccagttgaaaacgtcagttattaagggcattaagagccaactggtagagcaatttccaggtattgaaccatggcttaatcaaatcatgcctaagaaagatcctgtcaaaatagtccgatgccacgaacatacagaaatccttaccgggctgacaggtgggaggggtagccctgcctcagggagtggacttacctggcctctctgctcagagatcatcaattatgaatttgacaccaaggacctggtgtgcctgggcctgagcagcatcgttggcgtctggtacctgctgaggaagcactggattgccaacaacctttttggcctggccttctcccttaatggagtagagctcctgcacctcaacaatgtcaggcgctggctgcatcctgctgggcggactcttcatctacgatgtcttctgggtatttggcaccaatgtgatggtgacagtggccaagtccttcgaggcaccaataaaatgtgacaaaactaaggcagtggtgtttccccagggttctgctggaagaagggcctcgaagcaaaacaactttgccatgctggggacttgggagatgtcgtcattccaggggatcttcattggccttggctggctgcgcttttggacattcaggtttgaaaggaaggattacccacacctactttttacaccagctttgcagcctacatctccggccttgggccttaccatcttcaatcatgcacatctttcaagcatgcttcaggcttgccccttcctatacctgggtccccggcttgcaatcggttttcctgtcctgggtgggcgctggccaaggggaagaagtgacagagatgtttcagttatggagtagtcaaatcctaaaggatccaagcggcaagtgacagaaatccaaaggaggggaacagaggcattcagcattcgaaggggctgggagaaagaaagagaaatgatgcagctggtgcccagagcctcctcaggggccaagaccaagacagatggggggctggggcccacacagcatgtgcaccggtagaagggcacaagagggccaagggcagctccagggacagggcaggggggcagcaggatacctccagccaggcctctgttggcctctgtttccttctccctttctttggccctcctctgctcctccccacaccctgcaggcaaaagaaacccccagcttcccccctccccgggagccaggtgggaaaagtgggtgataatttttagattttgtattgtggactgattttgcctcacattaaaaactcatcccatggccagggcgggccactgtgctcctggaaaaaaaaaaa

SEQ ID NO: 141878 - DNA, 1491 bp, Homo sapiens
atgagggtcctctctggcactagcctcatgctctgcagcctgctgctgctgctccaggccctgtgcagccctggcctcgccccccagtccagaggccatctctgccggacgcggcccacagacctggtgtttgttgtcgacagctctcgcagcgttcggcctgttgaatttgagaaagtgaaggtattcctgtcccaggtcatcgagtcgctggacgtggggcccaatgccacccgggtgggcatggtcaactatgccagcaccgtgaagcaggagttctcgctgcgggctcatgtctccaaggccgcactgctgcaggctgtgcgccgtatccagccgctgtccacaggcaccatgaccggcctggccatccagttcgctatcaccaaagccttcggcgatgcagagggtggtcgttccaggtcccctgacatcagcaaggtggtcatcgtggtgacagacgggaggccccaggacagcgtgcaggacgtgtctgcgcgggcccgggccagcggcgtcgagctgttcgccatcggagtgggcagcgtggacaaggccacgctgcggcagatcgccagcgagccgcaggacgaacacgtcgattacgtggagagctacagcgtcatcgagaagctgtccaggaagttccaggaggccttctgcgtggtgtcagacctgtgcgccacaggggaccatgactgtgagcaggtgtgcatcagctcccccggttcctacacctgcgcctgccacgagggcttcactctgaacagcgacggcaagacctgcaatgtctgcagtggtggtggtggcagctcggccactgacctggtcttcctcattgacggatccaagagtgtgaggccagagaactttgagctggtgaagaagttcatcagtcagatcgtggatacgctggacgtgtcagacaagctggcccaggtggggctggtgcagtactcaagctctgtgcgccaggagttccccctgggtcgcttccacaccaagaaggacatcaaggcggctgtgcggaatatgtcctacatggagaagggcacaatgactggggctgctctcaagtacctcattgacaattccttcactgtgtccagtggggctaggcccggggcccagaaggtgggcattgtcttcactgatggccggagccaggactacattaatgatgctgccaagaaggccaaagacctcggctttaagatgtttgctgtgggtgtgggcaatgccgtggaggatgagctgagggaaatagcctcagagcctgtggcagagcactacttctacacggctgacttcaagaccatcaaccagataggcaagaagttgcagaagaagatctgtgtggaggaagacccgtgtgcctgcgagtccctggtgaaattccaagccaaagtggaggggctgctgcaggccctgaccaggaaactggaagctgtgagtaagcggctggccatcctggagaacacagttgtctaa

SEQ ID NO: 141879 - DNA, 956 bp, Homo sapiens
cttctctgccctgctccaggcaccaggcttttttttctcttagtggctcataggaggggacggcggcaccatggacccccgcttgtccactgtccgccagacctgctgctgcttcaatgtccgcatcgcaaccaccgccctggccatctaccatgtgatcatgagcgtcttgttgttcatcgagcactcaatagaggtggcccatggcaaggcgtcctgcaagctctcccagaagggctacctcaggatcgctgacctgatttccaacttcctgctcatcaccatgctctttatcatcagcctgagcctactgatcggcgtagtcaaggccgcactgctgcaggctgtgcgccgtatccagccgctgtccacaggcaccatgaccggcctggccatccagttcgctatcaccaaagccttcggcgatgcagagggtggtcgttccaggtcccctgacatcagcaaggacgtgagctccctccgagcagggggcttgcccgtctcagtcaccactgaatccctgggacccagcatggtgcctggcacaggatctctggtgaacgaggagaacgtgagctggggtctcctcaccaactgctcccccccaccccaacccccctgacggccagggctgtgtccagggctcagggcacaaggctccgttagctgggcagcagctggcccatgaaacagccctttcagctccacctctgaatggcagttctatgggctcctcggaagaacacaggcgccttctctgtgtcacttctccgctcattagcagagctgcagaaatacactacagaggccctgctgccacccaaagacccaaggagaacccgagggccccacgcatggtcagccaaactggaatccagggtgaggaggcgtgtgctttcatctgccggccgtctggggaggccacggagcagcagcacatccttctgatgggttaa

SEQ ID NO: 141880 - DNA, 1048 bp, Homo sapiens
ttgttcttgtttttttgagacagggtctcactctgtcacccaggctggagtaatttcttttttattttaataaaatagagacaggatctagctgtagctgggaactacaggtgccaccacacctggctcagttgtttgtttgtttgttgatttatttattgaatcagggtctcactctgttgcccaggctggtcatccactccgcacctcaagtgatcctccacactgctcagattacaggtgtgagccatcgcaaccaattgtttttactgtttttactgctgtgttttttttgagatagagtctcactgtgacacccaggctggaagtgcagtggtgcaatcgtggctcacccgcagcctcaaactcctgggctcaagcaatcctcctgcctcagcctcctgagtagctgggactacagggaaagagttggagcagtgccagcggcaagcgaacaaggtgacggaaatcacgcttaacaactttgacaaggtcctggagcatgatggaaagctggccgaactggagcagcgttcagaccaactcctggatatgagctcagccttcagcaagacaacaaagaccctggcccagaagaagtgctgggagaacatccattgccagatctacttggggctagtggtgggtggtagcctgctcatcatcctgattgagcagctggccatctttctccctcagagtgacaccagtaatgccccacagacctaggatgcaggcaccacctcagggcctggggactgacagctggtcctgagggagaagccaaatggctgcactggctggttccggtctccagagaaccttggtgtttgctctcccctgacccaccccagtgagtgccaaagggcagccccaacacgtgcacccctgcatttcttgtcatgccacagactggccctcgagggcaccctgccatactggccatgccgggccagccccacctgaagctcagtgaaagctgattaaaaaaaaaaaattatgtatagatcaaaataactacaagagtggaaattgaatattcctaaca

SEQ ID NO: 141881 - DNA, 2668 bp, Homo sapiens
gcagctactgccagatgctctcactaaaaatggtcacagatggtcagttgtccagttaacagaacatactcccctcccaatattcgaaagtaagaaggaaaggatagctgctaacacttgcctgcttagtggtgatagtggactggatgggttaggaggaccaggtgtacaactaggaagcccagataagaaaaagcgcaaggcaaatacacagggaccttctttccctccattgtctgagtatgctccaccaccgaatccaaactctgaccatctagtggctgctaatccatttgatgacaactataatactatttcctataaaccactaccttcgtcaaatccatatcttggccctggttatcctggctttggaggctatagtacattcagaatgccacctcacgttcccccaagaatgtcttccccatactgtggtccttactcactcaggaaccagccacacccatttcctcagaatcctctgggcatgggttttaatcgacctcatgcttttaactttgggccacatgataattcaagtttcggtaatccatcttataataatgcactaagtcagaatgtcaacatgcctaatcaacattttagacaaaatcctgctgaaaatttcagtcaaattcctccacagaatgctagccaagtttctaaccccgatttggcatctaattttgttcctggaaataattcaaattttacttctccgttagaatctaatcattcttttattcctcccccaaacacttttggtcaagcaaaagcaccacccccaaaacaagactttactcaaggagcaaccaaaaacactaatcaaaattcctctgctcatccacctcacttgaatatggatgacacagtgaatcagagtaatattgaattaaaaaatgttaatcgaaacaatgcagtaaatcaggagaacagccgttcaagtagcactgaagccacaaacaataaccctgcaaatgggacgcagaataagccacgacaaccaagaggtgcagcagatgcctgcaccacagaaaaaagcaataaatcctctcttcacccaaaccgtcatggccattcgtcttctgacccagtgtatccttgtggaatttgtacaaacgaggtgaacgatgatcaggatgccatcttatgtgaggcctcttgtcagaaatggtttcatcggatctgtactggaatgactgaaacagcttatggcctcttaactgcagaagcatctgcagtatggggctgtgatacctgtatggctgacaaagatgtccagttaatgcgtactagagaaacttttggtccatctgcagtgggcagtgatgcttaatcaaaggcattaactaaagtgggtttattttcctgtgcattgcagaagttcattgacacaggattttaatgttttacattatttttttaaatgcatacacaaaaacattatttacttagtttttattaatcacttcatcactagagcaaattttttattgtctttgcttgctgtcttaaatgagaataatgtatatgggggtgctttagaaacataaataaatgttagttgttgttatttatcacaaacataaaagcctcttgaaacttcaaaataatatataacaaatgtaggcaagttttaacttttaaaagttagaatcattgaaaaacatgtatttcagtgctgaactttggttgtaccatattaaagatttagttcaaaaagtttatcaaggatccacttaacacgtcttcacaacataatatatgtaactgtaacatgggggagagcatacatttttatggattaaaaaaataatagtatgacaccagattcctcctccactagggtctttggaatcaatgaatttcatatttcaagtgagttttcaggatatctgtttgtacagatacgagacagatcttagcatatagtaaattctcagtaagtattgttgattaacttgtggatggtaccacatgaaattgctaatattagatcagttgaaaattgactgcaattagtaaagttggtataacgtacgttcccagttgtgctatttagaattatgatagtattatgctcctacttttctttgatattgagttgtcttgttattgtttattgttttccagagaaatactatagtatccacagaagaattgtgaatacttttttataattttgaactgggacatattgcagatgaggaaggtagaaacatccatttggccttagagggctctgctagtaaaagaactactcagtggtggtttgaaaaatcttgttctggggatctgaatttcaaaaatgaaccctaggggagatcaaaatccattttaaacaaagatcaattaagagccaaagtgaaatctaacttgcaaacaacaatttgaagccttgcagcagacttaaggaattcccgctctgactggggaaaagtataaaaatggacctgagagtaccctctcgagggatgatcaagaatggagacagttggaggtgtgctcattaagattcaaaacagcagaaatccatttttggagcagattataacctgtggccaaaaaaaaaaaatgtgtgctgtttgacaactaatggcaatttatacaatcattggaggctggtaaagctccctaatatgttgccaccattatcactgcaacc

SEQ ID NO: 141882 - DNA, 1479 bp, Homo sapiens
atgaaactcatggaaacacttaaccagtgcataaacgctggtcatgaaatgacgaaggctatcgccattgcacagtttaatgatgacagcccggaagcgaggaaaataacccggcgctggagaataggtgaagcagcggatttagttggggtttcttctcaggctatcagagatgccgagaaagcagggcgactaccgcacccggatatggaaattcgaggacgggttgagcaacgtgttggttatacaattgaacaaattaatcatatgcgtgatgtgtttggtacgcgattgcgacgtgctgaagacgtatttccaccggtgatcggggttgctgcccataaaggtggcgtttacaaaacctcagtttctgttcatcttgctcaggatctggctctgaaggggctacgtgttttgctcgtggaaggtaacgacccccagggaacagcctcaatgtatcacggatgggtaccagatcttcatattcatgcagaagacactctcctgcctttctatcttggggaaaaggacgatgtcacttatgcaataaagcccacttgctggccggggcttgacattattccttcctgtctggctctgcaccgtattgaaactgagttaatgggcaaatttgatgaaggtaaactgcccaccgatccacacctgatgctccgactggccattgaaactgttgctcatgactatgatgtcatagttattgacagcgcgcctaacctgggtatcggcacgattaatgtcgtatgtgctgctgatgtgctgattgttcccacgcctgctgagttgtttgactacacctccgcactgcagtttttcgatatgcttcgtgatctgctcaagaacgttgatcttaaagggttcgagcctgatgaatcactggagagtctggctgaagtgcagactctgattgaggaggcctgggacacgaggcctgagattctgcatctccagagagcaacagacatgtgtcagccttattggatttctttggttcccgaacagcctgccatgaggtatgaaggacacatgaccttttatgtaattggggatgactttgacttaggagatgctgttgttgatggagaaaatggcaaggcggccagcccacaaggtaatttaattcctggtgcctgtgggcgtcctgcaaagagccagttggcgtcggaacgctcttctccaaaacctgtgccagtgcccccagcgcagacctggtgtgaaggggacctttggagaggtctcatgagcaatgccgcgtgctctgccccacaggttacttcaatgatgtggaccgtgatgacggacgctacccgcccaggcccaggccacggccgcctgcaggtaggtgccgagcctccccagatgcgacacattgaatttgcacagagagggtgggatgagaggcctgaagttggggatgagagagctgaggttggggcagagttggtgacgagcagacgataa

SEQ ID NO: 141883 - DNA, 560 bp, Homo sapiens
ctgagcttggagcccatttttttctggcagttccgctcatattttccacttgaagacatcgcctccctttcttccaagctgggagaccagaagtcaacaacaggagggtggagaggccgggtctcacaatccgcttggctggggagtccactgaggttcttgcatcctgaagcaaaccatggagagctggtggggacttccctgtcttgcgttcctgtgttttctaatgcacgcccgaggtcaaagagactttgatttggcagatgcccttgatgaccctgaaacccaccaagaagccaaactcagatatctacccaaagccaaaaccaccttactacccacagcccgagaatcccgacagcggtggaaatatctacccaaggccaaagccacgccctcaaccccagcctggcaattccggcaacagtggaggttacttcaatgatgtggaccgtgatgacggacgctacccgcccaggcccaggccacggccgcctgcatgaggtggcggcggtggctactccagttatggcaactccgacaacacgcacggtggagat

SEQ ID NO: 141884 - DNA, 1038 bp, Homo sapiens
atgggttccgaggagcagatcatgcaccagggcggcctgctcagctctggtgtctgcagccccgtggaaaataaaccccgtgaaagcaatggcgtcatgtgcaacccgaccttggagacagagaccccagagttagcgttgtctacctgggacatctcccagcccaggggtcttactccagacccgtgtctcgactggaactgctggcagccttggaggggagatgttgcacagatccaagaggctgacacggttcctgtcccccagcccagtctgagcagcttggaccatgatgatcaagagcgctggaggaggccagacacattcattagattaactgcttttggatcaggtcaaagagactttgatttggcagatgcccttgatgaccctgaacccaccaagaagccaaactcagatatctacccaaagccaaaaccaccttactacccacagcccgagaatcccgacagcggtggaagttacttcaatgatgtggaccgtgatgacggacgctacccgcccaggcccaggccacggccgcctgcaggaggtggcggcggtggctactccagttatggcaactccgacaacacgcacggtacccctacatctgggcatgcgatggccctggtgtctggtgttcccttctttgtgtccatgttgtcaatcgagaaaaatgacgagacgagcgtaaaagatttatttgccaaagttaaggaagaatgtgggctcagagcatggccccaaataggtgacgttggtaaagcaggtttaacgggtggcaagccaggtgatgagagggagacaggaagaggcctgcttagcaagggggtccttgttatgcagatgaaggttcccagacctgtaaaggtgtcagagtctccgtttctctctcctacatccaggaaaagcttagaaagggaaggcctggctgcaacagcaaagatcctctacagatgccaatttccccacctcagtctgctggccctggagcggcaatttcaaaataaggcaaagcaatatattttggagtaa

SEQ ID NO: 141885 - DNA, 392 bp, Homo sapiens; identical to SEQ ID NO: 128010

SEQ ID NO: 141886 - DNA, 403 bp, Homo sapiens; identical to SEQ ID NO: 128011

SEQ ID NO: 141887 - DNA, 438 bp, Homo sapiens
  misc_feature (1)...(438): n = a,t,c or g
taattggaaacccaaantgctcaggtttanacaacattacactaaagttgggcccctngttngttaantcctaagggtttaaggaaantctggaantaaggtggnctccaggttntggtggtnnactgccaagatncctttggggnaacgggttccanagnagggtcaggggtcaagactgcaggctggncatcaccatatatcactcagttccttctggaggtcatccttccagcagccactggcctcctgcggtatctcttcagtctccggacaggcggctgtctcatgaccctgctgcttcatcttggtcaggatntgtcccggatctcctgggccagcagctgcaggcagcgagtggtgcgggcccgctgcatctccttactgtcacgcagggtcttctccagcccctgaaggccttgggtcagggccccatac

SEQ ID NO: 141888 - DNA, 576 bp, Homo sapiens
gggccgctcttgctgaaaggtggctgggagaggtcctggtcagagtcggagtcagagtcccaggagggagtggagggctcaggcactggtgcccttgtggcctcttaggtcgaggcttgggacaggcccccgagcacaaagtgaggctgtctatggagttctgcagcacgtgcacagcagaccatatatcactcagttccttctggaggtcatccttccagcagccactggtccctgcggtatctcttcagtctccggacaggcggctgtctcatgaccctgctgcttcatcttggtcaggattttgcggcatttcacctgcgttttctgcattttctgaatgttcaccaagttctctgagatctcatcctcctgcgcttcttcaagctgctgaatcttgatttgctgcaagcagctctccttctccaacatggtcactgagtggttcaggaactcgaaagccttggtctgggcctgtaactggctcttgagtgactcaagttcacatcgcaggagcttctgggagtcgggaatcatcacaatggtcttggctttgactttggaagagctggtctc

SEQ ID NO: 141889 - DNA, 426 bp, Homo sapiens
gacgaattattggttgggggaaacccacgaggggacgcggccgaggagggtcgctgtccacccgggggcgtgggagtgaggtaccagattcagcccatttggccccgacgcctctgttctcggaatccgggtgctgcggattgaggtcccggttcctaacggtgggatcggtgtcctcgggatgagatttggcgtttcctcggggctttggtgggatcggtgtcctcaggatgagatttagggtttcctcggggctttcgggatcttcacctaatatccggactgcaagatggaggaaggcgggaacctaggaggcctgattaagatggtccatctactggtcttgtcaggtgcctggggcatgcaaatgtgggtgaccttcgtctcaggcttcctgcttttccgaagccttccccgacatacctt

SEQ ID NO: 141890 - DNA, 460 bp, Homo sapiens
gcggccgctcttgctgaaaggtccgctgggagaggtcctggtcagagtcggagtcagagtcccaggagggacgtcggagggctcaggcactggtgccctctgtggcctcttaggctcgaggccttgggacaggcccccgagcacaaagtgaggctgtctatggagttctgcagcacgtgcacagcagaccatatatcactcagttccttctggaggtcatccttccagcagccactggctccctgcggtatctcttcagtctccggacaggcggctgtctcatgaccctgctgcttcatcttggtcaggattttgcggcatttcacctgcgttttctgcattttctgaatgttcaccaagttctctgagatctcatcctcctgcgcttggaagcttctgatagatgaaggtcactcctcccgcaccagttccagctcctcccacaggaacttcttgctgt

SEQ ID NO: 141891 - DNA, 1732 bp, Homo sapiens
  misc_feature (1)...(1732): n = a,t,c or g
ccgccgccccccaaatgagtctacagtaagagacggcgaantaaggcacagcccatggagatgtggaagtagaaggggaagagtttgctctgcactaattcttagggatccagttctgacagccaagaccactcctgtcataaaataataccggatattaagagaagatcccgaaagccccgaggaaaccctaaatctcatcctgaggacaccgaacccaccaaagccccgaggaaacgccaaatctcatcccgaggacaccgatcccaccgttaggaaccgggacctcaattcgcagcacccggattcctagaacagaggcgtcggggccaaatgggctgaatctgccaagaccattgtgatgattcccgactcccagaagctcctgcgatgtgaacttgagtcactcaagagccagttacaggcccagaccaaggctttcgagttcctgaaccactcagtgaccatgttggagaaggagagctgcttgcagcaaatcaagattcagcagcttgaagaggtgctgagccccacaggccgccagggagagaaggaggagcacaagtggggcatggagcagggccggcaggagctgtatggggccctgacccaaggccttcaggggctggagaagaccctgcgtgacagtgaggagatgcagcgggcccgcaccactcgctgcctgcagctgctggcccaggagatccgggacagcaagaagttcctgtgggaggagctggaactggtgcgggaggaggtgaccttcatctatcagaagctccgtgagttcctggagcccacagccgaagcgcaggaggatgagatctcagagaacttggtgaacattcagaaaatgcagaaaacgcaggtgaaatgccgcaaaatcctgaccaagatgaagcagcagggtcatgagacagccgcctgtccggagactgaagagataccgcagggagccagtggctgctggaaggatgacctccagaaggaactgagtgatatatggactcaccccaccacggcccccaaccttagctgtactgctgtctacaccctgagcagtgtggagtctcccagcgcccccagctccttgtcttcttgcaggtctgctgtgcacgtgctgcagaactccatagacagcctcactttgtgctcgggggcctgtcccaaggcctcgagcctaagaggccacaaggggcaccagtgcctgagccctccactcccctcctgggactctgactccgactgtgaccaggacctctcccagccacctttcagcaagagcggccgctccttcccacccggcccggccgaccgcgtctcggtcttcgcgtctgccagcctggctggcagtccgtctgtccatcccgccgcgccggggcagtctaggcggagcgggggctcaggcggcggcggcctcgacgcgctttacctgctgttcctgagccttacgctggccactgtcaacgcccgctggctggaaccccgcaccacagctgccatgtgggccctgcaaaccgtggagaaggagcgaggcctgggtggggaggtaccaggcagccaccagggtcccgatccctaccgccagctgcgagagaaggaccccaagtacagtgctctccgccagaatttcttccgctaccatgggctgtcctctctttgcaatctgggctgcgtcctgagcaatgggctctgtctcgctggccttgccctggaaataaggagcctctag

SEQ ID NO: 141892 - DNA, 562 bp, Homo sapiens
gcgaccgctcttgctgaaaggtggctgggagaggtcctggtcagagtcggagtcagagtcccatgtggggagtggagggctcaggcactggtgcccattgtggcctcttaggctacgaggccttcgggacgaggcccaccgacgcagcaaacgtgacggactagtcgtataggacgttcgtagcagacgacgatgcgacacgcacgaacctagcaacgaacgacaagcgagctagggggcgctagggagactccacactgctcagggtgtagacagcagtacagctaaggttgggggccgtggttggggtgaagtcctaagggggtgagggaagtctggactcaggtgggctccaaggttctggttggtcacttgccagatcccatttgggggaaccgggttcagaggagggttcaggggttcagacttgcaaggcttgggcatcaccatatatcactcagttccttctggaggtcatccttccagcagccactggctccctgcggtatctcttcagtctccggacaggcggctgtctcatgaccctgctgcttcatcttgg

SEQ ID NO: 141893 - DNA, 1074 bp, Homo sapiens
ttccagccagcgggcgttgacagtggccagcgtaaggctcaggaacagcaggtaaagctggctggcctcccagaatgtgagctgagcccaagcatgctgtgaagccaagatgcagaggttgatgaaggcacagcccatggagatgtggaagtagaaggggaagagtttgctctgcactagtccgaaggtatgtcggggaaggcttcggaaaagcaggaagcctgcagggtatggggaccacaggggtgttagggcacttcccggttcccctcttatttccatccccaccccaggtacccatgacatccaagctgagggtccctacctgagacgaaggtcacccacatttgcatgccccaggcacctgacaagaccagtagatggaccatcttaatcaggcctcctaggttcccgccttcctccatcttgcagtcctgggaaggaggcaccgggtggctcagaactttacctttgcctcatgcgtggccttcagaccctgtgagcccgctcggggacagggttgcggccaatccagcatagattctgacaaagcatcccgggaatgagagtgagaaaggcccaaagcagtcaaggcccaaagacacccctcgaccccctctctccaaatgtcagccctcaagatctcaggctctctggacctcaatctccatgccacttcagaggccccaaattttcagccacagcagctccagatcatagccctaggtcttcagagatcactccactaattcccaaatatcaaccccagggatccagttctgacagccaagaccactcctctcataaaataataccggatattaggtgaagatcccgaaagccccgaggaaaccctaaatctcatcctgaggacaccgatcccaccaaagccccgaggaaacgccaaatctcatcccgaggacaccgatcccgccgttaggaaccgggacctcaatccgcagcacccggattccgagaacagaggcgtcggggccaaatgggctgaatctggtacctcactcccacgcccccgggtggacagcgaccctcctcggccgcgtcccctcgtgggtt

SEQ ID NO: 141894 - DNA, 792 bp, Homo sapiens
  misc_feature (1)...(792): n = a,t,c or g
ctagttggcctgggcattggtggtaaatgtggaggggcctctctgacgaatgtcctcgggctgtcctccgcatacctccttcacgttggcaacctgtgcctggtgatgggatgcatcacggtactgcttggctgtgccgggtggtatggagcgactgtcccggatctcctgggccagcagctgcaggcagcgaagtggtgcgggccccgctgcatctcctcactgtcaacgcagggtcttctccaagcccctgaaggccttgggtcagggccccatacaagcttctgccggccctgctccatgccccactttgtgctcctccttcctctccctggcggcctgtgnggcctcagcaccttcgttcaagctgctgaaatcttgaattttctgcaagcagctctcccttctcccaacatggtcactgagtggttcaggaactcgaaagccttggtctgggcctgtaactggctcttgagtgactcaagttcacagtcgcaggagcttctgggagtcgggaatcatcacaatggtcttggctttgactttggaagagctggtctccaagggcctggcctgcagtctgcagtcctcactgtgtccccagaagcagggcatcccaaggtctctggctctggagtcctggaccagtgagctgtatgcttccagagccttgtccgaggaagagccacataccacctgttcatgctctcccatcagggaccacgaagccagtcctcagctgtgacgctgaagtaagataacgcggggacaccatcgtattaaaacgctcag

SEQ ID NO: 141895 - DNA, 1127 bp, Homo sapiens
cggagaaacactgaaaagactcgccccattttattcgtcctacaggggaaggccctagaaaattccaggccccatagatgtggcagtaaggaataggcaggtgatcttggggtatttcggaagaagcatttattagcatgcagggcgccatgctagaggctccttatttccaggggcaaggccaagcgaaacaagagcccattgcgtcaggacagcacgcccaaattgcaaagaagaggacacgcccatggtacgcggaaaaaattctcggcggagagcactgtacttggggtccttctctcgcagctggcgggtaagggatcggggaccctggtggcttgcctggtacctccccacccaaggcctcgctccttctccacgggtttgcaagggccccacaatgggaagctgtggtgccggggtttccagcctagccgggccgttgaacagtggccagcgtaaggcttcaggaacaggcaaggtaaacgcgggctgggcctccccagaatagtgggttgagccccaagcatgcttgtgaagccaaagatgccagaggttgatgaaaggcacagccccatggaagatgtgaagttagaaggggaagagtttgctctgcactaggtccgaaggtatgtcggggaaaggttcttgaaaaacacaaaaaccttaagacaagggtcccccacatttgcatgccccaggcacctgacaagaccaagtagatggaccatcttaatcaggcctcctaggttcccgccttcctccatcttgcagtcctgggaaggaggcaccgggtggctcagaactttacctttgcctcatgcgtggccttcagaccctgtgagcccgctcggggacagggttacggccaatccagcagagattcggatattaggtgaagatcccgaaagccccgaggaaaccctaaatctcatcctgaggacaccgatcccaccaaagccccgaggaaacgccaaatctcatcccgaggacaccgatcccaccgttaggaaccgggacctcaatccgcagcacccggattccgagaacagaggcgtcggggccaaatgggctgaatctggtacctcactcccacgcccccgggtggacagcgaccctcctcgtct

SEQ ID NO: 141896 - DNA, 669 bp, Homo sapiens
atgcgggatctgagtgacaggtgttacaagaaggaagagcaggcacaaagttctggaggtggaactgtgccttgcattttctggtggttggagagaagtggaacaggcaaaagggggacagcagaaccagaagaggtctttcagagcataatggcgataagaggctggtgggaaggggcagataacattcaacaaacagttgtgtgtttgtatttgatgagtgaagagactacccgaatgagaaggaaccagaaaaccaactttggtaattaatatgacaaaacaaggctctttgacactccccaaaaaatcacactagctcaccagcaatggatccaaaccaagaaaaaaatccctgattaacctgaaaaagaattcaggaggttagttattaagctaattagggaggcaccagagaaaggtgaagcccaatgcaaggaaatccaaaaatcaatacaagaagtgaagggagaaatattcaaggaaatagatagcttaaagaaaagacaattaaaacttcaggaaatattggacacacttatagaaatgcaaaaagctctgggaagtctcagcaatagaattgaacaagtagaagaaagaaattcagagcttgaagacaaggtcttcgacttaacccaatccaacgaagacaaagaaaaaagaatatga

SEQ ID NO: 141897 - DNA, 416 bp, Homo sapiens
gtttctgtagttctctaacatcacattcctatataaattctgctgtgcagtgtccagacattgccactcctccggagagaattctatggccacatccctaaatgtcaacagtccctcaacattatatgttctccatcttcactaagaatcccaggttttctccatagaaatagattatccacacctttccatgttcaacagccacaaagagaacatttttaatattgcagatcacaaattcatggtgagaattctgcatggcatataagaagccatcatgcagagaaggctcatttctaggcttgcaggggttcctggcatcttagctgtggctctccaatacctgcaggtcacagggccacacaggctgggcctcctggagcagaggacacagagcagtgaagtcgagacctgga

SEQ ID NO: 141898 - DNA, 428 bp, Homo sapiens
ctcgctgcagccggagctccaggtctcgctttcactgctctgtgtcctctgctcctagaggtccagcctctgtgggcctgtgacctgcagaaattgagagatccacagctaagactccaggaccccctggaagcctagaaatgggactgttgacatttagggatgtggccatagaattctctctggaagaatggcaatgcctggacactgcacagcggaatttatataaaaatgtgattttagagaactacagaaacctggtcttcctgggtattgctgtctctaagcaagacctgatcacctgtctggagcaagaaaaagagcctttgactgtgaagagacatgagatggtgaatgaacccacagggcccagacagaagagaagagtcacatcatctagatgatgaatgaaaagatatgtcattatt

SEQ ID NO: 141899 - DNA, 719 bp, Homo sapiens
atggtaccaccctcttgtacctctggtagaatcagtgtaatccttgctggccatgtgtggcgcctggatctgaatgctggtatgctagaaagggcacgagaaggtggggttttaaaagttatccaatcagcgacgctgggttgggaaccgtccaatcaggcctgcagctggagcggacaggacggcttcggggatgtggcggggcctttgtctctcgctgcagctggagctgcaggtctcgccttcactgccctgtgtcctctgctcgcagaggcccagcctctgtggccctgtgacctgcaggtattgagagatccacagctaagacgccagaaatcaaccaaaagtcaacgcaccaaaaagaaacgaacgaaccggttcattcattttgtaacgcctaaaaggggtgttcactataagaaatgttacacgaaatgtacaagaaatgttacacgaaatgtacaagaaatgttgcacgaaatgtaccacgaatgttgccggaaacgttaccagaaatgttgccgaaatgttacacgaaatgtgtctgggttaggagccaggcgtcgaactcgtgaaccggatcacatcgttgggaacgactgctttacaattaaggtacggggactaccgatttgccgctatacccggttaatccttcgaaacggtggtgaaacggggatggcagttccccgccgggttgaacgtgtgccagtacccac

SEQ ID NO: 141900 - DNA, 2649 bp, Homo sapiens; identical to SEQ ID NO: 138844

SEQ ID NO: 141901 - DNA, 2203 bp, Homo sapiens
ctgcatcggcaagccggggggaaaactgataccccagtagacaaaacagaccgaaaataatatcgctgctacccgcagtgtctgtcatgatatcaactggatacagccctgtctgctgctcaagaagtccttccagtacaaaaatcgaatcccgtaatgtaccgggtaccacaatgccatggaacccagagtactgatcagatacgaagttataccaggtgatgcctcgtccagaaccaaaatattttctgttagatcctgagttgatggtcttcactggtgtgacaaagcgcatgccgtcagctgatgccacttctccacctccccaacgaccagcaagctccagtgtggactgaaaatcaaccaggcgggcattggcgctgaccagcgtttctgcacgaaggtaattctgtttcacccaactgagccgatggcgggtcagtgctggtatattgtgctttatcagcggttccagtccgatattacaggcttcagccatcaataccgcacataaactgatgtgcaaatcttgcgctcgagcaccagattcactgacatgcgcaaactcatgtgtaaatcctgtctgggcatctatctcaagtaacagttccgttaaatctaccggtgggagtagctgtttgatccgattatttagacgaagcaatgatggtggctcttcctgtttctccagacaactgatagtcagggatggatatttaccttcattacagatatgaacttccgcattcttttcaaatcgtgatgccacggctttccaggtctcatccagctgaatagccagttgttgcacacctttacgtccatcgacaggatgtcccagtgcccgacagacaggaatacgctgagtctgccactcttcaccttgcaacaacttctcgcgaggatctccccagcgatcactgcacgctgtatccgtccctccgcatcgtatacgaggcgtttcccagggaccggtgataatatgttcaggcgcatcatcaaggatgcgctttttcgaaccattcagttctgccagataatgaatcgcagccagtacatgttcacctgccggtgccgcacggaaatgcaggtcccgcaacaccgccggaagaaaacgtttaacccgaccgtactgctcaaccatttcgtcatggaaattattgttctgtggacgagcaagttcattaaccttgcttacagattctgccagtctgtttttgggtacgcacttgaagataacctgcctgagatctgggacatctgtattatcatccagcaacaatgcacatgcccgcgccagtaacaatgcggcctgatcaagatctttcagtgtcctgagtctttttttttgcccggttttctttgcttcgcggataatgtccagaattagcatatcaagcacatcaacggcatcgtctaatgccgttatttcctgtgctttaacgaatgcagtaagtacagcaagctttctctgctgtggcattcgagcgatatattttaccgacgccatgccagcataacgagccagattacgcagttgaatggcaggcagaccggaaaagttcagtcgggaaaactcaagacttcgtaatcggatatatcgttccagcgcttcattaaacgcaggtccactgactgtaacagggccttttttcaactgttccagtgctgatacacgctgaccttccggaatgaccagaagctccatcacttgagctgcctgccatttgttcggcagtgcggccagctttttccacagccgctgatttgccctttcacgaatttcactgatgagacgtactagtgtggttgctccgggcagtaataccttattttgaagcaaccatgcagtggcaaaatcaaacatcagacccggtcgctcattactgagccacgcccgggtatatagcagacgcttcaggcggaaagaccatggaaaatcaccaaattcatgatagccgtaatattccttaattaatgcagtatgttctctaagggtagtgtcccgttcagcatagcgggagagaacttctggacggtggatattaagctgtaccgcgacaaaatgttgaacaccaggcagaacctgagttaaatccgtcagaaatgttcccagaaaacgggctgtggtgagctgaagcgcaatgcccagcctattatgtgtgccccgtcgttggttaatgataggccagatcccgttcat

SEQ ID NO: 141902 - DNA, 499 bp, Homo sapiens
atgcaggccaatagggcgcgtacccactacaggtccggcaatattaatgtgttacagcaggcctgcccacaagaggtgtggatcaaccccattgatgctcaggcacgcggtatccgtcatggcgataccgtgcgggtatttaacaataatggagaaatgctgattgccgcaaaagtgactccgcgtattctgcctggcgttaccgccatcgggcaagcgccacgtctgtgccgctacccattgcaatcccgatggcggcagtttcatcgctggcgcgtcgttaataccgtcaccgaccatcgccagcgcatgttgattcagctcggtcaccgctttgactttatcttccggcaacaggcccgctttaaactccagccccagctccccggcaattgcgcccgctgcgcgtggattatcgccggtgaggatcacccctttgacgcccagcgcgttcagttcactgatggcagttgcagcatcggcgcgcaggggtatcctg

SEQ ID NO: 141903 - DNA, 1116 bp, Homo sapiens
atgtccatccgttttgcccgcaaagccgactgtgctgccattgcggaaatttataaccacgccgtgttgtatacggcggctatctggaatgaccaaacggtggatgctgataaccgcattgcgggtttttgcgaagaccgctgtactggctgtaaaacctgcgaactggcgtgcaaagattttaaagatcttggcccggaagtcagtttccgccgtatttatgaatacgctggcggcgactggcaggaagataatggcgtctggcaccagaacgtgttcgcttattatctctccatctcctgtaaccattgcgatgaccccgcatgtacaaaagtctgccccagcggcgcaatgcataagcgtgaagatggctttgtggtggttgatgaagatgtttgtatcggctgccgctactgccacatggcttgtccgtacggcgcgccacagtacaatgctgaaaaagggcacatgacgaaggtttgcactgttcgctttaatcagggcgaagttggcacctgtccgagtcgtgctttagtgcaggaatctatctacgaacgctttatggaacgcgccatccgccgtgtcgaaagcattcgtagcggtaacccgctcgacagcgtgacgcaaatgggcgcgcaggtttctcacgggcaactggaaaccatcctcaactacattgatatcggtaaaaaagagggcgctgacgtgctcacaggcgggcggcgcaagctgctggaaggtgaactgaaagacggctactacctcgaaccgacgattctgtttggtcagaacaatatgcgggtgttccaggaggagatttttggcccggtgctggcggtgaccaccttcaaaacgatggaagaagcgctggagctggcgaacgatacgcaatatggcctgggcgcgggcgtctggagccgcaacggtaatctggcctataagatggggcgcggcatacaggctgggcgcgtgtggaccaactgttatcacgcttacccggcacatgcggcgtttggtggctacaaacaatcaggtatcggtcgcgaaacccacaagatgatgctggagcattaccagcaaaccaagtgcctgctggtgagctactcggatctttag

SEQ ID NO: 141904 - DNA, 1488 bp, Homo sapiens
ttagcgggtgtccgtgtcctttttgtctggccgtgtttgcgtcacattgttctgttccgtgcgtgtatctccctgaattctgttggaataaccggtgaatttccgcccttttgtagtgatgctgaataccgcgtctctttcaagatcccggttgccgccatcaaaccgatcagaggcgtaaaaataccctggctcttcctgtttctccagacaactgatagtcacggatggatatttaccttcattacagatatgaacttccgcattcttttcaaatcgtgatgccacggctttccaggtctcatccagctgaatagccagttgttgcacacctttacgtccatcgacaggatgtcccagtgcccgacagacaggaatacgctgagtctgccactcttcaccttgcaacaacttctcgcgaggatctccccagcgatcactgttttcaagccagatgtcccggcggcgcagtgcatcctgaaggcgttccagcaaacatagtgaataacctgcacgctgtatccgtccctccgcatcgtatacgaggcgtttccagcgaccggtgataatatgttcaggcgcatcatcaaggatgcgctttttcgaaccattcagttctgccagataatgaatcgcagccagtacatgttcacctgccggtgccgcacggaaatgcaggtcccgcaacaccgccggaagaaaacgtttaagccgaccgtactgctcaaccatttcgtcatggaaattattgttctgactgccggacgtattgatgccgcgttccaggatgaggtcgctgccagcgaaggtttcctcaaacaacctgtcggtaaagattacaaattcggtggcccgtctgttaaagatgaaaaactgtttggcgtagggaccggcatgggccatcataactaactctctgtctaaacctctatccagcatctcctgagcaatacgcagggcttcttcgtgtttgccctgcattgcgccttcttcacgtaatctgtcagcaatggtcatcagtttctccttttcttgtggtgcgcgttccgctatctcaccaataaatgcacgaaaacgctgggcatcccctgtttgtaatacgtaattaaacagggcttttagctgtctgtcattagtgttccctgtaactagcagcgaaacaatttggtcgactaatcccaacagatcgcgctgacgaatatgtttctgaattaactccaacagcgccattttgcggtgttgcataatctcgtcatccggcaccacggtaatatccaccaacggaaaagccgatgaatatattttgcgggctatagcaggctcgacaaattggggatcgattcgacttgcgagaaactgtagatccagctcttcttcgtctggtgtttccgtcatcaaggcccatcgttgctggctggcaacgatggtttgtgccgcgccagccttgcgcagctcatagctatctttgcctggcttatcaacatacat

SEQ ID NO: 141905 - DNA, 2700 bp, Homo sapiens
atgacagacttaatccaacgccctcgtcgcctgcgcaaatctcctgcgctgcgcgctatgtttgaagagacaacacttagccttaacgacctggtgttgccgatctttgttgaagaagaaattgacgactacaaagccgttgaagccatgccaggcgtgatgcgcattccagagaaacatctggcacgcgaaattgaacgcatcgccaacgccggtattcgttccgtgatgacttttggcatctctcaccataccgatgaaaccggcagcgatgcctggcgggaagatggactggtggcgcagcacagcgaatttgtggatttctttgccacctataaagcgacgttgcccgcgattggtcgtttgatgaaagtgtgccgtgcgcgcgttgtaccgctgtttccgatttatgatggcaagacgcatcgtctgacgattcaggtgcgcccaccgatggatgatctgttagaggcggatgatcatacgattgcgcggcggatgaatgaagaagtcgagatttttgttgaacgtgtgggccgccagttgatgcaaaacatcccagcctggacctataaaggccgttggtggcagcgttttggctggcgcaaacgccgtgccattgaactgctgcaccgcgtggggattaaagatcacaaagatgcgatgcgcagttttccctatgagttgaccgaaggtgaatgtcagaaagtgatgatagccattgcactggcgaatcaaccgcgtctgctgattgctgacgaaccgaccaactcaatggagccaacaacccaggcgcaaatctttcgcctgctgacgcgtctcaaccaaaacagcaataccactattttgcttatcagccatgacttacaaatgcttagccaatgggcggataaaattaacgtgctttactgcggtcaaacagtggaaaccgcgccgagtaaggagttggtgacgatgccacatcatccttatacccaggcgctgatccgcgcgataccagacttcggcagcgcgatgccgcataaaagtcgcctcaatacgctgcccggcgctatcccactgctggaacagttaccgattggttgtcgtctggggccacgttgcccgtatgcacaacgagaatgcattgtgacgccacgtttgacgggggcgaaaaatcatctctatgcctgtcatttcccgctgaacatggagaaagataaaacgttccgctaccggaccggctggtttcgtcgtcagaccgtagaagcggtaaaacccttgagctttacgctacgtgaaggccagacactggcgattattggcgagaatggttcgggtaaatccacgctggcaaaaatgctggcgggaatgatagagcctaccagcggcgagttattgattgacgatcatcgaccgcatttgggccattattccaacgggggaaggtactttccccagccccggggtaaagatatatttcgcctcgaccatcgggtccaacagctgcgccagcttcactcgctgcgcagggaaacattcgttgatatcccgcaggcagcatgcacagttttggcccccaccccgccccgcgtcgcatccgacaatgtgcaggcgttgatgccggatgcggtgcaagcaccttatccggcctacagaccggagccaaacatgcaaaccatcaccatcgccccacccaagcgcagctggttctcgcttctgagctgggccgttgtactcgccgtgttggtcgtctcgtggcagggcgcggaaatggccccgcttacgctgatcaaagacggcggcaacatggcgacgttcgccgccgacttcttcccgcccgatttcagccagtggcaggattacctcaccgaaatggccgtcacgctgcaaatcgccgtctggggcaccgcgctggcggtggttctctccatcccctttggcctgatgagcgccgaaaacctggtgccgtggtgggtttaccagcccgttcgccgcctgatggacgcctgccgcgccattaacgaaatggtcttcgccatgctgttcgtggtcgccgtcggcctcggcccgttcgctggcctgctttccgaagcggtggaagcgattgagcccggcccggtggaaggcattcgcgccaccggtgccaacaagctcgaagagatcctctacggcgtgctgccacaggtgatgccactgctgatctcctactccctctatcgcttcgaatccaacgtccgctcggcgaccgtcgtcggcatggtcggcgcaggcgggatcggcgtcaccctgtgggaagcgattcgcggtttccagttccaacaaacctgcgccctgatggtgcttatcatcgtcacgtggctttccttgctgattcatgggctggttgccgctgttattttactcatgccctggccactcagttacaccccgttatggatggtgttactttcgctggtggtgtttgattgcgttcgcagccagcggcgtattaatgctcgccagggggaaattcgcttgttgatggacgggcgtttgcgttggcaagggcaggagtggagcatcgtcaaagcaccgtggatgattaagagcggcatgatgctgcgtttacgttctgatggcggtaaacggcaacatttatggctggcagccgacagcatggacgaagctgaatggcgggatttacggcggattttgttgcaacaagagacgcaaagataa

SEQ ID NO: 141906 - DNA, 2001 bp, Homo sapiens
atgcccagtttgttcgcctggttgggttatctggtgtgcactgtccttacccttctggtttctcgtcgggttgataaccctttcttattgtctggtgaccgtgacacccctttggaaaggcctctaaaccctctgagttatatacttacgatggatgaattgtgtgaggaaacaagtaatgttggggacaaagtgcggttgcatgacagagaccagaattcaagagatgacgtaggagagagaaacaacaagagaaacaacagtgctggcaatggaaacctcacatcaaggattgaattagcgccaggtgtgcgtactacgctgtttatcccggtgcgagcattgccgggttatggcgatggagaaattcaggccaccattagcgggttagcgttaccgggtgaaaccgttgccgatcagcataagcagtggaaaatcggcgtccgtccggcgttcccggcacaaacggttaattacggtacggcgttacagcctgcaatatggcttctggcagaagatattaaagtcgcgttcgtgggcgcaatgtccggtccggttgcgcagtacggtgaccaggagtttaccggcgcagagcaggcggttgcggatatcaacgctaaaggcggcattaaaggcaacaaactgcaaatcgtaaaatatgacgatgcctgtgacccgaaacaggcggttgcggtggcgaacaaagtcgttaacgacggcattaaatatgtgattggtcacctctgttcttcatcaacgcagcctgcgtctgacatctacgaagacgaaggcattttaatgatcaccccagcggcaaccgcgccggagctgaccgcccgtggctatcagctgatcctgcgcaccaccggcctggactccgaccaggggccgacggcggcgaaatatattcttgagaaagtgaaaccgcagcgtattgctatcgttcacgacaaacagcaatacggcgaaggtctggcgcgagcggtgcaggacggcctgaagaaaggcaatgcaaacgtggtgttctttgatggcatcaccgccggggaaaaagatttctcaacgctggtggcgcgtctgaaaaaagagaatatcgacttcgtttactacggcggttatcacccggaaatggggcaaatcctgcgtcaggcacgcgcggcagggctgaaaactcagtttatgggtgaagatggctttgtggtggttgatgaagatgtttgtatcggctgccgctactgccacatggcttgtccgtacggcgcgccacagtacaatatgcgtgtcgcgttgtgtctccccgcttgctctttggtggcggtgttgctgcgtaggcgcgccccgccccctcgaattcgtgcctgtttgctggcgcccgtgcgggcgttatccccccgtccgtgcagctattttttacggcccacccagcaggctggtggtcgatggtggaaaggtagaactgacgctgcaaagggggaaacgcttcagcctgatgtggtgatttacggtattggtatcagcgccaacgagcaactggctcgcgaggccaaccttgatactgccaatggcattgtcattgatgaggcttgccgcacctgcgatcccgcgatctttgccggtggcgatgtggcaatcactcgtcttgataatggtgcactacaccgctgcgaaagctgggaaaacgccaataaccaggcgcaaattgccgctgccgcaatgttagggctaccgctaccgctactgccgccgccgtggttctggagcgatcagtacagtgataacttacagtttattggcgatatgcgtggcgatgactggctttgtcgtggcaacccggaaactcagaaggcgatttggtttaatctgcaaaacggcgtgcttatcggtgcggtcacgctgaatcaggggcgtgagattcgcccaattcgcaaatggatccagagcggcaaaacgtttgatgcgaaactgctgatagatgagaacatcgcgcttaaatcactgtaa

SEQ ID NO: 141907 - DNA, 3009 bp, Homo sapiens
ttaaggagataattcgttgtttatatttaaatttagagctctcagttccccttttaaaatatcctctggcaacgtgaatgtataatggcccaacatattgatatgcccgtgcatcaggggagatagccgagcgatatcttcatctataatttcttcgccattacggcgcatccagctcaacgcttcctccatatagagcgtgttccacagaaccactgcattagtaaccaggcccagcgcccccagttgatcttcctgcccttcacgataacgctttctgatctctccgcgttgtccgtaacaaatcgcacgagccacagcgtggcggccttctcctcgattaagctgcgtcaggatccgccgacgataatcttcatcatcaatataattgaggagatatagcgttttgtttacacgccctacttccataattgcctgtgccagtcctgatgggcgcgagcttttcagtaaagagcgaatgagttctgacgcatgaattgtacccaacttcagcgaaccagcggttcgcatcatctcatcccactgactctccgcttttgacagatctgcatatcctcgggccaacttatccagtactccgtagtttgccgatttattcacccgccagaacaccgcctcacctgcatcggcaagccggggggaaaactgataccccagtagccagaacagaccgaaaataatatcgctgctacccgcagtgtctgtcatgatttcaactggattcagccctgtctgctgctcaagaagtccttccagtacaaaaatcgaatcccgtaatgtaccgggtaccacaatgccatggaacccagagtactgatcagatacgaagttataccaggtgatgcctcgtccagaaccaaaatattttctgttagatcctgagttgatggtcttcactggtgtgacaaagcgcatgccgtcagctgatgccacttctccacctccccaacgaccagcaagctccagtgtggactgaaaatcaaccaggcgggcattggcgctgaccagcgtttctgcacgaaggtaattctgtttcacccaactgagccgatgggcggtcagtgctggtatattgtgctttatcagcggttccagtccgatattacaggcttcagccatcaataccgcacataaactgatgtgcaaatcttgcgctcgagcaccagattcactgacatgcgcaaactcatgtgtaaatcctgtctgggcatctatctcaagtaacagttccgttaaatctaccggtgggagtagctgtttgatccgattatttagacgaagcaatgatggtggctcttcctgtttctccagacaactgatagtcagggatggatatttaccttcattacagatatgaacttccgcattcttttcaaatcgtgatgccacggctttccaggtctcatccagctgaatagccagttgttgcacacctttacgtccatcgacaggatgtcccagtgcccgacagacaggaatacgctgagtctgccactcttcaccttgcaacaacttctcgcgaggatctccccagcgatcactgttttcaagccagatgtcccggcggcgcagtgcatcctgaaggcgttccagcaaacatagtgaataacctgcacgctgtatccgtccctccgcatcgtatacgaggcgtttccagggaccggtgataatatgttcaggcgcatcatcaaggatgcgctttttcgaaccattcagttctgccagataatgaatcgcagccagtacatgttcacctgccggtgccgcacggaaatgcaggtcccgcaacaccgccggaagaaaacgtttaacccgaccgtactgctcaaccatttcgtcatggaaattattgttctgtggacgagcaagttcattaaccttgcttacagattctgccagtctgtttttgggtacgcacttgaagataacctgcctgagatctgggacatctgtattatcatccagcaacaatgcacatgcccgcgccagtaacaatgcggcctgatcaagatctttcagtgtcctgagtctttttttttgcccggttttctttgcttcgcggataatgtccagaattagcatatcaagcacatcaacggcatcgtctaatgccgttatttcctgtgctttaacgaatgcagtaagtacagcaagctttctctgctgtggcattcgagcgatatattttaccgacgccatgccagcataacgagccagattacgcagttgaatggcaggcagaccggaaaagttcagtcgggaaaactcaagacttcgtaatcggatatatcgttccagcgcttcattaaacgcaggtccactgactgtaacagggccttttttcaactgttccagtgctgatacacgctgaccttccggaatgaccagaagctccatcacttgagctgcctgccatttgttcggcagtgcggccagctttttccacagccgctgatttgccctttcacgaatttcactgatgagacgtactagtgtggttgctccgggcagtaataccttattttgaagcaaccatgcagtggcaaaatcaaacatcagacccggtcgctcattactgagccacgcccgggtatatagcagacgcttcaggcggaaagaccatggaaaatcaccaaattcatgatagccgtaatattccttaattaatgcagtatgttctctaagggtagtgtcccgttcagcatagcgggagagaacttctggacggtggatattaagctgtaccgcgacaaaatgttgaacaccaggcagaacctgagttaaatccgtcagaaatgttcccagaaaacgggctgtggtgagctgaagcgcaatgcccagcctattatgtttgccccgtcgttggttaatgaaggccagatcccgttcatcaagatgaaaatagcgcgccagttgcacgtcattaggttctgcagcataacaaccgtaattctgtttttggtcagaggttagaaagtcgacaggcat

SEQ ID NO: 141908 - DNA, 3414 bp, Homo sapiens
ctataccacaattcccagagatgctccaaagatgttctcttctccctccccaggtctgatccacacagggggtgctaccatgcgctgccacttctggaaaaggcaggtcttgaggcagtcgcgggggctgaggctgtaggtcttgtggcgtgacatgagctcttgcatgggctcgagtatcacacagagatgcatggcaaggatgctgcgggggatgagctctcggtgctgccggatgctgaagtgccacgtctttatccgcatcatgtcgtcaaacatgaactccaggtacaaccggccctccacacacacctgctctaagctatatgagggcagactcttgttcactcgtgtagccttggggcccagaaaactgggtaaacatgggcttgcatgctgggtcaccatgctgccctggtcacagtcgagggacacaaagttgctgtggaatgcctccttggggtgcttaagaacatagtacagctccgtagcacccccctcaaagatgctgcggaagtagcgtgggatcagggtccggccaatggtatatctctttggtccatcctccaggcagaaagtgatggtcaacatggcatcatcctcaaagaactcagtcgtgaatgcatcccaccagagattgtcacactcctctgtccagttctgaagccgtttgttaagctcaaatattctgtagtcagtttggttgccatatggtgtgtgcctccccacatccctatccagcatggtgccgggatggaaggggggaaaggcgttgccgttcgggggctccttcggcgagtacagcttgaattgagtgaatgtataatggcccaacatattgatatgcccgtgcatcaggggagatagccgagcgatatcttcatctataatttcttcgccattacggcgcatccagctcaacgcttcctccatatagagcgtgttccacagaaccactgcattagtaaccaggcccagcgcccccagttgatcttcctgcccttcacgataacgctttctgatctctccgcgttgtccgtaacaaatcgcacgagccacagcgtggcggccttctcctcgattaagctgcgtcaggatccgccgacgataatcttcatcatcaatataattgaggagatatagcgttttgtttacacgccctacttccataattgcctgtgccagtcctgatgggcgcgagcttttcagtaaagagcgaatgagttctgacgcatgaattgtacccaacttcagcgaaccagcggttcgcatcatctcatcccactgactctccgcttttgacagatctgcatatcctcgggccaacttatccagtactccgtagtttgccgatttattcacccgccagaacaccgcctcacctgcatcggcaagccggggggaaaactgataccccagtagccagaacagaccgaaaataatatcgctgctacccgcagtgtctgtcatgatttcaactggattcagccctgtctgctgctcaagaagtccttccagtacaaaaatcgaatcccgtaatgtaccgggtaccacaatgccatggaacccagagtactgatcagatacgaagttataccaggtgatgcctcgtccagaaccaaaatattttctgttagatcctgagttgatggtcttcactggtgtgacaaagcgcatgccgtcagctgatgccacttctccacctccccaacgaccagcaagctccagtgtggactgaaaatcaaccaggcgggcattggcgctgaccagcgtttctgcacgaaggtaattctgtttcacccaactgagccgatggcgggtcagtgctggtatattgtgctttatcagcggttccagtccgatattacaggcttcagccatcaataccgcacataaactgatgtgcaaatcttgcgctcgagcaccagattcactgacatgcgcaaactcatgtgtaattcctgtctgggcatctatctcaagtaacagttccgttaaatctaccggtgggagtagctgtttgatccgattatttagacgaagcaatgatggtggctcttcctgtttctccagacaactgatagtcagggatggatatttaccttcattacagatatgaacttccgcattcttttcaaatcgtgatgccacggctttccaggtctcatccagctgaatagccagttgttgcacacctttacgtccatcgacaggatgtcccagtgcccgacagacaggaatacgctgagtctgccactcttcaccttgcaacaacttctcgcgaggatctccccagcgatcactgttttcaagccagatgtcccggcggcgcagtgcatcctgaaggcgttccagcaaacatagtgaataacctgcacgctgtatccgtccctccgcatcgtatacgaggcgtttccagggaccggtgataatatgttcaggcgcatcatcaaggatgcgctttttcgaaccattcagttctgccagataatgaatcgcagccagtacatgttcacctgccggtgccgcacggaaatgcaggtcccgcaacaccgccggaagaaaacgtttaacccgaccgtactgctcaaccatttcgtcatggaaattattgttcgacgccatgccagcataacgagccagattacgcagttgaatggcaggcagaccggaaaagttcagtcgggaaaactcaagacttcgtaatcggatatatcgttccagcgcttcattaaacgcaggtccactgactgtaacagggccttttttcaactgttccagtgctgatacacgctgaccttccggaatgaccagaagctccatcacttgagctgcctgccatttgttcggcagtgcggccagctttttccacagccgctgatttgccctttcacgaatttcactgatgagacgtactagtgtggttgctccgggcagtaataccttattttgaagcaaccatgcagtggcaaaatcaaacatcagacccggtcgctcattactgagccacgcccgggtatatagcagacgcttcaggcggaaagaccatggaaaatcaccaaattcatgatagccgtaatattccttaattaatgcagtatgttctctaagggtagtgtcccgttcagcatagcgggagagaacttctggacggtggatattaagctgtaccgcgacaaaatgttgaacaccaggcagaacctgagttaaatccgtcagaaatgttcccagaaaacgggctgtggtgagctgaagcgcaatgcccagcctattatgtttgccccgtcgttggttaatgaaggccagatcccgttcatcaagatgaaaatagcgcgccagttgcacgtcattaggttctgcagcataacaaccgtaattctgtttttggtcagaggttagaaagtcgacaggcat

SEQ ID NO: 141909 - DNA, 1262 bp, Homo sapiens
tctaagggattcggggggccaatttcctttcgcctgaatgggggagcaatgttcggtgatgcgctggaattgatttatgtcgccccgtgcactgtcatgttgccaggtgcggcaattaggataagcgtgttgttggttaacctccttggcgatggcgttcgtcgtgcgattatggcgggggtggaataatgccattactcgatattggtaccctgaccattgaatttaaaaccggtgatgagtgggttaaagccgtcgaccgggtaagtatgcccttaaccgaaggtgaaatccgcggtcttgttggtgaatccggttccggcaagagtttgattgcgaaagcgatttgtggggtgaataaagataactggcgtgttactgctgcccgtatgcgttttgatgatatcgatttgttgcgtctctccgcacgcgaacggcgcaaactggttggccataacgtgtcgatgattttccaggaaccgcagtcgtgtcttgacccttcagaacgtgtgggccgccagttgatgcaaaacatcccagcctggacctataaaggccgttggtggcagcgttttggctggcgcaaacgccgtgccattaaactgctgcaccgcgtggggattaaagatcacaaagatgcgatgcgcagttttccctatgagttgaccgaaggtgaatgtcagaaagtgatgatagccattgcactggcgaatcaaccgcgtctgctgattgctgacgaaccgaccaactcaatggagccaacaacccaggcgcaaatctttcgcctgctgacgcgtctcaaccaaaacagcaataccactattttgcttatcagccatgacttacaaatgcttagccaatgggcggataaaattaacgtgctttactgcggtcaaacagtggaaaccgcgccgagtaaggagttggtgacgatgccacatcatccttatacccaggcgctgatccgcgcgataccagacttcggcagcgcgatgccgcataaaagtcgcctcaatacgctgcccggcgctatcccactgctggacagtaccgattggtccgagccccatttatatattaaaacctcccaaagtgctgggcattacaggcctgagccacatttccgacctgacatttattttgaagctttcatttatggagcctctggacatattgtggtaacccttttggagctcttattcgacattgttgtcgaatatttgttgtaccggggttacagcccctgttccacctggttttga

SEQ ID NO: 141910 - DNA, 2604 bp, Homo sapiens
ttattcacctggacagtgcctcccaaacatttcttcctccatcacccagggctcctcttcttgctccaacttgaatatcacatccggtttggtgacttgacagcccactgtgactaggttgctgtagttctccagcatcacatctcgatacaagtttctttgagcaggtttcatttgctcccactcctcctgggtaaggtcaacagccacatccttaaatgtcactgtttcctgtaaaaacataatgctaattaatttgaagtcatcaaaattaggcattgtgatcacaacatacaagaacttgtttagctggtactcaggggtcagaggtaggagtactaacgggcacacagccagaccggtcctggaattgacgggggcacgacttcggggagactcacccgcacaccgtcgggacaggcctgagccagggacgccgtactgcttcccgtagactccgcctgtggtttcttcatcctgctctgccctgtgcgactcctggcattcggagaacgtcctgtcgttctgtcgacctccagacgccagcagcacccacccttcatactgaaaaccaaaaatgactctggacattgccaaatgcctactggggtgtaggtatgagaaacgaaatggcccctgtttgagaacacctggcttatgtattaagcgcttccacagcacagggcctcttctggttcccagctgtgctttgcttttccttggcattgttggggaggtcacctgtgccccccttccaccgggcacatgcctggacaccagtgttcgtctcgccatcgccccatatggcctcggtgacacacactcaccccatctgctctctccatggggtcgaaaggacggtctctggatgccaggagtcgcggagggcggaccagcatgaggaaaccattggcggaaaatggcagaagcagtgcggcatcccagcctcaacccatctgttctgggggacgccagtgccacgtgtggtcgcattggctccaccttggactcgcccctgttcctgtttgcacgtgtactagaaagcggtgtcttcttgcaggagccccagggttggtgagatccaaaatctgaagaggagtcctgagaccctagcaggcgccctgaagctcctcctccaccggtagaagtcggcacaaggaggtctctccagggtgtcaacaggatggtctgcgatgccaagagtggtggagtgtccgaccaggatgatgaagccacaggcggagtctgggggaagcagctcggcatcccagcttcaggtctgccgggacggcgttcgagtgagtctcccagaaagtcgtgcacccccgtgacctcgaggacaggtctgcctgtgtgcccgtgggctgctctctcacccgagagtcgttctttttctttgtctgtgcgccccgtttgcgtgtgtgtgtgttgggacgaaaatgtcttgtgcaccggagtgctgtttctttcttgtaagcctgtctttgttgagcctctttttgcgtcttttactgggtcttgcggcccattgtcagtttttccctgccgttccactttgcattttgtgaaagcctcggcaacatggggagcatcgtgggtcccgcaggagttgaattctcctccccatcctgataggcctgtcttaatgatcccctccatcgtctggggaatgggtccctgaggcttgccgatcacaatcactccgtggcagtgcatccgtgtcaaagcttttgcctgacctctcaacgtggttgacatgattgtctcagactgaataaccagccccatgggacccgatttctgcccataccttccaatccggaatcggagcagaagagcagtcccgagtgcccacctcacggtctgaagcgcctcctcctccaccgggatccgaacacgaagtcggcttaaggaggccctgaggtcaggactcttagggtcctgcgctgcttgtcgcaagcagcctcctcccccaagccgccgccggtccatctctagcattttcctggggctgccgcctgacagccattgcagcgcgcgcgagccgaccacgacaatgcgcatgcaccaaacgcgaggcaccagggcaagctctgagccagggctggcctcccagggaccaccaccattgcctgggcacgggtcccagaggcttggcagatcaggagccctctgtggcagtgtgtagagttgggctgatgtctctcctctctgagggatcagcacggtgatcccacaatccttggagactggcagggccgaactaggcttctgatgctcctcactctgtggctccgcttgggctgcggggccccacgtcctttgttttgcttgtagttcctgaagcctcggagaagtggggggctggctccaacccacaggggtccaaatcatctccccaccccggggagccactcttagcatattggttccgtatttcccatcagactcccatggggttcgtcccaaacgctcaggccccacatggggtgcactctcccggctcctcaacacgatacgcagctggcccgcctcaagagcgtctgcgtgctcggcctcacaaagtgttgggattacaggcgtgagccaccgcacccggcccat

SEQ ID NO: 141911 - DNA, 2809 bp, Homo sapiens
atgcgttatgatgatatcgatttgctgcgtctctccgcacgcgaacggcgcaaactggttggccataacgtgtcgatgattttccaggaaccgcagtcgtgtcttgacccttcagaacgtgtgggccgccagttgatgcaaaacatcccagcctggacctataaaggccgttggtggcagcgttttggctggcgcaaacgccgtgccattgaactgctgcaccgcgtggggattaaagatcacaaagatgcgatgcgcagttttccctatgagttgaccgaaggtgaatgtcagaaagtgatgatagccattgcactggcgaatcaaccgcgtctgctgattgctgacgaaccgaccaactcaatggagccaacaacccaggcgcaaatctttcgcctgctgacgcgtctcaaccaaaacagcaataccactattttgcttatcagccatgacttacaaatgcttagccatggaaatatcgccgaggcacgagttggtgacgatgccacatcatcctatacccaggccctgatcgcgcgttacaaaattcgaaacccgatgcgcataacatccctcaatagctcccgcgctatcccctgtgaacagtaccgatggtgtctctggggcacgtgcggaagttcaggagtggaatttacccttcattacggattggaacttgggcatttttttcaaacggggatgcacggcttttcaggtttaattcggctgaatagccagttgttgcacacctttacgtccaatgacaggattgtcccagatgttccggcggcgcagtgcatcctgaaggcgttccagcaaacatgtggaataacctgcacgctgtatccgtccctcggcatcgtatacgggcgtttccagggaccggtgataatatgttcagggcatcatcaaggatgcgctttttcgaaccattcagttctgccagataatgaatcgcagccagtacatgttacctgccggtgccgcacggaaatgcaggtcccgcaacaccgccggaagaaaacgtttaacccgaccgtactgctcaaccatttcgtcatggaaattattgttctgtggacgagcaagttcattaaccttgcttacagattctgccagtctgtttttggcgcttcattaaaatccggtcacgctgcaggtcgatctacaggcaaccccgttgaaaacaccttcggggaaaatcgaaatttattctgaacgactggcgaagattgcagatacctgggaattgaaaaaagatgaaattattcatccccttcctgcgtataccccaggttttgatggctgggacgatcccctgcggaaaacctatccactgcagttaacgggcttccattacaaagcgcgtacccactccagctgcggcaatattgatgtgttacagcaggcctgcccacaagaggtgtggatcaaccccattgatgctcaggcacgcggtatccgtcatggcgataccgtgcgggtatttaacaataatggagaaatgctgattgccgcaaaagtgactccgcgtattctgcctggcgttaccgccatcgggcaagattttaaagatcttggcccggaagtcagtttccgccgtatttatgaatacgctggcggcgactggcaggaagataatggcgtctggcaccagaacgtgttcgcttattatctctccatctcctgtaaccattgcgatgaccccgcatgtacaaaagtctgccccagcggcgcaatgcataagcgtgaagatggctttgtggtggttgatgaagatgtttgtatcgcgtgccgctactgccacatggcttgtccgtacggcgcgccacagtacaatgctgaaaaagggcacatgacgaagtgcgatggttgttattcgcgcgtcgccgaggggaaacaacccatatgtgtcgaatcctgcccgctgcgtgcacttgagttcggtccaattgaagagctgcgccagaagctcggcactcttgctgccgtcgcgccactgccgcgcgcgcatttcacaaaacccaatatcgttatcaaacctaacgccaacagccgcccgaccggcgataccactggttatctggtggttatctttaccgtattgggtcaatgcgtagtaggcgcgctgattgttagcggaattggctggttcgccgccaaaaatgacgcagaccgtcagcgtattgtccgtggcatgtttttcctctggctgttgatgggcgtcgggtttattgcctctgtcatgcacctgggatcgccactgcgggcgtttaactccctgaatcgaatcggagcttctggtcgttgtcttagaaaccagtccctgaggcttggcaaagcaggagccctccgtggcagtgcttggctgtcggggctccgaggctccggcctgacctctccacggggtcgacaggaacgtctccggatgccacgagtcgcacagagctagaggctcgttcttgcaggagagcacgaaccctcgcagcctcacgggcttgacctgcatgttctggtcccgccacttcccaggtgtgctttgcttttccttgacgttgttggggaggtcacctgtgccccccttccaccaggcacatacctggacaccattgttcgtctcgccatcgccccatatggccccatctgttctgggggacgccagtgccacgtgtggtcgcattggctccaccttggactcgcccctgttcctgtttgcacgtgtactagaaagcggtgtcttcttgcaggagccccagggttgaacaccgtcccggcagttgaggctgggatgccgcactgcttctgccat

SEQ ID NO: 141912 - DNA, 1134 bp, Homo sapiens
atgacctccacccctagtgcctgcgatctgactctgcccgacgtgacctccacccctagtgcctgcgatctgactctgcccgacgtgacctccacccctagtgcctgcgatctgactctgcccgacgtgacctccacccctagtgcctgtgatctgactctgcccgacgtgacctccacccctagtgcctgtgatctgactctgcccgacgtgacctccacccctagtgcctgcgatctgactctgcccgacgtgacctccacccctagtgcctgcgatctgactctgcccgacatgacctccacccctagtgcctgcgatctgactgcccgacgtgacctccacccctatgcctgtgatctgactctgcccgacgtgacctccacccctagtgcctgtgatctgactctgcccgacgtgacctccacccctagtgcctgtgatctgactccgtcctgggtcttaggctctggctgcagccctgcccgcaggctccaggtcctctgcaaggacctaactgctgaggacaagcccacaagtgaggaaacagatgctcctctagctgacactaaagataagatgcctctagaaaaacaaactcctgttatacaggaacaggatgataaatgcgataagctccatgtttgtgaaggatgcagacccccggtgtcggcgggaaccaggaagctcttggggcctccctgggccagacctgcacccgggaagccgccgcaaggcttcaggagccccaggtcgccccaaggccgcgccgcaggattgaacaaagcggcgggtgcagcaacctcggcgcttccgagcgcgttcggggccggacgcccggcgtccggcgctggctccagaaaggcggcgggtgtggggcgcagaggcctatctcgcgccctagccgcggcccgcgccccgccgcagtccccggggacggtactcacacacgcagagctccaccacgtacgcgtagtaggaccagacgaccacgaaggtgatgaagagcaccggcacccagcccacgacgcgctggcagcagcgccacagcgtccagggcgccatgttccgctggcggctgccgagccccgcgtcccaccgttctggggagcgcgggagccccggcgacggtga

SEQ ID NO: 141913 - DNA, 687 bp, Homo sapiens
ctactgatttgtgtacattaattttgtatctggaaactttgctaatccttttatcagttctaggagctttctataggagtctttagggtttttgaggtaaacaatcacatcatcagcaaacagtgacagtatgacttcctctttaccaatttggataccctttatttccttctcttgtctgactgctctggctaggactttcagtactgtgttgaagaggagtggtgagagagggcatccttgtcttgtttcatttctcagagggaatgctttcaacttttccccattcagtattatgttagctgtgggtttgtcatagatggcttttattacattgaggtatgtcccttgtatgccgattttgctgagagttttaaccataaagagatgctggattttgtctaatgctttttctgcatcagtcactgttacaacatcatctttacgagcttcagccatttcctgaacatggacttctgagttcacatcaacctctttccctgataactgtaaatgagcttgaagtgaagatgggaccttgacaataatagaacctatgagtgagaacatgcggtgtttggttttttgtccttgcagtagtttgctgagaatgatggtttccagcttcatccatgtccctacgaaggacatgaactcatcattttttatggctgcatagtattccat

SEQ ID NO: 141914 - DNA, 597 bp, Homo sapiens
ctatttttgtacattaattttgtatctgaaaactttgccgaatgcttttatcagttctagaagctttctggaggagtctttagggttttcaaggtaaacgatcacatcctcagcaaacagtgacagtttgacttcctctttgctgatttggatgccctttatttctttctcttgtttgattgctctggctaggacttccagtactatgttgaagaggagtggtgagagtgggcatccttgtcttgttccagtgcccagagggaatgctttcaacttttctccattcagtattatgttggctgtgggtttgccatagatggctttcattacattaaggtatgtcccttgtatgccaattttgctgagagttttaatcataaagggatgctggattttgttgaatactttttctgcatctatagaccggatggcctggtactggtcttctctagactgaaggtcctccaccaggtctcctgctgctgctacagcacttggccctaaagagaaaacactaggaggatgggaaccagggacagagaagctacttgctctgcagctgtttgggccagtatgttccctaatcttgatggccat

SEQ ID NO: 141915 - DNA, 660 bp, Homo sapiens
atgcgaaggctcgcattgcgaattttagctccagagcgactgcaagaacaaaccaacaatcccaagaggacccacagaccctctgaaggaagtagactgctcctgcaggaccacagagacaccacaaatactgtgagtgccccaactgcagaagtgggaaagcctccaccacctccactagaacaggtgctggtattcacggctgagagacccatagacggttcacatcacaggactctgtgtggacaaccaccagtaccagcccggagtcagattatccaccatgatcaagtgggtttcataccggggatgcagggatggtttcacgtactcaagccaataaatgtcacacatgacataaacagaattaaaaacaaaaatcacatgatcatctcaatagatgcagaaaaagcattcaacaaaatccagcatctctttatgattaaaactttcagcaaaatcggcatacaagggacatacctcaatgtaataaaagccatctatgacaaacccacagccagcataatactgaatggggaaaagctgaaagcattccctctgagaactggaacaagacaaggatgcacactgtcaccactcctcttcagcatagtactggaagtcctagccagagtaatcagacgagagaaagaaatatag

SEQ ID NO: 141916 - DNA, 714 bp, Homo sapiens
atggaacatgaaaccaccaaagctaagaaccctcacggagtccattgcactcccccaatacctccactggaacagatgctggtatccacagctgagggacccatagatgatttacatcataggactctgtgcagacagcccccagtaccaccccggagctggagctggttttctgggtccctctctaaccaaatgagaaggaaccagaaaaccaactcaggtaatatgacaaaacaaggctctttgacaacccccaaaaatcacactactttaccagcaatggatccaaaccaaaaagaaatccctgaaatcatttttaccttaacaagaattcaggaagatgcagaaaaagcattcaacaaaatccagcatcactttatgattaaaactctcagcaaaatcggcatacaagggacatacctcaatgtaataaaagccatttatgacaaactcacagccaacataatactgaatggggaagagttgaaagcattccctctgagagctggaacaagacaaggatgcccactctcaccactcctcttcaacatagtactcgaagtcatagccagagcaatcagacaagaaaaggaaataaagggcatccaaataggtaaagagggagtcaaactgtcaccgtttgctgacgatatgatcaattaccttgaaaaccctaaaggctcctccagaaagctcctagaaccgataaaataa

SEQ ID NO: 141917 - DNA, 1344 bp, Homo sapiens
atggccgatgagaggcaggactggattgcagctccaactcggacagacagagcagagtgccgaggcttgcatagtgaattttatctccagaacaactgcaagaacaaaccaggaatcccgagaggacctacagaccctctgaaggaagtggactgctcctgcaggatccggagacactccaaataccacattggcttaggcaaggagttcatgaccaagaacccaaaagcaaatgcagtaaaaacaaagataaatagctgggacgtaattaaactaaagagcttttgcacagcaaaaggaacagtcagcagagtaaacagacaacccacagagtgggagaaactcttcacaatctattcatctgacaaacgactaatatccagaatccacaacgaacccagacaaatcagtaagaagaaaacaaacaatcccaataaaaagtgggctacggacatgaatagacaattcccaaaagaagataaacaaatgggcaacaaacatatgaaaaaatgctcaacatcactaattgcaaatttgatttgcagggaaatgcaaatcaaaaccacaatgcaataccatcttactcctgcaagaatggccataatcaaaaaatcaaaaatcagtagatgttggcatggatgtggtgatcagggaacacttctacactgctggtgggaatgtaaactagtacagccactatggaaaacagtgtggagattccttaaagaactaaaagtagaactaccatttgatccagcaatcccactactgggtacccacccagaggaaaagaagtcattatgcaaaaaagatacttgcacacacatttatagtagcacaattcgcaactgcaaaatcatggaaccaacccaaatgcccatcagtcaacgagtggataaagaaactgtgccctcggtggttgctgtcaaaatgggcaagtgcatgaaacctgggaaagtggtgctggtcctggccagcagtattctggctgaacacaaagctgtcatcgtaaagaacattaatgatggcacctcagactgcccctacatccaagctctcgtggttggaattgatcgctatccctgcaaagtgacagctgccatgggcaaaaagaagattaccaggaggtcaaagatcgagtcttttgtgaaggtttataactacaatcatcttacgcctacagtgcactctgtggatatcctcttacacaaaactgtcatccacaaggatgtcttcagagatcctgctcttaaacacaaggcccaatgggaggccaaggtcaagctcaaagagagatacaaaacgggcaagaacaagcagttcttccagaagctacagttttag

SEQ ID NO: 141918 - DNA, 3303 bp, Homo sapiens; identical to SEQ ID NO: 128730

SEQ ID NO: 141919 - DNA, 1923 bp, Homo sapiens
atgggggtacagccattgggtaaatacagctgttccaaatgggagaaattggccaaaacaaaggggctacaggctccatgcaagtctgaaatccagtggacaatcaaatcgaaaagctccaaaatcatctcctttgacttcatgtctcacatccaggtcaagctcatgcaaaacataggttcccataatcttgggcaggtctgcccctgtgactttgcagggtactgcaacagccacttgcaggtacttggctttatcccgaaaaaagagaggaagaaaaagaatgatcctatagatgaggtgaaggtcaggcaccagatggataccatggcctttagcctgacagtgcccacgttggccttgaagatgcccaacggactggatggaatgtccctctctccacctggggcaagggtccctctccactacctggaaaccgaattggaagacccatttgctttcaatgaggaagatgatgacctaaagaaaggggcaactgtgagaaagaagttgcagagcaagttggcccagaatcggcagcgccagagagagacagagattttaaaagttcgacaagagcactttagtccccctcctgcaccttcacagcagcagcctccgcagcagcactcccacctgtcacctttatctacttctttaaaacctccagcgccaccgcagggttcagtctgcaagtcacctcaacctcagaacaccagcctaccaatgcagggagtggcacccaccacacacactatagcacaagcacggcagttgtctcacaagaggcctctgcccctcctgccatccagtagggctcccactgtggacccacccaggactgaccggatcctcatgaaagccacagccttctctccacacttctcatgtataagccgactgcagagactggtgaaactgtgcacccagaaacatcagttggacactgatctgtttccccatttaggtttggactggtctgaagagagcggagaggaaccagaggactcagagcaggcctcgccctaccaggttgcatggtccatccgggaaaccctcagatatcaaagacatgctggagtgatcatcatggccgatgagaggcaggactggattgcagctccaactcggacagacagagcagagtgccgaggcttgcatagtgaattttatctccagaacaactgcaagaacaaaccaggaatcccgagaggacctacagaccctctgaaggaagtggactgctcctgcaggatccggagacactccaaataccatgcagaaaaagcatttgacaaaatccagcacctctttatgattaaaactttcagcaaaattggcatacaagggacatacctcaatataataaaagccatctataacaaacccacagccaacataatactgaatggggaaaagttgaaagcattccctctgagaactggaacaagacaaggatgcccactctcaccactcctcttcaacataccctcggtggttgctgtcaaaatgggcaagtgcatgaaacctgggaaagtggtgctggtcctggccagcagtattctggctgaacacaaagctgtcatcgtaaagaacattaatgatggcacctcagactgcccctacatccaagctctcgtggttggaattgatcgctatccctgcaaagtgacagctgccatgggcaaaaagaagattaccaggaggtcaaagatcgagtcttttgtgaaggtttataactacaatcatcttacgcctacagtgcactctgtggatatcctcttacacaaaactgtcatccacaaggatgtcttcagagatcctgctcttaaacacaagtcccaatgggaggccaaggtcaagctcaaagagagatacaaaacgggcaagaacaagcagttcttccagaagctacagttttag

SEQ ID NO: 141920 - DNA, 764 bp, Homo sapiens
agaatattctagctgcttatttttatagttctgcttatatgattctctttttaacagatggaatcacaaccttttctgcagaatatatctgatgaatttaaaaactgatacatcaagaatattcttttgtatatgtctttcttgctgtgaaaatttatggcctttcttccccctatcttcgctctgtaattattaggtgcttactatatgcaaggcattgtataagattaggagaatacagataagactaagtagcattgcaggagtttatgagttcaattccaacttcaccaattaatagatgttctcatggacaaattttttgacctctctaagctttagcgtctgtaagtactaagtgctttttgtgcagagagatgtagagaggtgaaatttgagctggatttttagtgaatgaaaatgatttcagtaattaaagatgaaaaagtacggagtttgtgagcatggagggggagctggagtcaaaggatattccatatggaagaacaggcttcaggatgaaggagagcaccggaatgtgtgaggactcttcagagggtgaatgctttggttaccacgtcctgggaaatgaacaacttaaaacgttcatcacagcacgacttacaataggaaagtcatggaatcaacctagttgcccatcagtggggtaccggataaagcaaaagtggttcttctacagcatcgaatactacacagccatgaaaaagaataaaatcatgtcctttgcagccacatggatgtag

SEQ ID NO: 141921 - DNA, 654 bp, Homo sapiens
atggcggagcaagagcaaagaaaaatccctttggttccagaaattctcctgaaaaagaggaaggcttatcaagccctcaaagccacccaggcaaagcaggcacttttggcaaagaaggagcagaggaaaggaaaagggccaggtttaagcaactgcaattattcctacatgattcctggcagcagaaatatggcaaggattgatggcatgagtttactggtgcagagaaccattgtaagactttgcctaaagaaaatttttagtggtgtctctgtaaaagtcacccctcagaacctaaaaatgctgcatataatagaaccttgtgtgacctggggatttccaaatctgaagtctctctgggaacttcttttgaaatgtggacaagccaaggtcaagaataagaccatccttctgacagacaacacagcgattgaggagcatctggggaagtttggtgtcatttgcttggaagacctcattcatgaaattgcgctcccagggaagcatttccaggagatttcatggttcttgcaccctttccacctctcggtggcctgccatgctaccaaaaatagagtgggcatcctcaaggagatgggcacatctggctattggggtgaacgcatcaatcagctcatccccctgctgaactag

SEQ ID NO: 141922 - DNA, 1357 bp, Homo sapiens
  misc_feature (1)...(1357): n = a,t,c or g
cggacgcgtgggcaggctctaaaaaccctggaagcgttgcttcttttggcaggaatgggggttagcaggacctcaatggctcactatggctaagtgaacgctgactgggtcctccagcgtgagctagaacagacgtctctatggtcaagtaaacagcgcgcgtgctgtctttcccatgtggtggggttgcgcatgatcagtagctgcaccactagaaagatggcggaggaagagcaaagaaaaatccctttggttccagaaaatctcctgaaaaagaggaaggcttatcaggcactcaaagccacccaggcaaagcaggcactttttggcaaagaaggagcagaagaaaggaaaagggctcaaggtttaagcgactggaatcattcctacatgattccctggcggcagaaacgtgacaaggtgcatctcaagacaactagaagtgcaacctcacgccttggaattgccggataaatgttccttggcctttgttgtacgcatcaaaaggattgatggcgggagtttactggtgcagagaaccattgcaagactttgcctgaagaaaatttttagtggtgtcttttgtaaaggcaccccccaggattcaaaaatggctgcgtatagtggaaccttatgtgacctggggatttccaaatctgaagtctgtccgagaactcattttgaaacgtggacaagccaaggtcaagaataagaccatccctctgacaagacattacagtgatggaggagcacctggggaagtttggcgtcatttgcttggaagacctcattcatgaaattgcattcccagggaagcatttccaggagatctcatgggtcttgcgccctttccacctctcagtggcccatcatgctaccaaaaatagagtgggcttcctcaaggagatgggcacacttggctatcggggtgaacgcatcaatcagctcatccgccagctgaactagacccaggtgaggcagggctgaaaactgcccttgggctgacttttgataggccatgccttgccactttacaagttctttttgcatttactagtatttaagagtaaccttgagattgggaggaatagaggaggctggtacaaatagatggagacctgctgggatcagtgaatgcctgattaggacatggggctatgcatagcctaagagttatagggcttaaagatgttcgagtaactgaaaaactgtattgctggccggggcgcggtggctcacggctgtaatcccagcactttggggaggcccaggcgggcagaccatgaggtccaggagattgagacctnctggccaacatggtgaaccctgtctctanttaggaatacaaaattgagct

SEQ ID NO: 141923 - DNA, 714 bp, Homo sapiens
atggagtttcaagcaaggttggaacctaaagagagtattttagaagctgaagagcggggacgactggagacaataatggatgccatttttaccaatgcccaaggtctgtccaccatggcatgccacacttcatcaactgtggacacccagtgcaagtccaacattaagaaagtaaatatgttctctcttccttggcactgcctatggaggcggcagccatctcctcctcagcatcatggccaccttcataccccttgtgaagcccaaaatagtcaaaaagagaaccaagaaattcatcgggcaccgactggcttttcaaatacaagcacattagggattctgctaatggagccaaaagcaccttctctaattccaagtgaagtgcggatagccgctctctgccaagccttgtttttcttgctttcactttggtttgcttcctgtgggtttcatgtacctcatcagaaactgaagagggcagaggcaaggagctccatgaaaatcaagagacagtactacacttccattagggaaggcaagtacagaataattccagtacttagtgttttggctttactctgttggagaacatggatgaatacagaccttctccagtattctcctcaacccctgaagacctttaggccaatccagaggaaaaccaatgctcaggaaccaacccgaagtttacctgagcaagagccgctttcttga

SEQ ID NO: 141924 - DNA, 455 bp, Homo sapiens
cggccgcgtcgaccggaggtggcagccatctccttctcagcatcatggccgccctcagaccccttgtgaagcccaagatcgtcaaaaagagaaccaagaagttcatccggcaccagtcagaccgatatgtcaaaattaagcgtaactggcggaaacccagaggcattgacaacagggttcgtagaagattcaagggccagatcttgatgcccaacattggttatggaagcaacaaaaaaacaaagcacatgctgcccagtggcttccggaagttcctggtccacaacgtcaaggagctggaagtgctgctgatgtgcaacaaatcttactgtgccgagatcgctcacaatgtttcctccaagaaccgcaaagccatcgtggaaagagcttgcccaactggccatcagagtcaccaaccccaatgccaggctgcgcagtgaagaaaatgagtaggc

SEQ ID NO: 141925 - DNA, 423 bp, Homo sapiens
cgcccatgtggctgtccgagtgtgggcgcctccgggcctctgcggagccctgggcagctctgagctcgcggaggcgtggccggtgcgcggggatgtgcaccaggtgtacaagtaccccttcgagcaggtggtcgccagctttctccgaaagtaccccaaccccatggataaaaatgtcatctcagtaaaaatcatggaggaaaaaagagatgaatcaacaggggtcatctacagaaagaggattgcaatctgtcagaacgtggttccagaaattttaaggaaggtgagcattttgaaagtacctaatatccaattagaagaggagtcatggctcaatcctcgggaaagaaacatggccatacggagtcactgccttacgtggacacagtatgcatccatgaaggaagagtctgtcttccggga

SEQ ID NO: 141926 - DNA, 1698 bp, Homo sapiens
tctcaattggcactggttaccatcttcagggctctacaagccttggagtctgcagtaaaagatcaggcccctcttcttggtcatggagctagtagaggtggattggaaggggatattcccgaggacagctgttttcactgccgagggtcgggcagtgccacctgctctctgtgccacggcagcaagttctcgatgctggccaacagatttaaggagtcctatcgggccctgagatgccacgatgagaactcgggttttactctgagtgagggcctgctgtggatagagcctgctttctgctaccgccctccgcactccctttcaaccccccgcccccttgctgctggggcaggagacgtgcaaactacactttccggaccccccgtgcccgctggcttcctgttagggcagctgcaggagcagcagcagcagctaggaatgctggccggctgcttgcttccaccagtagctgctttactggctctggttgtgggctcgctgaaacaccattttcccttttgttcctccttcctaggggtggtgccttatggagaggtccacgtggcaaggagcagaaggtggcttccaaccaacagccagcaaggaactgaggccctcagtcagctgcctgctgggaagggaatcctgccaacagccacggtatggggtgggacactctctggaatgagaaatcaatcagaaaagccaggaaagattagagtcctgccttgggcaggtgaagggaagtcagaagaaggattcagtggacaaatggagacactggtgctaaaacaaagtgctgacagttcacccacaggaacaagagtgaaggcaaggcatttggtctgcttgttgattgggtgtgaaatcagccggctcatcagcagagctggtgtttcctccctgcggaatccgcagtgcccactacagcgctggggcataggaggcctcagaaccgtgctgaatacacggattaacgcgcggccgcgggagggcaccagggccgctctggcgccgccagcgtggagaccgcggggccccgggtgctctgggagcgctccagcgcctcccgcgctctgtaaccccaggccccggactctggcagtaggggcgtgggcgtggccgactgcgcgtttctccgagtggccaataaagtttcgaaagtttgaaaagcggaggaaaaaggccacgcccatgtggctgtccgagtgtgggcgcctccgggcctctgcggagccctgggcagctctgagctcgcggaggcgtggccggtgcgcggggcccgcggcgcgcggggatgggggtctcggtggatgtgcaccaggtgtacaagtaccccttcgagcaggtggtcgccagctttctccgaaaggtaccgccccgcttccaccttccgtatcccgcgctgcctccgctgcttgcccctctctcctctccttcatccacgcggaagctggcaccgccagtgtctctttccagctgcgggctttgcttcagggatgtgtgggtcgagagggatttcctcgaagactccctttacagggagcgggaaaaggggccgtgcttggcatcacgttcacacctgccccagctgaaagaagaggctttccttttaggaagagcctccgggaatcccagctcgtgagctccgtggagttgcagatgaccgacgtgtggagctttccggttcatcactga

SEQ ID NO: 141927 - DNA, 1686 bp, Homo sapiens
ctactccacatcagcatcatcctcaatttcctggaatgaattgttgatcatggcaattaacacatttagcaaaacaatgaccactgtaacattatagactccataacgaacataaccaatattttcaatgaatttgtggttatagttgatgaccactgatttcacttcagcaagtccaaatatagcccagaacagtgtcttaaaactctcttcaactgttgtgaaggcttcattttgttttgcaccaatgtagtaggagtagaagttgaacgttccaatcataaaggccacaaacaccataatgaatatgaccatgaacctgaagatgtctttgactgctcctccaagtgacatctgcagaggtccaaagctttcatttgctggcaaaatacaagctatcccagagaaactcaaaaccacagcaactgcacaaagacctttagacacaataggcttggaagtgcctgtccctgctgcctggcttctctcagctgtcaggaactgctccaaactcagagcaacatcagggccgaatctggacaccatgaatggcagcaggaggcagacaggttcctggacggaagggagcaggtcctcgatgaagccccatcttctttccgacattactggcgcactcagattccaaaggtcagctgagccttttgcaggttggccacttggcccttcaacttccttcagtcgggcatcctgagttgatggcgaaatggatgaatgggccccaatggtcacgtaggccagcctacccaaggaaacctccacaccagagaaggcaagcttgggggactctggaacccgatgagcatcataaatgagtagagcaagagatagttgtcttgccttaaaaccactgcgtgtggggaaagaaaccagacctccaaaatagcagcccgtgtgaatctgcattttgaaatgagggctgcgtggggccagccgctcccatttgctcaaagccccatatttagggtgaccagatttatcagaagggaaaactgagcttgttgttctggcagaagacatgttgaggacagacaggaaaaatacagcctccctacccttaatagcacagctgccgcacaaatttcttttctggaaagaaaacatcaccatcaatcctttgtattcttggggattccaaaaacagaccctggtgtttggtgtttctcgcttcttttggtttcctggtcccaaaggggtcactaacttctgtagctcacaaataccaatatcggttccacctgccacagtgtgtcctaatgtggcaaaagcagtatggggaatacctttggcagtgcatctaacacccaggtgagcaagcccctccatggccatacggaccacagagactatggctgcccatctcaggccagcatgccatagaattatctctgtgtgaccacttgtggaaattacagccactgggagccaggctggctgtgtgttgggtgggttggggggtgggggcaagaggactgagagaaattgctcacaggcactctgggcttcactgagtgcacttctggaacagagactgtggttactcccacctttctgttttacagatgaggaaatagaagcacacaaaggtccaattccttgcacaaagtcatcagccagtaagtggcagagctggaatttgaatccaggtggtctgacctcagagcccat

SEQ ID NO: 141928 - DNA, 904 bp, Homo sapiens
tgtaccggcccggaatttccgggtcgacgatttcgtccgggcctctgcggagccctgggcagctctgagctcgcggaggcgtggccggtgcgcggggcccgcggcgcgcggggatgggggtctcggtggatgtgcaccaggtgtacaagtaccccttcgagcaggtggtcgccagctttctccgaaaggtttccacgctttgagaaggactgaatgagatcatgcgcatggcagcttctctaggatagcaccctgcgtgaacacagtagctgctcagttaagtctttgatgggtgtgatcctgattcagcttgatcaattctgcagtcatactggattgtgtttgaaaaagtgtccagaaaaacctggccatctgcctcctgtcttcccagtacccccaccccatggataaaaatgtcatctcagtaaaaatcatggaggaaaaaagagatgaatcaacaggggtcatctacagaaagaggattgcaatctgtcagaacgtggttccagaaattttaaggaagaagtctgacctgcctttcagcggagtatcatcacttactcaggaaacggtgtcacactgggaggaggcagttcccttatcagcttggaatatttttgttgtggtttacatctttctcaatgtgactgtgttgcaaaggacagacttgttgcctgccattgtgaggactatcagctgtatctacagcaacttcttggattcagtgcagccaaacaagaagttatctctactccaagcaggtgaccgagcttactgggtaactgaggagcagtctccatgtccttggcagacaaagccagtcttttccattgaaatggtcaggttacctgaaacccctagcacacatgaacaccagcaagaacatccaaagcaagtgatataa

SEQ ID NO: 141929 - DNA, 1180 bp, Homo sapiens
agacatttcgttctgagctcgcggaggcgtggccggtgcgcggggcccgcggcgcgcggggatgggggtctcggtggatgtgcaccaggtgtacaagtaccccttcgagcaggtggtcgccagctttctccgaaagtaccccaaccccatggataaaaatgtcatctcagtaaaaatcatggaggaaaaaagagatgaatcaacaggggtcatctacagaaagaggattgcaatctgtcagaacgtggttccagaaattttaaggaaggtgagcattttgaaagtacctaatatccaattagaagaggagtcatggctcaatcctcgggaaagaaacatggccatacggagtcactgccttacgtggacacagtatgcatccatgaaggaagagtctgtcttccgggaaagtatggaaaacccaaattggacagagttcattcaaagaggcaggatttcaatcacaggggttggatttctcaactgtgttttagaaactattgacagcacattcttacgacagggagcccagaagagttttcgtctgatgaaacatagcttttgcagggaaaacagctttgtggaaatgagtattctatggggcttcatcgaggacctgctcccttccgtccaggaacctgtctgcctcctgctgccattcatggtgtccagattcggccctgatgttgctctgagtttggagcagttcctgacagctgagagaagccaggcagcagggacaggcacttccaagcctctacatgactttgaacaagtcatttacctctccgaggctgagttttcttacctggaaatggtgagagcagaactgtcttacctcacgggactattgagagggttaaatgagataatatcattaggagggagaaatgcaatttcaagaattatccgtagtgatagaattcaagtggactctgaagagttgcttcagaaaagagggcaaataagtattgattgggtgttctgctggttgtctgatgatggtgtcagggcagctaaggacaggataaaggcctggagagggtgcttgtgcccttatgttatcagcaccgttgttcctaggattcgtgaggggattctggaaccaataagggagttgaactggtacctgattcacgggtggactggaacaaacaggaatgtaccagacctatgttga

SEQ ID NO: 141930 - DNA, 1158 bp, Homo sapiens
atgcggcggaggaagaaggaagcagcggtggaagaaggaagcggtggtggagcggacacagcggacacagcagacacagcagacacagcagctcaggcggcgccaggttcctgggaatgtcagtgcggcacggtagttggtgcggatcccgcggagcttggagttaaattaaggaagaataaaagagatgaacatctcttaaagagaaggaatgtaccacatgaagatatctgtgaagagtctgatattgatggtgattatagagtgcaaaacagcatgagcttcaacacttgctccaccttctccacctgctccaccttctccaccaactaccagtccctggggcgcctggacagtcagcgcgtggccagcatctatgcaggtgctgggggctctggttcccagatctccctgtcccactccaccagcttacagggtggcatggggtccagaggcctgtccacagggatggccgggggtctggcaggaatgggaggcatccagaatgagaaggagaccatgcaaagcctgaacgacctcctggcctcctacctggacagaatcgacaatgcccgtcttgctgctgatgacttgagagtcaagtatgagacagagctggccatgtgccagtctgtggagagcgacatccgtgagctccgcaagaagaaccatgaagaggaagtaaaaggcgtacaagcccagattgccagctctgggttgactgtggaggtagatgcccccaaatctcaggacctcaccaagatcatggcagaaaactgggcccaatatggcaagctggctcggaagaaccgagaggagctggacaagtactggtctcagcagattcagaagagcaccacagtggtcaccacgcagcttgccgagatggagcagctcaacaggatccggccgcacctggagtcagagctggcacagacccaggcagaaggacagggccaggcccaggagtatgaggccctgcagaacatcaaggtcaagctggaggctgagatcaccacctaccaccgcctgctggaagatggtgaggacttcaatcttggtgatgccctggacagcagtaactccatgcaaaccatccaaaagaccaccacctgccagatagtggatggcaaagtggtgtctgaaaacgagcaatga

SEQ ID NO: 141931 - DNA, 1271 bp, Homo sapiens
acgagaaggagaccatgcaaagcctgaacgaccgcctggcctcttacctggacagagtgaggagcctggagaccgagaaccggaggctggagagcaaaatccgggagcacttggagaagaagggaccccaggtcagagactggagccattacttcaagatcatcgaggacctgagggctcagatcttcgcaaatactgtggacaatgcccgcatcgttctgcagattgacaatgcccgtcttgctgctgatgactttagagtcaagtatgagacagagctggccatgcgccagtctgtggagaacgacatccatgggctccgcaaggtcattgatgacaccaatatcacacgactgcagctggagacagagatcgaggctcctcaaggaggagctgctcttcatgaagaagaaccacgaagaaggaagtaaaaggccttaagacgccaaattacgcagctctgggatgaacgcgtggaggtagatgccccccaaatctcaggacctcgccaagattcatggcagacatccggggcccaattatgacgagctgggctcggaaagaaccgagaggaagctagacaagtactggtctcagcagattgaggagagcaccacagtgttcaccacacagtctgcttgaggttggagctgctgagacgaaccttcacagaagcttgaaacgtacagttccagtccttggaagatcgaccctggacttccatgagaaatctgaaggcccagcttggagaacagccttgaggggaggtggaggcccccctacgccctacaagatggagccagctcaacgggatcctgctgcaccttgagtccagagctggcacagaccccgggcagagggacagcgccaggccccaggagtatgaggccctgctgaacatcaaggtcaagcttggaggctgagatcgccacctaccgccgcctgctggaagatggcgaggactttaatcttggtgatgccttggacagcagcaactccatgcaaaccatccaaaagaccaccacccgccggatagtggatggcaaagtggtgtctgagaccaatgacaccaaagttctggaggcattaagccagcagaaagcagggtagcctttggggggcagggaggccaataaaaagttcagaggtcattggaaaaaaaaagtattatctcgctaacaaagctaaatataatgaactatacgttaatattttgcctatatttttcatgtgctttaaaatatttaactttaatattgaaatgcatttca

SEQ ID NO: 141932 - DNA, 1308 bp, Homo sapiens
atggggagtgatggatgggttctgccctctgctagtgcaaaacatatcactgaaagtctagaggaacagactcctgggtaccttttaatgatcacttctgtagtgtattgcaggatactctggcaacaacttgaaggccttaatgtgactgccacaactgcctcaaagcttgccacatctttaatgccagcagaaaaactttcatcagcatggctttcaaactttcttgcagattcatcatccaggaaaagcaacaaagaggatccaagatggatgaaggaggcggaaaaaactttttataagcccaagaatagagatgagttgggagaccaggaagcatgccagggaacagagcatcagcaaagccaaggactgagagaaggcaaagaaggaagtgagggaggacaagagatcaaaggtggcagagaggagttctatgttcagaatcacagtgatgcagaagctgtagaaacaatggcagagaagaataggcaagaaggtggccagtgtcctgccactgagaaacagccctggaccaccacagatggaggcagtgagggtggaaagggagagcccatgagggttgtggacacaagccaagatgggattggtggtatctctgcaggacaagaaagtggcccggaagtgcaagggatgccctggctcttcctccgtactccgcagggtaaaaactctatggcagctggagccatgtgttacttgcttatcactgtgtccacggagctgaggaccctgtctgatacattaagcatgggctcagtaaatatggatggtataagaggtgtggccatggaagtcaccttcctccacagggtacgaaagaagagatgccaccaaaggaagcattctgcttgtggaggatttgttccactctgtcattcaaggagccaggaatctaccatggtgtcaatgccttcccgaaggaaggtgcacatcccgtggtttatggtgcctctggcacactgccaacaccccagtttgaaaagccaggcattcaaccaaacttgcgaacgccagcccttgcatataattacaggaacctgtgaaagtgatcaccggcagctcaggggctccaagcttccgcaagttctgaatcccttagcaagccggaaagatctgctggcgctgcccatatttgatttaaaagcaaaaaggagaagagggaagaagaaagaaggggaagaagagattgaagaagagaaagaacagccaaaaggagaagagctggaagtagacagttcttgttctcagtttgagagaaaacgagaaagaaacagtcctgtttag

SEQ ID NO: 141933 - DNA, 748 bp, Homo sapiens
atggggatggagtacccagaaagcagagacaccatgaaacagtgtggcacagtggtgaaccgcaagtttctggatgcaggacaactcaagagctttctgtctccaggtgggtggcgatttgactcctcatcaagccaatggccacccccttgcaatctttatgcaatgcacagtatcctctgcctgcaacgggggcttgctcccttgatggagaaaatacagaataactggacgccaggaaacaggcacagctttctgggcccggagggcggccgcttcccaccgtccctctccccttactggcagagcgcgctgcgggcggactcccgggcccggagcagcccaccggccaccccaccgcccacccggctcccggtgtctcctcccggccgctctacccagcaactttccgtgctttgttccccgactggaaatgctttacggaagcgtcttggacagggtctccgccaggcgacaagagctcggtgctgagatgtgtttacgttctcatctccccatcaattatggatggaaacaaataaggaagagtcaattttgctgagccccttctccggcaacgagagggcgttctgcagccgggagggagccgccgctcgcgcccgcagccgctggcaggggcatggtgaggaggaaggtagctcagtggcatttctgagcaggggccaccctgacttcaccttggcccaccatgagggtcttcctgctttgtgcctacatactgctgctg

SEQ ID NO: 141934 - DNA, 1326 bp, Homo sapiens
tcagggtcctcccacatccccattccaagttgcagggtcccattcttttccaatcaatgccctcattttaacagtagacacctggtgaggctgtgcatgcaccttttgttgcaggtcagccactcgcatgataagagcttgtgtctgtttttccacaatttcaactctttctctacagctgataagactctcactcagggcaatcttagcagatctgaggctcagtatctgcttcagagctgtctctgtgcccacgaaaacatgccgctcctccacacagtgctgagcacaggcaaatctctcagggcttggcgtcttcttgctggggggcgggaggggacaaggtagtgtctgcttcgatggtggggtcggcacctgggcagtgtccagtgtctgctttgatgacggggtcagcatctgggcagtgtccaggacacccttgctggtctggcacgaatgccggtgtgctccttcccgggagggagccgctgtggtgctctgtcgggacatgaaggtgttggggtgtccagtagagtgggacgtgatctgggacctctgccggaacggcggcttgtccccttttttggtgtacatgttcgtggtttttgaatgtggttcttggttgatggggtgtgttttgttagttggcggagtgttctctgtgttgaagtcgccttgtgttctcttcagcacacagggatcaaaggggaagaaggtgtccagtgggtttgtgcaggtctgcactgagtctcctccagtggtactcctaatgactggcagcatctggcgattgttcctctcaatgatggtgtagcagaagacgaggctggtacttactccttggattccataactattggcggtcctcaactttcctcgtgaggtgtactccaagttgtcccggtggttgctgtccccgttacgggatttatcctgtccgtagttgccccaggttgccaggtggtgtgtcccggtacgggagtatccactccggtagtggtgctcatggagtccgtcgtggtccccttggttaacctcggttactcctcgtctgtatgtggccctcatgtaagccgtggtgtgtcccgtagtaggaaaacagccgtagtgactccagtagccgtggtgtgtccgtagtaggataacaagccgtagtgactcagtagcgtggtgtgtcccgtagtatgggaaacacgacgtagtggactctagtagcgtggttgtcccgtagtaggaaaccaagcgtattgactcagtagccgtggtgtcccgtaagtaggaaacagcgtagtgaccagtagcgtggttgtccgtagtaggaaacat

SEQ ID NO: 141935 - DNA, 1215 bp, Homo sapiens
ctacccctcctgcacgggctccccctcggctgaatgtgtttctctctcagttccttcctccttgcgtacagaagagcccctgccaggggcgcctggcaagtgctgtgcccacgtccgccaggacccagccgtgttgagtgaagctcttggggccagcgtgcgtccttcccggttctcattcacgtgaagcaccgctggctgctgcacacgggggtctcgtggtgggggctcctcgtgtgcagcggcctcatcctgggagccacctgccgccgcgtggtctctgggaggcttgttagggccaccattcagctgactgtctttgccaagcacaggcagtggagactgtgcatgctctgatccgaacaatcgtccttctgtctgccgcccgacttccccgccctgagcacctcggtccgatctgccacctctttgggtggcgccccggagcttctctgagcagcatcttccctggagggggcgttgggaccgtgtgtttttacaagcgctgggactggcatgagatttgatccaagcatttcttgtttcgccttggatgcattcaggatcagtgttcccagaccaggcaccccggggcttctcggctgctggggaggggtggggctgggggaagctgtccaggtcctcctcagtcgtcctcacagccaggagggggagagaggtggtggggctgggcgtcaggtggtacgtggatgtcagcacagttctacacagaccttctctggcccattcctgctctgctcgggggacacccaaccagcccagccctgtttcttcgaaactagactcaaacatagggtaggtaggcaaaacagtaagaaaattccaggactcatccagaacaccgaactctaaacagcaggagttctcacaggaaacctttggagataatctcgagatctcaagtaggttagttagactgagagccaaatcttgttcggactcatcactgtccatgtgtaaaagtagggctttgtgcttgcttcggcgcacatatccagagctgtctcgtgcccacgaaaacatgccgctcctccacacagtgctgagcacaggcaatctctcagggcttggcgtcttcttgctgggcagtgtccagtgtctgtttgatgacggggtcagcatctgggcagtgtccaggacacccttgctggctggcacgaatgctgtggccacggcagcatctgaaggtggcat

SEQ ID NO: 141936 - DNA, 547 bp, Homo sapiens
cctctagtccctgtgtggaattctctacgtctatgggggcatgtttgaggccggcgaccgccaggtcaccctcagcgacctgcactgcctggacctgcacaggatggaggcgtggaaggccttggtggagatggaccccagaaaactcaggagtggctggaggagacgggacctcggaagaggacagtgaggaggttgagggcgccgagtggtggggtcgacgacgaagacagcggagaggagagcggtgcggaggactgagaagagccccctgccagggggcgcctggcaagtgcttgtgcccacgtccgcccaggacccagcccgtgttgagtgaagctcttggggcccagcgtgcgtcctgaccgcacaggagagagctgaaggtgggtggcccaggcccagggtgtgaactttctcccatggtttagtctctgacgcggcactgggccggaagttcaactgagtgcagtgcaggtggattccctcagcagcctgtgtgttgtgtgaaataaattggacttgaaacaagaaaaaaaaaaaaaaa

SEQ ID NO: 141937 - DNA, 493 bp, Homo sapiens; identical to SEQ ID NO: 131970

SEQ ID NO: 141938 - DNA, 1500 bp, Homo sapiens
atgggcaattttgttgagcaatcaacgcttaataaaacacatccggtaatttataacgtctgcaattatcagaaacccgctgccggtgagcctgcgttgttactctgggatgatgtcataaccttattccatgaatttggtcatacgctgcacggcctttttgcccgccagcgttatgccacgctttccggcaccaacacgccgcgtgattttgtcgaatttccgtcgcaaatcaacgaacactgggcaacgcatccgcaggtattcgctcgctacgcccggcattatcagcgcggggcagcaatgcctgacgaactgcaacagaaaatgcgtaatgccagcctgttcaacaaggcgattaaggtcaagcgataccgctcttacagaggagaggtagggcaaaccgcccctaatgttctccaaagagatttcaaggctacgcggccaaacgagaagtgggttaccgatgttactgaatttgcagtcaatgggcgcaagctgtatttgtctccagtaatagatctcttcaacaacgaagttatttcttacagcctttcggaaagaccagtgatgaacatggttgagaatatgctcgatcaggcattcaaaaagcttaatcctcacgagcatcctgttctgcactctgaccagggatggcagtatcgtatgagaagatatcaaaatatccttaaagaacatggtattaaacaaagcatgtccagaaaaggcaattgtctggataatgctgtggtggagtgtttctttggaaccttaaagtcggagtgtttttatcttgatgagttcagtaatataagcgaactgaaggatgctgttacggaatatattgaatactacaacagcagaagaattagcctgaaattcaaagcgttatcgctgatttataacaaagatctgctgccgaacccgccaaaaacctgggaagagatcccggcgctggataaagaactgaaagcgaaaggtaagagcgcgctgatgttcaacctgcaagaaccgtacttcacctggccgctgattgctgctgacgggggttatgcgttcaagtatgaaaacggcaagtacgacattaaagacgtgggcgtggataacgctggcgcgaaagcgggtctgaccttcctggttgacctgattaaaaacaaacacatgaatgcagacaccgattactccatcgcagaagctgcctttaataaaggcgaaacagcgatgaccatcaacggcccgttcacttacaccgcttctcaacccggtacgcaccagaaaatcattgatatggccatgaatggcgttggatgccgggcaacagcccgcattatgggcgttggcctcaacacgattttacgtcacttaacaaaactcaggccgcagtcggtaacctcgcgcatacagccgggcagtgacgtcatcgtctgcgcggaaatggacgaacagtggggctatgtcggggctaacatcgcgccagcgctggctgttttacgcgtatga

SEQ ID NO: 141939 - DNA, 776 bp, Homo sapiens
gacgacgtccgccccaagccgccgcctcccccgctaccgcctccgccgtccgtctccctgcacctcccagtccgccccccgcgcccaccccggccacttcccccccccgcccggtcgcgccgctcatctcggccgcggcgactcacccgcgtcaccccgggtttccccagtcccgacgttgaccccgccgccaggtccacgccgccatccctcgggtcggcctctaggggatcccggcgctggataagaccttcaaagcaaaaggtaagagcgcgctgatgttccacctgcaagaccggtctttcccctggccgctgattgctgctgccgggggttatgcgttcaagtatgaaaccggcaagtacgccattaaagccgtgggcgtggataacgctggcgcgaaagcgggtctgaccttcctggttgacctgattaaaaacaaacacatgaatgcagacaccgattactccatcgcagaagctgcctttaataaaggcgaaacagcgatgaccatcaccggcccgtgggcatggtccaacatcgacaccagcaaagtgaattatggtgtaacggtactgccgaccttcaagggtcaaccatccaaaccgttcgttggcgtgctgagcgcaggtattaacgccgccagtccgaacaaagagctggcgaaagagttcctcgaaaactatctgctgactgatgaaggtctggaagcggttaataaagacaaaccgctgggtgccgtagcgctgaagtcttacgaggaagagttggcgaaa

SEQ ID NO: 141940 - DNA, 1812 bp, Homo sapiens
ttattctgagccaaatgtgagaagcatgaccggtgacacagctccagggggtcctgaggacatgtgccgcagggggttgggccacagcccgagctcatacatcccccgccgccaccatataacaggtggtatccagcgcacgagcggcaagcaacgttgaccagtgatgctctttgagcggcccgcgaacccaggcggcaggaagtaccaggatttcagctccctgtaatgcctgtgccagcgccagctctgcttcaggggagcaaagggggctgctggggtgctcgggctggctaatgtcacatgtgtgaatggcacacgtgtgctgatgtcacgcgtgtggatgtcacacgtgtgtgctgatgtcatgtgcgtggatgtcacgtgtgtgctggtgtcacgcatgtgggtgtcacgcgtgtggatgtcacgcgtgtgtgctgatttcacgcgtgtggatgtcacacgtgtggatgtcatgcaggaccgcagctccctcctcaccaacaaattgcttcccacaacaatggtgcctctgtgcacacctcctcctccactctgccccgctgtctttgcaccccgctctgcagcctccagggggcagcaattgcggcttccttcgttgttgtgtgtacgccggcggtcacctgtctttgcaccctgctctgtagcctgcaatggggctttcccccaattcctcccacgcatcaatgtgtgttcactcaccaacttgcccctctgtgagccaaggtcccctaaggacggaggcagagcctggcggggtgcaccggcgtaccggggaacgccgaggatggctggcacccccgggcaggctccttgatgccagccctctgctttcagggctgccgaaggacgtttgggccgattccgggtctgccaactggacacagagctgctgtgagcctttgtgcccaggtcggcctttgtgctcacattggccgtctgcccctcagtcccagcacccagccagtgctccaggaatgtttgtaagggctttggcgtgtgcatgttgaacaaacccttctccagagcggccatgccacgttcccaccagcggtgcatgagggttcccgtggctcctctgcctctggcacgtgggcccaccagtctctctggggtcggcccttcctggttgacctgattaaaaacaaacacatgaatgcagacaccgattactccatcgcagaagctgcctttaataaaggcgaaacagcgatgaccatcaacggcccgtgggcatggtccaacatcgacaccagcaaagtgaattatggtgtaacggtactgccgaccttcaagggtcaaccatccaaaccgttcgttggcgtgctgagcgcaggtattaacgccgccagtccgaacaaagagctggcgaaagagttcctcgaaaactatctgctgactgatgaaggtctggaagcggttaataaagacaaaccgctgggtgccgtagcgctgaagtcttacgaggaagagttggcgaaagatccacgtattgccgccaccatggaaaacgcccagaaaggtgaaatcatgccgaacatcccgcagatgtccgctttctggtatgccgtgcgtactgcggtgatcaacgccgccagcggtcgtcagactgtcgatgaagccctgaaagacgcgcagactcgtatcaccaagtaatgctgtgaaatgccggatgcggcgtgaacgccttgtccggccctcgccagacctggggccaggtccaagcagcagcagcagcagcagcagcaggagcagcatgattggcaggcacgcaggtagcggccccat

SEQ ID NO: 141941 - DNA, 690 bp, Homo sapiens
tgcttttgctttatcacttcagtatgtaatagctgaccaggcccagaagaaaacagaaatagaacagaattcatctgtgaaaaggccaggcagtatgagacttgtgaaaacctgtgaccctgcctaggcaaccactgatgaactttctatcactatagatgcagctgcattttctggagcttccatgctttaattcaacagactggggaagaagcaaagctgggtgacttctaaggctgggcttaaggtgtctgcagctcctgcacagttggaatgctccctcctgaatccctgccaccatgctgtgagaaacccaaggcatgcagaggtcatatggaggagaaccttgggtcaacagcctcaagttggtctcctagctgacagccaattttcctccacttccagtaacacccatgaatgtagtcctacccgaacagctgcacgtgccttctcaccaggctccctgcttccactcttacctctttccaatccactgtccagacagcagacagagccacctcttaaaatgcaaatcctacacatcacatcactcctcgagtgaacagccttcaatggctgccctaggcatggagaataggtccacgttgcacactgtggcctctgaggtcttgcaaggtctctgtctctctctctaacctcctgtcacacttggcccaccggacgcgtggg

SEQ ID NO: 141942 - DNA, 423 bp, Homo sapiens
cgggagctctgcctcacccagttccaggtagacatggaggccgtcggggagacgctgtggtgtgactggggcaggaccatcaggagctacagggagctggccgactgcacctggcacatggcggagaagctgggctgcttctggcccaatgcagaggtggacaggttcttcctggcagtgcatggccgctacttcaggagctgccccatctcaggcagggccgtgcgggacccgcccggcagcatcctctaccccttcatcgtggtccccatcacggtgaccctgctggtgacggcactggtggtctggcagagcaagcgcactgagggcattgtgtatgcggggcccaagctgcccgcgggtgcacccaggctgcagggtgaggccaggcaggcctgggtaggggcagcttctggagccttg

SEQ ID NO: 141943 - DNA, 581 bp, Homo sapiens
tcaagcccatgcctcgccctcgccttcgcccccgacctgccccccggtctctgtccgtcgcacctcggatccgctagaaagccgccgccgtgccgcctccacggccagcgccccgctctccgcagccgcctccgagtcagtgcgccaccggagcagcgcggcgcctgttgggtaacagtcaccagcgcccgcccaccgctgtcgggcagtatgaaaagtgcggcactgtgattggccagccagttccaggtagacatggaggccgtcggggagacgctgtggtgtgactggggcaggaccatcaggtgagtcccatggccccttttggatgttcccggagtcacttagctctttgacctggttaacatctggtttcttgtggattttaatgttgttaccaaatccaggcctccgagggctggtgaccctggcagccatttcccgtcctgtgcaactccgcctttctggctttaagaagtatgcttggagctcatctaacatcttattttccattttctgtttcttaatacttacagaggcttccgactttttctccaggtctgtattttccttgttcttct

SEQ ID NO: 141944 - DNA, 1695 bp, Homo sapiens
atgtccagtttatgtcctgttataaaggatacaactcaggaacagtcagatggcagagatgcatggggcaaggtctcggtcagaaagaacgcttttgcagcggcagaaagggagactcgggatccgggcctggggtcccgcggccggcccctccccactccccgcgacccgctggaacgcgcacggccggggacgcggcggggaccgcgcgggcaggcggcgcacggccggatagcgcgagggggccgcgtgaggcggtgcgacgttctgggccccaaagccggtctagcgcgcgggcgtcttccttacttccgctgccgccgccgccacatcccgggacccgacggccgcggcgcgaggcctcggggcaaggcccggcgaagcccgacccgcgcggcgcccccagggccaggggaggagcctaaggacccggacgagcgccgctccagtaggaaggtggacgcacaagatgaaagcagctgtgatccctacatcaccatctggaggaaagttgcattatcctcatggaatgtgatgagcaacagccccagtgaacaccacagggtggagcatggcagtgggcttacccagacccccagctctgaagagatcagccctactaaatttcctggattgtaccacactggtgagccctcacctccccatgacatcctccacaagcctcctgatatagtgtctgatgatgagaaagaccatgggaagaaaaaaggaaattttaagaaaaaggaaaagaggaccgaaggctatgcagcctttcaggaagatagctctggagatgaggcagaaaagcttatgcctagatttgaagaggcttatgggaggaccacagagactgagaaagtgcaggaattccagcgtttactcaaagaactgccagaaggtaactatcttctgatttctttgttcgttgtgcacatggaccatgtcatcacaaaggaactggaagcaaaaatgaatatacagaacatttatatagtggtcagcccaactgtgcagatcagcaatctagtcctgtatgtgttcttcacacatgtgcaagaactctttggaaatgtggttctaaagcaagtgacgaaaactcggcgatggtctaacgtggccacgatgcccacgctgccagagacccaggcaggcttcaaggaggagatcaggatacaggagttgcttttgaattgtttacatcaagatctgcagggtgggataaaggatttgtctgaagaagaaagattatgggaagagaaagagatcctgactaaacaggaggagctcctgggcatggagcagtttctgcgccggcagattgcctcagaaaaagaagagattgagtgcctcagagccgagactgcggaaattcagagtcaccagcagcagggcctaagcgagactgaggagtactcctccgagagcgagagtgaggatgaggaggagctgcagatcattctggaagatttacagagacagaacgaagagctggaaataaagaacaaccatttgaatcaagcaattcacgaggagagtgaggccgtcatcgagccgcgcatgcagccctggctgctccagttgcagccagacagggccaagcagcaggcgcaggaggacgaggagcccgagtggcgcggaggtgccatgcagacgcccaagaatggcatcctcgagccagtagcagctaaatag

SEQ ID NO: 141945 - DNA, 2192 bp, Homo sapiens
agtctggtttaactggttggaacgactaaagcacgctggcgcaaggaaagctctcaacttcgggagctgaggcgcaggctggccagagcgtggagaggaaagccctttccatcctcaaggccgttgcaggagatgcccgcgagccaccttcgccagcaccacaccggggtgtaatggataggtaacagagaagacctcgtcccttccctagtcagggcatcagcatgactgagtgcttcctgccccccaccagcagccccagtgaacaccgcagggtggagcatggcagcgggcttacccggacccccagctctgaagagatcagccctactaagtttcctggattgtaccgcactggcgagccctcacctccccatgacatcctccatgagcctcctgatgtagtgtctgatgatgagaaagatcatgggaagaaaaaagggaaatttaagaaaaaggaaaagaggactgaaggctatgcagcctttcaggaagatagctctggagatgaggcagaaagtccttctaaaatgaagaggtccaagggaatccatgttttcaagaagcccagcttttctaaaaagaaggaaaaggattttaaaataaaagagaaacccaaagaagaaaagcataaagaagaaaagcacaaagaagaaaaacataaagagaagaagtcaaaagacttgacagcagctgatgttgttaaacagtggaaggaaaagaagaaaaagaaaaagccaattcaggagccagaggtgcctcagattgatgttccaaatctcaaacccatttttggaattcctttggctgatgcagtagagaggaccatgatgtatgatggcattcggctgccagccgttttccgtgaatgtatagattacgtagagaagtatggcatgaagtgtgaaggcatctacagagtatcaggaattaaatcaaaggtggatgagctaaaagcagcctatgaccgggaggagtctacaaacttggaagactatgagcctaacactgtagccagtttgctgaagcagtatttgcgagaccttccagagaatttgcttaccaaagagcttatgcccagatttgaagaggcttgtgggaggaccacggagactgagaaagtgcaggaattccagcgtttactcaaagaactgccagaatgtaactatcttctgatttcttggctcattgtgcacatggaccatgtcattgcaaaggaactggaaacaaaaatgaatatacagaacatttctatagtgctcagcccaactgtgcagatcagcaatcgagtcctgtatgtgtttttcacacatgtgcaagaactctttggaaatgtggtactaaagcaagtgatgaaacctctgcgatggtctaacatggccacgatgcccacgctgccagagacccaggcgggcatcaaggaggagatcaggagacaggagtttcttttgaattgtttacatcgagatctgcagggtgggataaaggatttgtctaaagaagaaagattatgggaagtacaaagaattttgacagccctcaaaagaaaactgagagaagctaaaagacaggagtgtgaaaccaagattgcacaagagatagccagtctttcaaaagaggatgtttccaaagaagagatgaatgaaaatgaagaagttataaatattctccttgctcaggagaatgagatcctgactgaacaggaggagctcctggccatggagcagtttctgcgccggcagattgcctcagaaaaagaagagattgaacgcctcagagctgagattgctgaaattcagagtcgccagcagcacggccgaagtgagactgaggagtactcctccgagagcgagagcgagagtgaggatgaggaggagctgcagatcattctggaagacttacagagacagaacgaagagctggaaataaagaacaatcatttgaatcaagcaattcatgaggagcgcgaggccatcatcgagctgcgcgtgcagctgcggctgctccagatgcagcgagccaaggccgagcagcaggcgcaggaggacgaggagcctgagtggcgcgggggtgccgtccagccgcccagagacggcgtccttgagccaaaagcagctaaagagcagccaaaggcaggcaaggagccggcaaagccatcgcccagcagggataggaaggagacgtccatctga

SEQ ID NO: 141946 - DNA, 434 bp, Homo sapiens; identical to SEQ ID NO: 136099

SEQ ID NO: 141947 - DNA, 1695 bp, Homo sapiens; identical to SEQ ID NO: 141944

SEQ ID NO: 141948 - DNA, 3860 bp, Homo sapiens
agtctggtttaactggttggaacgactaaagcacgctggcgcaaggaaagctctcaacttcgggagctgaggcgcaggctggccagagcgtggagaggaaagccctttccatcctcaaggccgttgcaggagatgcccgcgagccaccttcgccagcaccacaccggggtgtaatggataggtaacagagaagacctcgtcccttccctagtcagggcatcagcatgactgagtgcttcctgccccccaccagcagccccagtgaacaccgcagggtggagcatggcagcgggcttacccggacccccagctctgaagagatcagccctactaagtttcctggattgtaaccgcactggcgagccctcacctccccatgacatcctccatgagcctcctgatgtagtgtctgatgatgagaaagatcatgggaagaaaaaagggaaatttaagaaaaaggaaaagaggactgaaggctatgcagcctttcaggaagatagctctggagatgaggcagaaagtccttctaaaatgaagaggtccaagggaatccatgttttcaagaagcccagcttttctaaaaagaaggaaaaggattttaaaataaaagagaaacccaaagaagaaaagcataaagaagaaaagcacaaagaagaaaaacataaagagaagaagtcaaaagacttgacagcagctgatgttgttaaacagtggaaggaaaagaagaaaaagaaaaagccaattcaggagccagaggtgcctcagattgatgttccaaatctcaaacccatttttggaattcctttggctgatgcagtagagaggaccatgatgtatgatggcattcggctgccagccgttttccgtgaatgtatagattacgtagagaagtatggcatgaagtgtgaaggcatctacagagtatcaggaattaaatcaaaggtggatgagctaaaagcagcctatgaccgggaggagtctacaaacttggaagactatgagcctaacactgtagccagtttgctgaagcagtatttgcgagaccttccagagaatttgcttaccaaagagcttatgcccagatttgaagaggcttgtgggaggaccacggagactgagaaagtgcaggaattccagcgtttactcaaagaactgccagaatgtaactatcttctgatttcttggctcattgtgcacatggaccatgtcattgcaaaggaactggaaacaaaaatgaatatacagaacatttctatagtgctcagcccaactgtgcagatcagcaatcgagtcctgtatgtgtttttcacacatgtgcaagaactctttggaaatgtggtactaaagcaagtgatgaaacctctgcgatggtctaacatggccacgatgcccacgctgccagagacccaggcgggcatcaaggaggagatcaggagacaggagtttcttttgaattgtttacatcgagatctgcagggtgggataaaggatttgtctaaagaagaaagattatgggaagtacaaagaattttgacagccctcaaaagaaaactgagagaagctaaaagacaggagtgtgaaaccaagattgcacaagagatagccagtctttcaaaagaggatgtttccaaagaagagatgaatgaaaatgaagaagttataaatattctccttgctcaggagaatgagatcctgactgaacaggaggagctcctggccatggagcagtttctgcgccggcagattgcctcagaaaaagaagagattgaacgcctcagagctgagattgctgaaattcagagtcgccagcagcacggccgaagtgagactgaggagtactcctccgagagcgagagcgagagtgaggatgaggaggagctgcagatcattctggaagacttacagagacagaacgaagagctggaaataaagaacaatcatttgaatcaagcaattcatgaggagcgcgaggccatcatcgagctgcgcgtgcagctgcggctgctccagatgcagcgagccaaggccgagcagcaggcgcaggaggacgaggagcctgagtggcgcgggggtgccgtccagccgcccagagacggcgtccttgagccaaaagcagctaaagagcagccaaaggcaggcaaggagccggcaaagccatcgcccagcagggataggaaggagacgtccatctgagcagcctgcgtggccgtctggagtccgtgagactgaaaggacccgtgcatcttactgtaacccgggggccaggccggctctctcgctgtacattctgtaaaggtgtcttctcttctcagactcttcctctgtcacacgtctgactccttcacgtcaggctcaggttccatgggaggacgaagcagtggacgcattgtgggctttagggacagatgagttttccagatagtgtcagcttatttgaagattaattttctttgttaacttaaaataactattttaacccttgagtggcttctttttaaaccaaaaaccgtctttctttgcttttttatcacagcagaatcaggatctctttctcattcaaggggggaaccacaccaggtcagcgctgcgcctgctgtggccgccgcgagccacgccctctgggatctctggtaccgtcactcttgcttgtgccttccacaccttctcggtgcagatccctatgggggagctgcctcacgttctctgactggtcagagcagcgcctggtgggtgttccctggcccactctcctctctccttctgcagttctaaaccacagtctataagcccgagtcaccaggacggcctgtctggccacagacaggggctgcctgtggagcctgcccaccggcccccggcagtgcagtccagcggggaggaggctgcccgttcctgccagttcctcactgcggggaccagcaaaggccttctcactgggttggtcaaaggtagtcaccttggcctggtgcatccacagaggatgttgttcaaaccagaaatcttttaaacgactgaccttccttaaaaacagaatgactccgattgcttgcttgggctagaatgtacacgtctccttgcctgaataagccatatatatgctcttaaacaaaagtttgaaattatccatatcatctcagtgaacctactggtggactcccaattgacaagattgagcaatagaaaaaaattcctttcctttgaatgatagctgtgattcaccccaccccattttcttgtttctggtccatccgatgagacggatgctctgatgctctgaggcttctgggaggctgggccctggaggcaacgtgctgcaggcgcactctgtcagagtgaacagcaccgcgagacaggccaggctcgtggctcggaagacaaaccccacacacactcaaggggtcgaaaacaaaccccacacgagggctctcacctccttctcctaggtagtatttattttcagcacctgtttgatgcagtttttaatcctctacctattgcactgttgtgactcgttggccattatttgattttggtacgaaaaaaagctttgttatagaaatcagcatactatttttttaaatctggagagaagatattctggtgactgaaagtatggtcgggtgtcagatataaatgtgcaaatgccttcttgctgtcctgtcggtctcagtacgttcactttatagctgctggcaatatcgaaggttccttttttgtttgtgtaaactctaatttctatcaaggtgtcatggatttttaaaattagtatttcattacaaatgtctcagcattggttaactaattttgggcaggaccattattgatcaagcaaataaattcaacagccatttgggaaaaag

SEQ ID NO: 141949 - DNA, 508 bp, Homo sapiens
  misc_feature (1)...(508): n = a,t,c or g
agtcagactagccgagcagagctccagggttgcagaaggcgtgcacaggtcacgaaggaatggctgttcaccccccgaggattcctgttcagtccgatcacttgatctccatcgaggggctgctctgtaaactcccctgtgcaggacaggtcaccaaggagtccggtctggtcagctttagccttcggccagttttaccgcaaaatacgctctcaaattccttctatctctttccattcggttatgcctctccctacgttgagaccttcctccctggggcccactctgggcctgctcccccaggtttgcctgtgaggactccgaggactgccaagcgccttgtgtggcggtggcaccttcgcccacattctgaatctctccaagggctcttcgctctacatttgtgtccaactgacgcattctactccgattcctcgaattccacgacactggactagggacatcagttnncngcncnctncaaagggaatccaggnnnngaaaccca

SEQ ID NO: 141950 - DNA, 754 bp, Homo sapiens
atggctgttcaccccccgaggattcctgttcagtccgatcacttgatctccatcgaggggctgctctgtaaactcccctgtgcaggacaggtcaccaaggagtccggtctgcaacccccgctgaccatggcagtatttcatgacgaggtggaaatcgaggacttccaatatgacgaggactcggagacatatttctgtccctgcccatgcggagataacttctccatcaccaaggaagagctggagaatggggaaggtgtggcaatgtgtccaggctgctctctcattataaaagtgatttatgacaaagatcagtttgcgtgtggagaaacagtgccagtgccttcagtcaacaaagaatgagttaaatgctaaggaagccttcaggaatccgaaccctgaacagctggaaatgagcccagatagaaacttcaaatgcaaagctcctggcttcccacagacacccatttatgctgtcgtgttctgtaagagtgtggattctttctatcaactgctgatatcatcttcaggaagcaagtccatcacattgcatatctggattttgtgcttagacccttaaattgcaagcattcttaattatgcatctaaatttaaaagaagatagtttcagtccagtgctttctttcccttggtttcatcgttttcatgtcttcaacccaattaattcggtatttgaccccagcgacttgtgcctcagtctttagggtttcttaataaaaaaaaaattgtaaaa

SEQ ID NO: 141951 - DNA, 1811 bp, Homo sapiens
caggcggcgaggcggccgtcgagggcgcgggcggcggggacgcggcgctgggcgagccggggctgagcttcacgaccaccgacctgagcctggtggagatgacggaggtggagtacacgcagctgcagcacatcctctgctcgcacatggaggcggcggctgacggcgagctcgagatgcgcctcaactcggcgctgctggcggcggcgggcccgggcgcaggcgcgggcggcttcgcggcgggcggtcaggggggcgcggcgcccgtgtaccccgtgctgtgcccgtccgcgctggcggccgacgcgccctgcctgggccacatcgacttccaggagctgcgcatgatgctgctaagcgaggcgggcgcggcggagaagacgtcgggcggcggggacggagcgagggcccgggccgacggcgccgccaaggagggcgcgggcgcggctgcggctgcggctggacccgacggcgcgcccgaggcccgggccaagccggccgtgcgcgtccgcctggaggaccgcttcaacagcatccccgccgagccgccgcccgcgccgcgcggccccgagccccccgagccgggcggggcgctcaacaatttggtaactctcattcgacatccatctgaactaatgaatgttcctcttcagcaacaaaacaaatgtacagcattagtgaaaaataaaactgcggctacaactactgctttgcaatttacatacccactgtttactacaaatgcttgctctactagtggaaattctaatctttcacagacacagagttctagtaactcatgttctgtacttgaagctgccaagcaccaggatattggattgcctagagcattttctttctgttatcagcaagaaattgaatccactaaacagacgttaggtagtagaaacaaagttttgcctgagcaagtttggattaaagtgggagaagcagcgctatgcaaacaagcactgaagaggaatcggagtagaatgcgtcagttggacacaaatgtagagcgaagagcccttggagagattcagaatgtgggcgaaggtgccaccgccacacaaggcgcttggcagtcctcggagtcctcacaggcaaacctgggggagcaggcccagagtgggccccagggaggaaggtctcaacgtagggagaggcataaccgaatggaaagagatagaaggcgcagaatccgcatttgctgtgatgagttgaatctcttagtgccgttctgcaatgccgagactgacaaggccacaactctgcagtggaccacagcattcctgaaatacatccaggaaagacatggagattctcttaaaaaggaatttgagagcgtattttgcggtaaaactggccgaaggctaaagctgaccagaccgggactcccttggtgacctgtcctgcacaggggagttttacagagcagccccttcgattggagatcaaagtgatcggactgaacaggaatcctcggggggtgaacagccattccttcgtgacctgtgcaacgccttctgcaaccctgggagctctgctcgggcttagtctgactcgaaaagggcgttgattcaagctggacggggactccagtagggatttttgagagcacattttgtaaaaatatttatctagacgcaaatgcttatccatgaatgtcctcttagaccatttggggatgaagccatcttaataattagtaataattaattagtaataattagtaagcattttctcaatgctctgattccatcatgttttcttaacatgataacttaaaaaattgacatcctttgtacttt

SEQ ID NO: 141952 - DNA, 381 bp, Homo sapiens; identical to SEQ ID NO: 118657

SEQ ID NO: 141953 - DNA, 455 bp, Homo sapiens
tgcaggggggagccaaaagggtcatcatctctgccccctctgctgatgcccccatgttcgtcatgggtgtgaaccatgagaagtatgacaacagcctctgacttcaacagcgacacccactcctccacctttgacgctggggctggcattgccctcaacgaccactttgtcaagctcatttcctggtatgacaacgaatttggctacagcaacagggtggtggacctcatggcccacatggcctccaaggagtaagacccctggaccaccagccccagcaagagcacaagaggaagagagagaccctcactgctggggagtccctgccacactcagtcccccaccacactgaatctcccctcctcacagttgccatgtagaccccttgaagaggggaggggcctagggagccgcaccttgtcatgtaccatcaataaagtaccctgtgctcaacc

SEQ ID NO: 141954 - DNA, 732 bp, Homo sapiens; identical to SEQ ID NO: 125650

SEQ ID NO: 141955 - DNA, 765 bp, Homo sapiens
atggggaaagtgaaggttggagtcaatggatttggttgtattgggcgcctggtcatcaggactgcttgtaattctggtaaagtagatattatcgccatcaatgacccattcattgacctcagctacatggtctacatgttccagtatgatcccacccatggtaaattccatggcaccgtcaaggctgagaacgggaagcttgtcatcaatggaaatcccatcactatcttccaggagccagatccctccaaaatcaagtggggtgatgctggcactgagtatgtcatggagtccactggcatcttcaccaccatggagaatgctggggctcacttgcagtggggagccaaaaggccacagggctctccagaacatcatccctgccactactgggctgccaaggctgtgaggaaggtcatccctgagctgaatggtaagctcactggcatggccctccgtgtccccactgccaacgtgtcagtggtggacctcacctaccatctggaaaaacctgccaaatatgatgacatcaagaaggtggtgaagcaggcatcagagggccccctcaaaggcatcctgggctacactgggcaccaggtggtctcctccgacttcaacagtgacacccactcttccaccttcaatgctggggctggcactgccctcaacgaccactttgtcaagctcatttcctggtatgacaatgaatttggctacaacaacagggtggtggacctcatggcccacatggcctccaaggagtaa

SEQ ID NO: 141956 - DNA, 390 bp, Homo sapiens
  misc_feature (1)...(390): n = a,t,c or g
cggaaagctcactggcatggccttccgtgtccccactgccaacgtgtcagtggtggacctgacctcccgtctagaaaaccctgccaaatatgatgacctcaaaaaggtggtaaagcaggcgtcgaagggccccctcaagggcatcctgggctacactgagcaccaggtggtctcctttgacttcaacagcgacacccactcctccccctttgacggtggggttggcattgccctcaacgccccctttgtcaagctcatttcctggtatgacaacgaatttggctacagcaacagggtggtggacctcatggcccacatggcctccaaggagtaagacccctggtcccccagccccagcaaaagcacaagagaaaggtcgncgcggccgca

SEQ ID NO: 141957 - DNA, 373 bp, Homo sapiens
cccacgcgttcggaaaggtcatccctgagctgaacgggaagctcactggcatggccttccgtgtccccactgccatcgtgacactggcggacctgacctgccgtgtaaaaaaacctgccaaatatgatgacatccaaaagggggggaaccgggcgacattgggccccctcaagggcgtcctgggctacactgaccaccacgcgggctcctctgactttgacagagacacccactcctccacctttgacgctggggctggaattgccctcgacgaccactttgtcaagctcatttcctggtatgacaacgaatttggctacagcaacagggtggtggacctcatggcccacatggcctccaaggagtaagaccc

SEQ ID NO: 141958 - DNA, 1007 bp, Homo sapiens; identical to SEQ ID NO: 125651

SEQ ID NO: 141959 - DNA, 548 bp, Homo sapiens
aagtgattacccgccttgcctttccaaagtgctggattacagacgtgagtcaccgtgcctgccctgcccaggctctttttaacaaccagctctctccgtgggcctctccggactgtcatactcaggagccgggtcttgggctcctcctgcacaggctcctgggggttgccaaggtgggatttttcggacaccatttccttggggacagcagttggtggctgtttctttcttggctgtcttcgaacctttgagttcttattctgtcttcccatgtctgcatcctcatcattttcaatgaactcctctgtaattatttttactttttcttccctgggattcattttggctgggatgggtccttgttaatgtcagcccatatccattagaatatagcttaagaaactttacaaaaggcactttgcagattctgcattctaggatggaagtggagagagacggtgctgttgaatcttttaaaagggtccggagggaaaggctgagtgttggagatgcccctgggctcctccctgggaagctgcagccatgtc

SEQ ID NO: 141960 - DNA, 1167 bp, Homo sapiens
atttaattcttttttccacaaaagaaaaataaacaggtttaatcaaggttcttcctaccacattgtagggtctaacccagagctacagggagccatgtgaattcagtacttgggatttcaactcagacgtggagtgtcattctcctggtggtggcaggtttctcctcagccactttctttcttgcagggacatcagctttttcctcctagccctccacccacacctcattaccatcctgatattaaataccatttcctttcctcctccttgtgcaggtggttcttcttcttccccttcctcctcctcttgattaagttcccgctctatgtcttgcttttggtttttcctctgatccttctggttcgggatcaaagttgaaagtaaagaagttataggcctcttctgcagaagggaagccaggtggaacctgggggtttaggcttgatttttcgtgcagaatcatggaacttgactcttgagtaactttgggagtcaacttcttgttgagtcctttctacctctttccctggctctgtgccaaattcagtctccaattctttcttactgggacttcgtaagcgtctgggccgaggagtggggatttcctgcagcaatgcactttctgctttggacctcgctgcttgcaatttctccctcatgcgtcccctcatggaaaattctgcaaagcctgttctggaagttgaaggaattggaggtaagctccgtgggcctctccggactgtcatactcaggaggcgggtcttgggctcctcctgcacaggctcctgggggttgccaaggtgggatttttcggacaccatttccttggggacagcagttggtggctgtttctttcttggctgtcttcgaacctttgagttcttattctgtcttcccatgtctgcatcctcatcattttcaatgaactcctctgtaattatttttactttttcttccctgggattcattttggctgggatgggtcccttaagaaactttacaaaaggcactttgcagattctgcattctaggatggaagtggagagagacggtgctgttgaatcttttaaaagggtccggagggaaaggctgagtgttggagatgcccctgggctcctccctgggaagctgcagccatgtcttggagcaaaacccacgcgtccgcg

SEQ ID NO: 141961 - DNA, 4468 bp, Homo sapiens
ctcactgccggcttcctcactggaatgtcgtaagctcgcacaatgttcaccagcagctttatgtctccatcagacaggttttgggctgtcaccttcttccgaccttttctccttggccgcagtggtcgcttttgttctgccagcttgaaaaggcttaggcccaaaatgctttcacggagatgatatgcaagaaacacttccagctgtggtgctgcaaccaggtttcctcgtccaccccagaagcttgtgggtggggtctcagccacctctactgccatgcgacaggagagtaagggaatgtctggcactgggagactgatattgggaacttcttcttctactatcatatcagcaagaagaaaatattgttttgcaattaagaaacgatttatcactgattctctaacctgctggaggtacttggctactatggccctatgggtgtctatgtgttccttggtttctattacatttctgtctcgtaaccgtttctcatagtcctggaataccttttccataatttctcggtcatagactggaacttgcttataatttcggaattctggcacctcttggcttctaagatgaagaagcctaaatcgtttggatctatttaattcttgatctgaaacaaagttaaactcctgttgcagctgctccagtctaaagaaatcagggacataggattcaccactggtagcaaccgagataagctgcatcaaaggggcattgttggggtcatttgggtcgagcttggactctgctgcccacttggccaattttttcatgtctgtcagtcctgatgtgccaatagatgagatggcatctgctttcttcaaagcactccgaaatccgatgttctgctgtgacaatggaggaattaaaggtatcccgttttctccaatggcccatgccacactatgagacactttccctgaggtcatcagagtcagctggttactgccatcagcttcaaatgagaagggcactccacttccaactccctcgtggtccagtgtcacatgctgattactgctaaactccacttcttcagtaggagcccttccagtgacaacagtagtctcaggaataggcagaaacacttctgctagcaaggtgggactactgtgtccgacagtttcatagaccttctgcttgtagaactgccttggcattcttatctcaagcctggctagaagctctgagcccatcagtggaggcatggctgggcacctgcaggaggggaggccttcttgccttctctcctgtctttctgagtctgccagtgggtgtctcctggcccacttcctttccttcctgcctgcctcattactgtcttctgctcttccttctagctctctatccggtcttctcatgttaatcttggtcttcctgatatcagcttttcctactgctaagaggacagaggaagaggagcccttcaagtgttccaggccatcagcctcagcagaagccccagagcagatggaatagagagtccacgtggaccccacagcaggggcagggacctcacaggggctgtgtccagtgaccacgtatctgaaggctgccccagttctcctctccagtgcagagttgggcaactctctacttttacctcctgggttcattagaagagctgcccaccacagcttgggaacaggaccctggaggcgctggccttggtcagccaccccctttaattggtcaattgtggtaaggtccagggggtccttgaagtggggcttatgtggccaggatggcatctgaagtgttaaactctccggccagttgactatttgcaaattgaaaatctgcccaaagtgaactcggaagtctgctcctagtggccgactgactgtcctggacacctccttgttgttgaacagcacttttaagtacactgagcgctttctttacatcctcccttctcgagacctccgctctggggcactggtcattgggtgttacgcttcctgccaggcttagctccgggaccagcgtgggctcccaaggcctcctcctgctctgggctgctctctccctcacctcctgctctatcactgcccgatcagtgggctctggagggctgggcttcacaaggtcctcctcgggatacggctctgcaatctcatcaccgggatgttcttctgctgcttgtttccttttcttcttcttggccctctgttgagttagaggcaacatgatatcaaacaggaattttggaatttcatttaagagcacagtcttcatagccagatggacttgcactttcctccaggccttccactgttgtaacgacgttctgtattcttccatcttctgtgcgtactcctccgtgtgctcttctaacagttcacttatttcagcttgaatttctgcttcatatgcttcttcatctgctttctggtcagctttttcctttctcaaaacaagtttcaagggagtatttgtaaatctctggaactctcgaagggatttcatctctttccaaacttttatgatagtcttaagcaatgttctatctttttcttgttcagcatcacggaattttcttgtttgtcgaatttcagatttatactcattgatggttttttggatggtatcgagagactgatgaggtttttctggatcaaggccagtctgaacagcatttcttaaagcttggagcttatcagtaagaaatttcgccttgtttctctggtgtcttgcaaggtactggtcatataactgggccagcttggctgccaaaacatgctctcggctaaaacagggatgatgagtgaagattaaccctgaaatatcaatgtccagttggaaatttccaggagggtctccagatctgatcacatgctgactactgtgaacgtattttacagcctttttatacagtgtttcaagctctgccttaatgctctgctcctgtgttagtactggcggccttgaaggaaatggcttgatggggtttggcagagctaggatcctgccgtcatctccaaaccatcttctttcggggtcctgcatcagcaatctgttctccatgatgttctgattggtgcgtgccacctctggtcttaccccggtgtaaaggccttcatcttccaggaacctgggctgtacattctcaggaagctttttatatgtagggactgtctgcctactgggtatgaagagcatttctctttccatctgcagccgatcatggatgctttcataatctgcaggtctgactgctacaaaatcgtcagccacgtgatctaagcccaataggaagtcctcggcatcatcaccattaagcagttcttcctcatccatttcctttcctcctccttgtgcaggtggttcttcttcttccccttcctccctctcttgattagttcccgctctatgtcttgcttttggtttttcctctgatccttctggttcgggatcaaatgttgaaagtaaagaagttataggcctcttctgcagaagggaagccaggtggaacctggggtttaggcttgatttttcgtgcagaatcatggaacttgactcttgagtaactttgggagtcaacttcttgttgagtcctttctacctctttccctggcacagagctgaatccccctatatccccactggctgtcaactccactgagctcctcaagggtgagctgtcactgtcatcactgggtgttctgagcctatcggacacctctgtgccaaattcagtctccaattctttcttactgggacttcgtaagcgtctgggccgaggagtggggatttcctgcagcaatgcactttctgctttggacctcgctgcttgcaatttctccctcatgcgtcccctcatggaaaattctgcaaagcctgttctggaagttgaaggaattggaggtaagccttcgatgctggggctggcattgccctcagtgaccactttatcaagctcatttcctggtatgacaatgaatttggctatagcaatagagtggtggacctcatggcccacatggcctccaaggagtaagaccctccgtgggcctctccggactgtcatactcaggaggcgggtcttgggctcctcctgcacaggctcctgggggttgccaaggtgggatttttcggacaccatttccttggggacagcagttggtggctgtttctttcttggctgtcttcgaacctttgagttcttattctgtcttcccatgtctgcatcctcatcattttcaatgaactcctctgtaattatttttactttttcttccctgggattcattttggctgggatgggtcccctctctcctggctcccatccatcttctatccctgtctgttctgagttttgcccaagaagttcatctctgtgcactgcatcaccaagactatctgggcacctggagtcatgggctttgaccagtgaggggtataaataggagacatgtgataggatggtggtgccctcttcatcttccaccat

SEQ ID NO: 141962 - DNA, 3627 bp, Homo sapiens
  misc_feature (1)...(3627): n = a,t,c or g
gggcccctcccggttcaaaaaagccccnnnnnnnnnnncacccccaaaagggggggccttaaaaggccccccccggggtttttccggggttttaaagggcccctttaatttaaggggcgccccnnnnnnnnnnnnnnnnnnnnnnnnnnnnnnnnntggttgagcacagggtaactttattagatggatacatgaacaaggtgcggctcccctaaggcccctccccctcttccaaggggttctacatggcaaactgtgaaggaggggagattccagtgtggtggggggactggagtgtggcagggactccccaagcaattaagggtctctctcttcctcttgtgcttcttgcttggggctggtgggtccaggggtcttactccttggaggccaatgtggccaatgaggtccaccacccgtgttgctgatagccaaattcgttgtcataccaggaaatgagcttgacaaagtggtctgttgagggcaatgccagccccagccgtcgaaggtgggaggaagtgggtgtccgcttgttgaaagtcagagggagacccacctgggtgctcaagtgtagccccaggaatgccctttgaggggggcccttccgacggcctggcttcacacaccttctttgatgtcaatcatatatttggcaaggtttttcctagacgggcaggttcaaggtccaaccactggacacgttttggcagtgggggacaccggaagggccatgcccagtgaagctttcccggttcaagcttcagggatgacccttgcccacaggccttgggcagcgcccgtaaaggggcagggatgatgttctggaaagcccccgcgggcctttacgcccacagtttcccggaggggccatccacagtcttatgggtggcagtgatggcatggcctgtggtcatgagtccttccccgataccaaagttgtcatggatgacccttggccaggggtgctaagcagttggtggtgcaggaggcattgctgatgatcttgaggctgttgtcatacttctcatggttcacacccatgacgaacatgggggcatcagcagagggggcagagatgatgacccttttggctcccccctgcaaatgagccccagccttctccatggtggtgaagacgccagtggactccacgacgtactcagcgccagcatcgccccacttgattttggagggatctcgctcctggaagatggtgatgggatttccattgatgacaagcttcccgttctcagccttgacggtgccatggaatttgccatgggtggaatcatattggaacatgtaaaccatgtagttgaggtcaatgaaggggtcattgatggcaacaatatccactttaccagagttaaaagcagccctggtgaccaggtcgaaggccgtggcggcggcacttttgcccatgaattgctcgctgtggagtacgcaggctggatttctcccgcgtttcggctgaaggtaaaccagacatttatcgactatcgaaccggaagattacaacctgctattccgcagagtctccctgaagctctccgtttggctgccgacctggcagagcaaaagcaacggctggagcaaaaaatgcttatggatgcacctaaagtcgaattcgctgaacgcgttgctaccgccagcggggttctaatcggcaactatgccaaagtgctcggcctgggccaaaactatctcttcacctggttgcgtgataacggaattctgatcgcaaccggtgaacgcaggaacgtccccaaacaagaatacatatctcgtgggtatttcacccttaaagaaaccgtgatcgatacaagcaatggaagcaggatttctttcacgactcgtataaccggcaaaggtcagcagtggctgatgaagcgattgcttgatgctgacgtagtaagaaccaccagcattgtaatgctggctaaagtcactttcctgagctgtataacgatgagcgattttactttttctggctatgaattggcctgctttgtaacacactccggtctatcccgtagcgccgggcatatcctgtcgcaatgtgcaaatctcgcggcaacaaccagtgaatacttcattcacaagcctcaccgcctgatcgcggcagaaactggttatagccaatcaaccgtcgttcgtgcattccgtgaagctgtaaacaaaggaattctgtctgtagagattgttatcggcgatcaccgtgaacgtcgcgctaacctgtaccggttaacaccatcctttttggccttcgcacaacaagccaaaaatgcgctgatagaaagcaaattaaagatctcttcagcggcaaccaaggttaaagctgttctcgctaagacattggctttatttaattttttatccacacccccatgtcaaaatgataccccctccccctgtcaggatgacgtggcaataaagaataagaagtcacaagttaaaaaaacaaaaagatcagtttccggcggtgccggaacaaccagcctcaaaaaattgacttcatggatcgctaaggcaaaagcaaaggctgacaatctgcggttatccaaaaaacgcactcaaaaacatgagttcaagcagaaagtagaggcggctgcgcggaaatatgcttacctgaagaacaagcgttcgcctgatattggcgggatatcaaacttcgataacctaccgcattgcatgacggtaaacgaagctcttaatgcggttttagccaaaaataaagataacgaacaatggggtgcggttgctggcgcctatatcgccgacatcaccgatggggaagatcgggctcgccacttcgggctcatgagcgcttgtttcggcgtgggtatggtggcaggccccgtggccgggggactgttgggcgccatctccttgcatgcaccattccttgcggcggcggtgctcaacggcctcaacctactactgggctgcttcctaatgcaggagtcgcataagggagagcgtcgaggagaacttctacggtggctgcagaacagcggtggctgtagtacagtggatactggtgaacggaaaatgctgctgcctgatcgttctggaagttttgtctcagaggagtacccggccgagctagatctcaccaaaatcaaatatggtaatgctggcactgagtacaccatggagtccactggtgtcttcaccaccatggagaaggctggggctcactttcagggaaaactgtggatagctccttcaggaaactggcataatggacatggggttctccagaacatcatcactacatctgctgtcactgccaagcctaagggcaaagtcatccctcagctgaacaggaagctcaatggcatggccttccgtgtccccaccactaatgtgttggtcatgaatctgacctgccatcagaaaatacctgccaaatatgatgacatcaagaaggtggtgaagcagaattggaaggctccctcaagggcatcctgggctacaatgagcaccaggttgtctcctccaactttatcagcatcatgcacttttccaccttcgatgctgggactggcattgccctcaatgaccactttatcaagctcatttcctggtatgacaatgaatttgactacaacaacagggtggtga

SEQ ID NO: 141963 - DNA, 334 bp, Homo sapiens
ggcacgagacgggctgctgcgggcaggctgcggagagagacagctgctgggagagaccacccatcccgctcctcttgccctctctttccggagactatgagaccgttcgcaatgggggcctgatcttcgctggactggccttcatcgtggggctccatcctcctcagcagacgattccgctgcgggggcactaagaagcgcaggcgaatcaatgaagatgagccgtaacagcagactcggcggtgccacccactgcactggggccagctgggaagccaagcatggccctgcctctggcgcctccccttcttgcctgggctttagacctttgtcc

SEQ ID NO: 141964 - DNA, 561 bp, Homo sapiens
  misc_feature (1)...(561): n = a,t,c or g
gatctcccgtgtcgacccacgcgtccgcccacgcgtncggtggaggcagcccattcacctggttaaatgactgggttgtcgatggacggtggcggcagccccaagggggacgtggacccgttctactatgactatgagaccgttcgcaatgggggcctgatcttcgctggactggccttcatcgtggggctcctcatcctcctcagcagaagattccgctgtgggggcaataagaagcgcaggcaaatcaatgaagatgagccgtaacagcaggtatgctaggagggcctggggaaggtgcggggagggcagggcaggcttgggagcaacagggaagaattctggctcctggactcggtaaataagaattttagggtcgtccacacatcagccaggtggtctgtcacccatcgtgtgtttaaaatgatggccaagggcctggcgtggagtgtgtgccgcaggagatcacagaggagccctggagaaaagtgagatggacaagggggaagtaaaaccccaacctctgctgcctcccacccaaccccatcctgcctttgtctt

SEQ ID NO: 141965 - DNA, 853 bp, Homo sapiens
atgggcaagctgtcagatgcagcagagccaaccacagcccccgccctggccctctccctcgaggggctccacactgcagccagcccagggtgcccgaaaagggcctttggaaagacacaggcttatggtagagctcaagctcaacctgtcaacccagtgatcatggcgattaaaaactatctggtcacagcaagacctgggcggcagccccaagggggacgtggacccgttctactatggtaagcctgggcccctgcgcacccttcctgagccctcaggaccccttccaccaagcagcggcctctcccagccccaggtccatgctctgtgccccttatctcccctggttaccacgggctgctgcgggcaggctgcggggagagacagctgctgggagagaccacccatcccgctcctcttgccctctctttccggagactatgagaccgttcgcaatgggggcctgatcttcgctggactggccttcatcgtggggctcctcatcctcctcaggatctgccaagttcgctccaggaagactattgccagcctggctgtgcctcatcagctgttccccatgatgctgaaaagcaaagctaggaaaattctccatatgttggggcccacggagggggagacagccacaaacagctgtgagaccttcatcgttcctaaaacaggaattttagtgccggggaagcttgttcttttacacagtaaaaatgcaaatgcaggcaacacagatgctggcacgctggatggaacaacggagagcgcctcgccggggttcatccggctgcctaaacctggatttgttttggcaataataaggcagttattggagactcgataa

SEQ ID NO: 141966 - DNA, 674 bp, Homo sapiens
  misc_feature (1)...(674): n = a,t,c or g
ggcgagcatttaagagcagagacagcaggaataggggagtggaggcagccgattcacctggggaaatgactgggttgtcgatggacggtggcggcagccccaagggggacgtggacccgttctagtatggcttctacnggcgggcggcggatagagacgggcggctgggagagaccacccatcccgctcctcttgccctctctttccggagactatgagaccgttcgcaaatgggggcctggatcttcgctggactggccttcatcgtgggggctcctcattcttcttaggcagaagattccgctgtgggggcaataagaagcgcaggcaaatcaatgaagatgagccgtaacagcagcctcggcggtgccacccactgcactggggccagctgggaagccaaagcatggccctgcctctggcgcctcccctttttccctgggctttagacctttgtccccgtcactggccagcgcttgggctgaaggaagctccagactcaatgtgacccccaggtggcatcgccaacgcctgcctcgtgccacctcatgcttataataaagccggcgtcagagaccgctgcttccctcacctgcctgcctgtctccctcctctgtcaccaccagcctctccaagctcaagtacaaatacagccgggcccggaattcttttgc

SEQ ID NO: 141967 - DNA, 431 bp, Homo sapiens
tgtgatttatgaagcatatcagcagtgtagtgactatgacttggaatttggaactgagtgtttgcaattggccctaaaatactgttgcactaaagccaaacttgtagaaggatcacctgacctctggaaggtgacctacaaacgagatctctatgcggctgaatcgattattaaggagagaatttcccaagagatttgtgtagttatggatacagaagaagataacaaacatgtaggtcatcttcttgaagaagtgctgaaaagtgaattaaatcatgtaaaagtcacatctgaggctctgggtcatgctggcagacatcttcagcaaatcatcttagatcaatgctacaattttgtttgtgtgaatgttacaacctctgattttcaagaaacccagaagttactgagcatgcttgaagagagtagtcttt

SEQ ID NO: 141968 - DNA, 361 bp, Homo sapiens
ttttggctgtccctctaatgtgcagagcagagtggccagagaggaaagaggttggatgacctaaaagcaggcactttcctagagaattagagcctcctacacattcttgaagcaacctgcttccacatacatggtggcttctaagcttggtgaaggtcggaatggcatgagaccctgttagggcaacggagcagtttctgcttccagattttctagcaacaggccccagtctgtgatgttcccctccctgtgtccatgtgtcctcattgttcaactcccacttatgagtgagaacctgtagtgtttgattttctgtccttgtgatattttgctgagaatgatggtttccagcttcatccat

SEQ ID NO: 141969 - DNA, 594 bp, Homo sapiens
atggggattacaattcaagatgagattttgggtggggacacagccaaaccatatcagagggcaatctgctttactcagtctatcaatttagtgaagttcatcctaaaataccctcagagaaacaccaagaataatgtttggctaaatatctgggcatcccatgacccagtcgagttgacacgtaaaattaaccatcacagggacatcgataaagctggaaaccatcattctcagcaaactagcacaggaactgaaaaccaaacatcgcatgttctcactcataagtgggaactgaacaatgagaacacatggacacagggagaggaacatcacacactggggcctgtcgggaggcactggatagaggacctgcttgggaaaagctttgaacaggagcctgctaattactggctgaatggacttagcctttctgagatttgtttttccctcaactatgcagagggaagagggaagaatagaaatggccaacacttctccgtttttgagaggatggattgtgttaatgaaaaggaacttgctcataaattgtcaaactgtagtgtaggaccaaagctgaacgggacagtttcgtag

SEQ ID NO: 141970 - DNA, 663 bp, Homo sapiens
atggcagaagtgaaactgtctgacaaggaggaggagaaggaggaggaggacctttctggaggaggagcgactcaagccttcgcgaaagaaaataaccaaaaagcatacaaagaaacgtacggcgtctctcatattacacgccatgatatgctgcagatccctaaacagcagcaaaacgaaaaataccaagtgcctcaattcgatcaatcaacgattaaaaatattgagtctgcaaaaggacttgatgtgtgggacagctggccgctgcaaaacgctgacggaacagtagctgaatacaacggctatcacgttgtgtttgctcttgcgggaagcccgaaagacgctgatgacacatcaatctacatggacatggatgaagctggaaaccatcattctcagcaaactaacacaggaacagaaaaccaaacaacgcatgttctcactcataagtgggagttgaacaatgagaacacgtggacacagggaggggaacatcacacacaggggcctgttgggggactcctggacccggaagatgctctcgtacactcaccaacagaccagtgcgcttcccaacaaggccgcagaccactccacggcccagccgccctcctgggacagccaccatcttcctctcccttttccatcttgaatggcaattag

SEQ ID NO: 141971 - DNA, 1048 bp, Homo sapiens
atggatctacataaaggaaaaacttcagttgaggaggcagtgaagtgtagtgactatgacttggaatttggaactgagtgtttgcaattggccctaaaatactgttgcactaaagccaaacttgtagaaggatcacctgacctctggaaggtgacctacaaacgagatctctatgcggctgaatcgattattaagggtatgtttggccttatgactgtcagttcctgtgtttcaaaaataggacagtatactttctatataccaagagatccaatgttcaaggaaaagagaatttcccaagagatttgtgtagttatggatacagaagaagataacaaacatgtaggtcatcttcttgaagaagtgctgaaaagtgaattaaatggtggtgaatgtggaggatttactgacgagtggaagtggctttcagtgggatgcggtgctggaaaggggatggagtggaaaggtggtcttcccctggagtttggctatcccctgctgacctcttctctgtggtcctaccgtcaagccgtccttctggaagtcccaccttcaagctgtccctctgaagtcaaactgcttctctttgacagctgctgcttctcttctggcccctgctgttccactctgctgcccctctgccatcactctgctagtggagcttggggttttttatgggtacaagatgggaggcagggagagccaaaaagcagcatttgagtgggaaaacaggaatgcatgttctcactttgggccacagtacccaggcctaaggcatgtaaaagtcacatctgaggctctgggtcatgctggcagacatcttcagcaaatcatcttagatcaatgctacaattttgtttgtgtgaatgttacaacctctgattttcaagaaacccagaagttactgagcatgcttgaagagagtagtctttgcattttatatcctgttgttgttgtttcaccccccactccccaacaagccccagtgtgtgatgttcccctccttgtgtccatgtgttctcattgttcagctaccacttatgagtga

SEQ ID NO: 141972 - DNA, 844 bp, Homo sapiens
tttttttttttgaaggacaggcacatttattgatcagaaatattgaaatgggctgggcacagtggcaaatgcctgtaatcccagtaagttgggaggccaagatgggaggatcacttgagcccaggagtttgagaccaaccagggaaacacagggagagcccatctctataattttttttttaatttgccagatatgatgacacgtgcctgtagtcttaggctgcttggggaggctgaagtggggaggatctcttgaggcccaggggggttgagactacagtgaggccgtgatttcaccacttgcactctgggcctggggaacagaggggagataacctctttttcactcttctggggtgctccagcaggcacagcccccacaccaaccttcatctgggattgtctcaagaccttctggaatcttctcccaaacatacctccttacacaggtccattattgttggggtaaaatgtcgtatatgactgaagcgttccagggaagacccctttccccttcactggtgatcttcattatagattaactccctctttcctctctgacagagacttcatgaccatcacattgtctgggatagaatgttaaacacattcttaaattggaaaggaaatgaaaacaagctgtagagaaaaaaaaacaaggtggaggcaggggaacaacctataattaattataggttgtaactcataaaccagccttgcatagaaaatgttaaacaagaaagttaaaacaagaaaagttatacaagaaaatgttctacaaggttactaaatgtctttgctttctgcctatgtaagcaagactttaacttttaacttcagggcc

SEQ ID NO: 141973 - DNA, 387 bp, Homo sapiens
cggaaggaatcagatgggcgtcttgcagctccgatcctgatgaagaattgtagctgctgtgcctcaagacagataagcacaggtcgtcccagaggggatgccaccttggggactgtgaacctccgctgaggccaggccatgccctgccctgtgtctgtatctggaactgcgggatttctctgatctgccagggaaaggcctgccacctcgtggccacttcaggaactgctccaaaggcagtctgctcttgggaacctacctggtcaggtagctccttgaggtctggaactgcaccacagtgcaagttatcttcacggtgaggtgaagctgcctgtatggaagactcttggatcagtcgtctgagcacatgtccagcaatgggcatgg

SEQ ID NO: 141974 - DNA, 477 bp, Homo sapiens
cgacccacgtggaatacttgagtaaaaagactttggtcaagtaattggtgggtttggattggaattaattgccaggaaagtgaccaccaagtcagcatcatttctgtctctagaatggtagttttgtggaaagatgctcaactagggaaaggcaggagaactgactggtagtcatagctctcagagtaactaggctttctgagactcagtttccctctgcagaacgagatggccccgggtgtgggtcctgttgcacattcctggccacactttgtgttggctgtgcttcggaaaggggtctgtgaagagctgacctgcataaaggctggtggctgtcacacccccaggcagaacaactggagaggaaggtgggcttcacaacagtacactcagtttttatttaaattcttagctttttaaattcacaaggagtaaaatataaaatggtcattgctctccaccccatggccagactgg

SEQ ID NO: 141975 - DNA, 966 bp, Homo sapiens
atgttcctctctcaaggacagaacctagcacacgatgttgctagcgtaaggcaccgagtcttgcccaacgtctgcactccgcaaacgcctgtgaaggcgtccctgaaggttttaccaataaaatttaaaacaacagcagataagcacgtctacgcccatcatcccactcaccccgtgcgcttcccacggaggaggagtgttgttaccgcctacggttttcagataaggaaagtaaacctgagggtgtcagacctttcggagaccccactgtccctggccactgcccccagcctgttccagtgggcagccctgcaagcctcagttctaggtctctctcaactcagagacctcagtgacttagagttgtcattggccctcaaggtgactgacaccttcaggccatctccccggttgttgtgcacagccacgaaacaaaagaacagtggccagaacctggaagaggacatgggtcagagtgaacagaaggcagatcctcctgctacagagaagaccctcctggaagagaaggtcaagttggaggaacagctgaaggagactgtggtaagctggatcctcctcggtgcctgcagcctgggtggtcggtggtaccaggtgtggggccagcccagcccggccgtccacagctgtgcatcctctggccacagctctgcttcaccccctcatctagaaaacccttgcagggacccagtgaaagaggcccactgtggatgtcagcgtgctctgatgacacgaaggacaggaaacgttttccacttgcactttgctcccgaggacttcctcaagctgagtttggtgcacacggccagtgctcctggcagctgtccagtcatctgcgtggccaagtgctacacacagcaggaaaatgtcaccagagacacgaatcccagcgtgacaaaacaagacacgatcaccatcaggcctgagcccactctacagatggagtaa

SEQ ID NO: 141976 - DNA, 2295 bp, Homo sapiens
atggtggtgaccgacgccactgacggtggtaagcatccggaaaaagtgcgacaacaccacgagtgtactggcccgctgtaccaacgaagagaccagaattcagagaggctcccttcacctctgcccaccggcagaccacaaggtcagagctgtcacctcatgatacctttggctccagttgtggctttgcgatcaatccaagggcaacgtcaagggaaggtagggcaccacgtgctgtacagtcggctcttccggcacccccagtccctggctagcccacccatgcccattgctggacatgtgctcagacgactgatccaagagtcttccatacaggcagcttcacctccacgtgaagataacttgcactgtggtgcagttccagacctcaaggagctacctgaccaggttaggacattttacccaccagccgttactgctccctaccaaaagtatcgatactcccagttttcatctaatacccagctttatattccaatttcccccacctatctctcaaatgccccgtttaagctagtttattctatcatgatccaagtaaggggcacttggtctccctgggtggaggtggcagcgcgacctcccgctccgatgggggcctttcccggccccggggcctccttcccggcctcggccccggagctgggcatctccgggctcgcggttccccgccgcgggacgcggaccgccccgctggggcctgctctgctgccaggctgccagctcagggcttgggaagcgtggagcgggcgggcgccgtgtcaggaggagaggaccgcagcgcggggggcgtttggctcggaaggtacggtggcccacgtgcgcgtgtggtccagggcctgcggcgacgcctcgcgcgcattcacggtctcggcgctcacgggcgcagaggcagccgcaacttgtgcggttgaagaagcgaccaaagaagctcgagctttgtccaaggtcacgcagcgaggccgagccgggccgggtgtgccctgggcaggagctgtggttactcatttccgtgccgcagctcgaggccggggccacagcggtgctcgggaaacttcgtgtcgcaagaacgagatggccccgggtgtgggtcctgttgcacattcctggccacactttgtgttggctgtgcttcggaaaggggtctgtgaagagctgacctgcagaaaggctggtggctgtcacacccccaggcagaacaactggagaggaaggccatctccccggttgttgtgcacagccacgaaacaaaagaacagtggccagaacctggaagaggacatgggtcagagtgaacagaaggcagatcctcctgctacagagaagaccctcctggaagagaaggtcaagttggaggaacagctgaaggagactgtggaaaaatataaacgagctttggcagacactgagaacttacggcagaggagccagaaattggtggaggaggcaaaattatacggttgtgaagtctccaacagcaggcaccagaagggccccggccccaccgcccgagccccgagccccggggctccgccgccaccgcgctcgccgcgctcgcggccgctcctgctgctgctgctgctgctgggcgcctgcggggcggcggggcgctcccctgagcccgggcgcctgggtcctcacgcccaactgacccgggtgccgcggagccctcccgcggggcgcgcggagcccggtggcggcgaggaccggcaggcgcgcggcacggagccaggcgccccgggtccgagtcccggtcccgctcctggtcccggcgaggacggcgcccccgccgcgggctaccggcgctgggagcgggcggcgccgctggccggagtggcttcgcgggcgcaggtctcgctcatcagcacgtcgttcgtgctcaagggggacgcgacgcacaaccaggcgatggtgcactggacgggcgagaacagcagcgtaagtgacctccacgcgctcgccgcggcccctacccgggacaccgcgggacacccgggcgggaccgccacggcccccaccccagatccccactatggtcatcaggggcgggttcttggcgacttgggcacttgggtcacctcggccgcgcccctactggcctctggtcactggttacttggggagaggtcctcagattcatacgcttgtctcaccgcaggggacattcccgcagatttcgggatcctgggccacctccgatactcccccactggcctccaggtcttgggttacggaggaggaccccagaaccttcggaagcctgcaggtccttga

SEQ ID NO: 141977 - DNA, 778 bp, Homo sapiens
tttcgtgctgcctgcactcacgcttggtgcgtgcgcggcgactgcgacgggcagtggcagtcatggcggctcagtgcgtgaggttggcgcggcgcagtcttcctgctttggcgttgtctgtcaggcccatcttccccggtttgttgtgcacggccacgaaaccaaaggaccagtgccaagaacctgaaaggggacatgggtcagagtgaacagagggcagatcctcctgctacagagaagaccctcctgggaagagaaggtcaagttgggaggaacagctgaaggagactgtgggaaaaatataaacgagctttggcaggacactgaagaacttaccggcagagggagccagaatttgttgagggaggcaaaattattacggcatttcaagcctttctgcaaggacttgttggaggtggcagacgtttttggaaaaggcaacacagtgtgttcccaaaagaagaaattaaagacgataaccctcacctgaagaaccctctatggagggggctgggtcatgactgaagtccagatccagaaggtgttcacaaagcatggcttgctcaagttgaaccctgtcggagccaagttcgacccttatgaacatgaggccttgttccacacaccggttgaggggaaggagccaggcacagtggccctagttagcaaagtgggggtacaagctgcatggggcgcactctgagacccgccctggtgggggtggtgaaggaagcttagctgctgttgatggggtgggtgtttttaaactcacttgatg

SEQ ID NO: 141978 - DNA, 492 bp, Homo sapiens
gtccccacctgcctgctccagatgaagatccaagaagatcccagcctatgcggagacaaaccctccatctcagctgtcaccgtggagctgagcaaagaaacactggacaccatgttagatggcctgggccgcatccgagaccaactctctgccgtggccactggagagcagaagcccccatctttgaaaagctcctgagtgcaacttaattaccaccatggcaggaacacatggagggaatcggacaggtgatgccagcagttcctgctcctctgtcagggaagccaggcagagcccacagagcatggtccatccagagtgttccctgagccccctccaccatactggaacccctcttcagtgtaggaagtctgaaatgggtgctaattcccttcttcatgaaaccagggccctcttccttcatctaatgcagccactcctaggtgaagaagtgggaataattggaaataaacaacagttctaaaacttcaa

SEQ ID NO: 141979 - DNA, 1443 bp, Homo sapiens
ttttttttttttttttgaagttttagaactgttgtttatttccaattattcccacttcttcacctaggagtggctgcattagatgaaggaagagggccctggtttcatgaagaagggaattagcacccatttcagacttcctacactgaagaggggttccagtatggtggagggggctcaaggaaacactctggatggaccatgctctgtgggcctctgcctgggcttccctgacagaagaaccaggaacctgctgggcatcaacctggtccgatccctccatgtgttctgggattgggaaatgaactaattaggagctaatgtrrggaaataaacttacttattgggatagggctgcatgatttggggcctgaaatttctcaaacagctatgcaggagggcagctgactgatgcaaattttccctcacccctgccaatggtggtaattaaagttggcactcaggagcttttcaaaagatggggggcttctgctctccagcttcagaaagagaaagaagatgagtgagaacagcggggtatctggctggcttcttcgcaatccaactgtaccttgtggatgcgcagtagccccctgctgtccccaccatcctgcctgttgtcagctgcagctgcaagggcagcctgcatatggggagacatttatcactcatgagcagctgggtcatggcagtggccctggcagctggctggatcatttactggccacggcagagagttggtctcggatgcggcccaggccatctaacatggtgtccagtgtttctttgcctcagctccacggtgacagctgagatggagggtttgtctccgcataggctgggatcttccttggatcttcatctggagcaggcaggtggggacggccatgcggcctgaatgctgtctgaagaaggttttgaatatcccactctccagtcccagatcgaacccaggcgtggacagagagatctgcatttgcctggggctttcggtttctcccaagtagacacatgttccctaggatgatctttgtccagcaaggtttttgaaggttttggtggaaaattttctggaaaagagagcccagaattgcctcggccagaggacaggtcacggaatgcccaccagcctagtgaggcggtgcagagccctggagcagctgcaagataaacggaaccacctgtagttcctctgcctcctcctgggtcacagacaagctggaacatgtaacatccaagagttttttcaagccaagggctgaactggaaaagctttcttgacacagctgtctgacaacatctttcgaggaggctttttaaaagctcagaaagacgcaacgatttgcctgggatcacacagagaacaagcagcagagttgtggctccaaaccagggtcaatttgttcccaattcctgctccgtctaaagtctcggagacaaagg

SEQ ID NO: 141980 - DNA, 429 bp, Homo sapiens
atgattagaagattaaagactgaagttttaacccagctaccccctaaagtcagacagcgtattccatttgatcttccatcagcagctgccaaggaattgaataccagctttgaagagtgggaaaaaataatgagaactccaaattcaggtgccatggagacagtcatggggttgataactcgcatgtttaaacaaactgctattgccaagctaaatgaaatgataagaaacccaggggaaggacatttctggcaggtggatcacatcaagccagtgtatgggggaggaggacagtgttccctggacaacctgcagactctctgcacagtctgtcacaaagaggagatatctaaagcctctcttaatatgatgttagcagctgtgaatgttcagtacattattaagcctttggacattgcagaatggtga

SEQ ID NO: 141981 - DNA, 481 bp, Homo sapiens
ccattttcccaacagcatgtgctcagttcgtgtctgtcacattttgataattctcacaatgtttcaagctttttcattattacatcacagtgagctttgatgtgacgatcgtcattgttctggggcatcacaaatgcgctcatagaaggtggtgaacttaactgaaaaatgctgtgtgtgttctgactgctccatccgtcagctataccctcatctctctccctctcgtcagaccgccctattccctgagacataacactgttaaaattaggccaaataataaccctacagtggcctccaaatgttcaaatgcaaggaaaacatgcacatctctcactttaaatcaaaagctagaaattattatgcttagtgaggaaggtatgtcaaaagccaaaataagccaaaagctataggtgcctcttgcaccaaacagccaacttgtgaatgcaaaggaaaagttcttgaaaaaaaaaaaaaaaaa

SEQ ID NO: 141982 - DNA, 1404 bp, Homo sapiens
atgctgaatgcagccgtggatacccctgagtgtgatgctgaatgcagtcgtgtgctgcaggatattgcatgtctttgtagaatccagaaaccagagcctcagtggggctgggagcaagactcagctggggataatcatgagtggattaagcaaagggcaggtggcagtgggtggggccaggagagaagacttggctcagccactcctagtgcaccctcaggggaagcttttgtggctcctcctcctcctgtgtccctaaaatgtgagactgtggtcctcttctcccaccatacacactgttggagttttcggctgtgcccatgggctcctccaccaccaccaccatccccgcccccaccacccccttcacaactttccctggaacctgactctaattctctaagcacctgggttctggcaacaaccagatcatttcagactctatctatcacaaccactttcaatcgtcaagtacttaaacatatctactctgtgttctggactctggggacacagcagtggggaaaaccacattctaaaggggagacagacagacacatgaatgaaaatctaatgtcagctggtgatgagtgcaatggagatacggcactatccacaacagccaagatagggaatcaacccacgtgcccatcagcagatgaacagatgaagaaaatgtggtacatatatacaatggaatatgatttagccatgaaaaagactgagatcctgtcatttgcagcaacatggatggaactgaaggtcaatatggggcagagcaagaagacaagcttctacaggacagttggcgtttggatgaatattgaaagatgtgtggaatttcagaaaatagtaaagaaaaatgagcagaaccaggatgggtcatggagaaacgaggcagaggtgagtctgagtatggtggtccggggctacggggcggcactggggcgcggctgtatgaagaagagcatcaaaagttgtgtggaggagcatgtacccaacacagacaatgacaaggaacttgcatgtgtttctatgagtgttatgtctcagggaatagggcggtctgacgagagggagagagatgagggtatagctgacggatggagcagtcagaacacacacagcatttttcagttaagttcaccaccttctatgagcgcatttgtgatgccccagaacaatgacgatcgtcacatcaaagctcactgtgatgtaataatgaaaaagcttgaaacattgtgggttcgtgccatgcttccattccaaacaccaggcccaaggatggactgtgtccacatcctgctcagggactgtgaaggagggcagttgggagttggtcaccccaggcaagatgctgacttagcagagaatcaaacacctggagagccatctggacactag

SEQ ID NO: 141983 - DNA, 477 bp, Homo sapiens
tcagctctctgatcctccagacaacctttcctgagccggatgtggcctggcgatccttagttggaatccacgctggctactgctgagagatttctgattccatcttatccctccagcactggcaattgacttgtctgcttctgtaccacatgagggcaggagtgctattctgtgaccaggtttctcccttggatatggatctcctggttgtctgtatgcgtgatcttccctcattccctgctggcgttggggtactccgaggctctgctgtgagaagcccttcacgacacatttttgcttgaggtttgtctctccatccaagctggcagtttccagatggcatatcccattggggtcagaggaaaaaaggaggagtatgtctgctgggacaatctcattgcatttcatttggatgaagtctcccacgcgcacatccttccagcacttctgcacataggtctgctcttttctgggcat

SEQ ID NO: 141984 - DNA, 570 bp, Homo sapiens
atgccccacaagtgttaccatggcaaaactggaagagtctacaatgttacccagcatgctgttggcattgttgtaaacaaacaagttaagggcaagattcctgccaagagaattaatgtgcgtattgagcacattaagcactctaagagccgacacagcttcctgaaacgtgtgaaggaaaatgatcagaaaaagaaagaagccaaagagaaagaagttcccatggagcccaccgtgtacatgtctgaaaaggggaggacactttttcctggggagcctgccaatcacataaagaacaaaaggcttctgtgctggaccctgcctgcttatctgtgcagtttgatctcagactgctgtgctagcaatcagcgagactccgtgggcgtaggaccctccgagccatgtgcgggatataatctcctgatcaatcccccgattaaaaataaagagtccgcaaaagaaccgcaagtgtggcacagccgcacgctgcaaaacgcagacggaacagtagctgaatacaacggcaatcacgatgtgttcgctcgagcaaggaagcccgaaaaacgctaa

SEQ ID NO: 141985 - DNA, 741 bp, Homo sapiens
tcatgcgtcatgtagttctcgtaccatgcttttcagctccatgaggtcatttaagttcttctctatgctgtttattctagttagccatttgtctaatcttttttcaaggtttttagcttctttgtgatgggttcgaacatcctcctttagctctttggtctttgatgatggtgacgtacacatggggttttggtgtgggtgtcctttctgtttgttagttttccttctaacagtcaggaccatcagctgcaggtctgttggagtttgctggaggtccactccagaccctgtttgcctgggtatcaccagcagaggctgcagcacagcaaatattgcagaacgacaaatgttgctgcctgatccttcctctggaagcttcatctcagaggggcacccagctttcagttcaatctcagactgctgtgctagcagtgaccgaggctccgtgggcgtgggaccctctgagctagatgcgggatataatctcctggtgtgccatttgctaagacttctgaagcctacttctatcaattcgtcaaaatcattctccatccagttttgtttccttgctgttgaggagttgtgatcctttggaggagaagaggtgctctggtttttggaattttcagcctttttgtgctggtttttcctcatcttcgtggctttatctacctttggtctttgatgttggtgaccttcggataaggtttctgtgtggatgccctttttgttgatgttcat

SEQ ID NO: 141986 - DNA, 1055 bp, Homo sapiens
gtaagatgcctgcttcccctttgccttctgccatgaatggaagcttactgaggcctccccagaagcagaagctgctacacttcctgtacagcctgcagaaaggtatatctcctaatgctatccctccccactccccccaccccacaacagctccagtctacagctcccagtgtgagcgacgcagaagacaggtgatttctgcatttccaactgaggtaccaggttcatctcaccggggagtgtcggaaagtaggtgcaggggcagactgacacctcacacggccgggtactcttctgagacaaaacttccagaggaacgatcaggcagcaacacttgctgttcaccaatatccgctgttatgcagcaaccgctgctgatacccaggcaaacagggtctggagtggacctccagcaaactccaacagacctgcagctgagggtcctgactgttagaaggaaaactaacaaacagaaaggacatctacaccaaaaccccatctgtacgtcaccatcatcaaagaccaaagagaagtccttaaaggacctgatggagctgaaaaccaaggcacaagaactacgtgacgaatccacaagcctcagtagccgattcgatcaactggaagaaagggtatcagtgatggaagatcaaatgaatgaaatgaagctagaagagaagtttagagaaaaaagaataaaaagaaataaacaaagtctccaagaaatatgggactatgtgaaaagaccatatctacgtctgattggtgtacctgaaagtgacggggagaatggaaccaagttggaaaacactctgcaggatattatccaggagaacttccccaacctagcaaggcaggccaacattcaaattcaggaaatacacagaattccaccaagatactcctcgagaagagcaactccaagaaacgtaattgtcagattcaccaaagttgaaatgaaggaaaaaatgttaagggcagccagagagaaaggttgggttaccaacaaagggaagcccatcagactaacagctgagctcttggcagaaactctataa

SEQ ID NO: 141987 - DNA, 1272 bp, Homo sapiens
atgcagaaatcacccatcttctgtgttgctcacgctgggagctgtagactggagctgttcctatttggccatcttggtggccatcatcctgataccaaaccgggcagagacacaaccagaaaagataactttagaccaatatccttgatgaacattgatgcaaaaatcctcaataaaatactggcaaaccgaatccagcagcacatcaaaaagcttatccaccgtgatcaagtgggtttcatctctggggtgcaaggctggttcaatatacgcaaatcaataaatgtaatccagcatataaacagaaccaaagacaaaaaccacatgattatctcaatagatgcagaaaaggcctttgacaaaattcaacaaggcttcatgctaaaaattctcaataaattaggtattgatgggatgtatctcaaaataataagagctatctatgacaaacccacagccaaaatcatactgaatgggcaaaaactggaagtattccctttgaaaactggcacaagacagagatgccctctctcaccactcctattcaacatagagttggaagttctggccagggcaatcaggcaggagaaggaaataaagggtattcaattaggaaaagaggaagtcaaattgtccctgtttgcacatgacatgattgtatatttagaaaaccccattgtctcaccccaaaatctccttaagctgataagcaacttcagcaaagtctcaggatacaaaatcaatgtacaaaattcacaagcattcttatactccaataacagacaaacagagagccaaatcatgagtgaactaccacacacaattgcttcaaagggaataaaatacctaggaatccaacttacaagggatgtgaaggacctcttcaaggagaactacaaaccactgctcaatgaaataaaagaggatacaaacaaatggaagaacattccatgctcatgggtaggaagaatcaatatcgtgaaaatggccatactgcccaagctctgcatggcaaggagaatgtcccctgcagagctcctatcaggtgacttgttgctgaagtcagcaatggggcaggtatcggactttggagaagaagtgggagaaatggaagggcttatcaaatggcacaacaggagattatatcccgcacctggcttggagggtcctatgcccacggagcctcactcattgctagcacagcagtctgagatcaaactgcaaggtggcagcgaggctgggggaggggcacctgctattgctcaggtttga

SEQ ID NO: 141988 - DNA, 1062 bp, Homo sapiens
atggagcatcaaggagttgtggatccacctgaaggcactggaaaaggaaaatggggcacagaaagaagattcccctcactttcctccaccctctgcagagccttttctgtgcaaccaaaagtgatcactccttcctctgtggcaccatcacctccattcctgctctaccaagtaattatttgctcctcagttgccctgctgttcctgctcagccccctaaatttcaacatgggaactcctttaaggttggttgaatgctcatataaaagagtcaagggatggagaaaagaagaaaaagaggagatggaagcaaattcagggaatcatgggcagccgtgtgaaaataacatttgccagtttggaaagcttgtctttgcttctgtgttgtatattttgggctttcaccgcaagccacttgttattctcgtcaccttttatgggctgtgccacttctcctgtgccccagttgcttcctctcaactatgccttctgatcaattatgtcaattgttcacatagatgtatccttgctgacagtgtgaatttaacttctgaaatggatcaaaagtcatttggcatcaagtgtgaggaagaaagaaaattgatctcagactgctgtgctagcaatgagcgaggctccgtgggcatgggaccctccgagccaggtgcgggatataatctcctggtgtgccatttgctcagttggaaatgcagacatcacccgtcttctgcgttgctcacgctgggagctgtaggctggagctgttcctatttggtcatcttggaaccgcccctggcaagcctcggagtaccccaacgccagcagggaatgagggaagatcacgcatacagacaaccaggagatccatatccaagggagaaacctggtcacagaatagcactcctgccctcaggtggtacagaagcagacaagtcaattgccagtgctggagggataagatggaatcagaaatctctcagcagtagccagcgtggattccaactaaggatcgccaggccacatccggctcaggaaaggttgtctggaggatcagagagctga

SEQ ID NO: 141989 - DNA, 915 bp, Homo sapiens
ctgtcaaaacagggacatttaaatctgcagaggtttcctgctgccttttggttggctaatgtctgcccctaagaggtggagtctaacagaggcaggcaagacctccttgagctgcggtgggcttcacccagtttgagcttccctggcagctttgtttacctactcaagccttagcaaatggcgggcacccctcccccagcctcgctgccaccttgcagtttgatctcagactgctgtgctagcaatgagcgaggctccgtgggcatgggaccctccgaacccaggtgcgggaataataatctcgttgtgtgcccgttttttaagcctgtcagaaaagcgcagtagtattagggtgggagtgacccgattttcccaggtgccatctgtcacagctttgcttggctacgaaagggaattccctgaccccttgcacttcccaggtgaggcgatgcctcaccctgcttcagctcacgctcggtgcgatgcagccactgtcctgtggactgcccacactgtccgacaagccccagtgagatgaacccggtacctcagttggaaatgcagaaatcacccatcttctgcgtcgttcacgctggaagctgtagactggagctgttcctattctgccatctttcacagaacagaaaaactgagaattctaaaaatcagagcacctctcttcctccaaaggaacacaactcctcaccagcaatggaacaaagctggacggagaatgactttgagatgagagaagaaggcttcagacgatcaaacttctccaagctaaagcaggaagttcaaacccattgcaaagaagtaaaaaaccttgaaaaaagattagatgaatggctaactagaataactaatgcagagaagtccttaaaggacctgatggagctgaaaaccttggcatga

SEQ ID NO: 141990 - DNA, 426 bp, Homo sapiens
gtatgttaaagaatagatgcccgttttgtgcctcatgggagctgggagcccgacgtttccaggagcaccgcgtggagttagtgtcggccgcttttggcatggcagctttttctggcctggctgagatctcactgcttaacccgcaggaagatgtccagtttcaaaaggaggtggcgcaggtttgcaagcacataacccagcaaaaaaaacaagaacaaccctacttaacgaaacccagatcttttcatatttctcccagtttggcactgtgacacagttcagactgtccagaagtaaaatgactggaaatggcaaaggctatgcatttgtggagtttgagtctgaggatgttgccaagatagttgctgaaacaatgaacaactacctgtttggtgaaagactcttggagtgtcacggacgcgtggg

SEQ ID NO: 141991 - DNA, 921 bp, Homo sapiens
atggagttggatgaatgggagagaactggcagagattttaaaaaggcgtataaagagggagcaaaaattccagtttccgtttggtcaatgtgggcactaataaaggcagcccttgagccctttcaaacagatgatgagggagattcagatgaggaagaggaggacgagtgtaaaaaactaacttcagattctgaatgcaaggagcaaaaaagagaagagttgctaagtataggggaaaacacagcaaaacacaggggacctggggcctgtgattttaaggaggcaagcaggaaagtcctcccagagaaggtgatgtttgaaaaggaggtgaaagagaatagatgcccgttttctgcctcatgggagctgggagcccgacgtttccaggagcaccgcgtggagttagtgtcggccgcttttggcatggcagctttttctggcctggctgagatctcactgcttaacccgcaggaagatgtccagtttcaaaaggaggtggcgcagtttggcactgtgacacagttcagactgtccagaagtaaaatgactggaaatggcaaaggctatgcatttgtggagtttgagtctgaggatgttgccaagatagttgctgaaacaatgaacaactacctgtttggtgaaagactcttggagtgtcattttatgccacctggaaaaaaaacagaaagtatttcaaaaactaattgtcagacgtctacaaaaggccatcttttacataagaagaagaaaaaggttttaggcactcttgacactcctgagaagactgtggatatccagggcctcacaccagtttgtacaccaacatttttggagagacgaaaatctgaaatggctgaaatgaatgacgatgatgaagctaatgaaatagttttcaaacagcccatatcctatgtaaaataa

SEQ ID NO: 141992 - DNA, 526 bp, Homo sapiens
tttttttgtgtgagcaataaagctttttaatcacctgggtgcaggcaggctgaatccgaaaagagtcagataagggagataggggtggggctgttttataggattttggtaggtagtggaaaattacagtcaaagggggttgttctctggctggctggggtgggggtcacaaggtgctcagtgggggagcttttgagtcaggatgagccaggagaaggaatttcacaaggtaatgtcaccagttaaggcaggaactggccattttcacttcttttgtgattctttacttgcttcaggccatctggatgtatatatgcaggcttgggctcagagatctgacattcctgtcttcttatattgataagaaaaataaaataaaatagtgttgaagtgttgggggcaaccaataactttttggggggtggtatggagatataatgggccgatgtttctcagggctgcttcaagcgggattaggggaggcgtgggaacctagagtgggagagattaagctgaaggaagattt

SEQ ID NO: 141993 - DNA, 539 bp, Homo sapiens
  misc_feature (1)...(539): n = a,t,c or g
tttgtgtgagcaataaagctgtttatttcacctgggtgcaggtgggctgagtccgaaaagagtcagcgaagggagataggggtggggctgttttatagtatttgggaaggtaatggaaaattacagtcaaagggcgggcaggagtggggggtcgcaaggtgctcagtgggggtgcttctgagccaggagaagaaaatttgcagggttaatcactcagttaaggtggggcaggaacaaatcacaatggtggaatgtcatcagttaaggcggggcagggcttttcacttttgtgattcttcagttacttcaggccatctgggtgtatatgtgcaaggccaggggatgcgatggcttggcttgggctcagaggctgacagtggcacacgccctgtaatcccacctacctggaagcccnaggcaggagaattacctgaaacccnggaagttcaaggttgcanttaagccccagattcgccccattggaanttccagcctgggaaanagagacttccattntccaaaaaaacccaaaaaaaaag

SEQ ID NO: 141994 - DNA, 577 bp, Homo sapiens
atttatgttttaatgttgctcttaattcctgtctgatgttgcccttataaacatctcttattctttcttcatactacccccaaaaatttctgctgcctcaagacttcaacactattttgttttatttttcttattaatataataattcagtaatgtcatgcctctgagcccaagccaagccatctgcatcccctgtgacttgcatgtatacatccatgatggcctgaatgtaactgaagatccacaaaagaagtgaaaaagccctgccccgccttaactgatgacattgcaccattgtgatttgttcctgccccaccttaactgagggattaaccctgtgaatttccttctcctggctcagaagctcccccactgagcacctttgtgtcccccacccctgcccaccagagaacaaccccctttgactgtaattttcctttaccttcccaaatcctataaaagggccccacccgtatctcccttcgctgactctcttttcggactcagctcacctgcacccaggtgaaataagcagctttattgctcacacaaaaaaaaaaaaaaaaaaagtcgacgc

SEQ ID NO: 141995 - DNA, 1215 bp, Homo sapiens
cgtcgaacaattgtaaatacgcctcaactatagggcaaaaatttttttacacactatatatatctttttgtatttatttttttgtgagcaacaaggctatttatttcacctgggtgcaggcgggctgaatccgaaaagagagtcagcgaagggagataggggtggggccattttataggatttggttaggtagtggaaaattacagtcaaagggggggtttttctctggtgggcaggggtggggtgtcacaaggtgctcagtgggggtgctttctgagccaggatgagccaggaaaaggactttcacaaggtaatgtcatcagttaacggcaggaacaaggccattttcacttcttttgtggtggaatgtcatcatttaaggcaggaaccagccatctggatgtgtacatgcaggtcacagaagggcgggaagactacaatcccagcatgcacctggctaagagacagttcctgtcactggaggaagaggcggaagactacaatcccagccagcaccgggctcagggaaattggctgcaggactacaatgccagcatgcagcgggttcatggacagtgtgtatcactggaggaagacgtggagctgtgcgtgcctcgctgggcttgcagggagatgcagtctcataactaccccagtcgtttggtcgcagggctgcagcagtacaatttcagcatatctctggctcagggagagtgcactagtcactggaggaagaggggtattatgacatactcttctattcattgcctaggcgatgtgactctccactcttacctgggcccttccaaaacagaggattgtgacatatcagtgaccctaccaccaaggctggagaggagaatcacattacctaagcactggatcaagaaatacttcacaatctttctcatgggcaaagcccagattaacaaaatagatagaccactagtaagacaaataaaggagaaaagagagaagaatcaaagagacgcaataaaaaacgacaaaggggatatcaccacgaaacccacagaaatacaaactaccatcagagaatactataaacacctctacggaaataaagtggaaaacctagaagaaattgataaattcctggaaacatccacacctccaagactaaacgaggaagaagttgaatctctgagtagaccaatagcaggttctgaaattgaggcaataattaatagcttatga

SEQ ID NO: 141996 - DNA, 448 bp, Homo sapiens
  misc_feature (1)...(448): n = a,t,c or g
ccaaggaagtataagaggagttcaaacaaatggccttgcggttcccccttggcttggaatggggtcttgggaagtcccagcaaggcttgccggggcaaccaagttcaacattccgtgctttcttgcggatgacagccatggcaagcagccgatccttctcacgcagttctntgcgcagcttggcctcagtgagacgcaggtggcgaatgctgcctttcatctctttcatcttcacttccatcagagccaggatgtggcctgaagggtgagaagcacggccgcggaagcagataccaggttcggctgcagctgggcagtctgggcagtggaggcagagggtgaggactgctgctgctgctgctgctgctgctgctgttgctgctgctgctgctgttgctgctgttgctgctgctgctgctgttgctgcntgctcncngngggcggncgc

SEQ ID NO: 141997 - DNA, 1539 bp, Homo sapiens
ccgacctgggctggcgaaggcgcagaaaccctctgcggagcacagaagtgccagcacagaagtgccagcacaggagcgggagcgtgtggccagaactgtgcggtccaggggaggccggagaagccaggcgtctgtggctctcaagctctgtaggggtcgggtagggagaggtccccaggcaacccccaggtcaagacagtctgggtcccagccacacaggcatgtccctgtcagtcagaggttgagaacaggcacatcaaagaggtcacagacaccttcactctcgtccaggttgtagatataatcgtggtctcccgggggtggagaaagacgaagcagaggggcaaacacttctgaggacatcaactcctccagcagctccgagctcatgcactctcgtgtgggatcaaagatttctgacagctctttggggagttccaaaacacctgtggggtctgccttgatgggctcaaaggaggtagaagggttgggtccggacgaactgctgctgttactgttgctgctgctgctgctgctgctgctgctgctgctgctgctgctgctgctgtccagcagggcagaagactgcagtggccgggtgtccagtgttgttgggcccagtgggagtgaactgagctcaccactgtccttgctatcagtcccagggccgccactcactgtgatctcagctgctgggccagccattccctggacttctgcactgccagggacagcagtgggagtgagctgaggactatttggacgtgaggcttcctgggactgggctagggcaggcttgggcagaggtggaggtgtagaaacagcagatgggctctggagcaaatcttcaggtggtggcacaggcacagccacagggggtgagctccatgcctccttgttcaccagcagaacctcaatgggaccactcacactcttcaggtgaatctggtacttcttctgcccattgagaccctctgggatgggcacctccaggctggtgcctgatggggcccggatggccaagagggtatctccagcaaagcatctgcagatgtcctcatgagtgacgtaggccaaacagctgttctgcacgtcctctgtgacgttccggatgctctgctgcacccacaccttgtgctggtctagttcttgctcccgctgctgcagctcctcgatctctgccttgagctcaatcagtttgtcagcaatctcccgggtattgcagccaggccccacacccttccactggatgctgttcttggactttttctcgattagcccgataccttccaaaacattggtaatgtcgtaaatccgccgcttctggcgtacagctagggtgtcagctgccagcttgaggtcaagcacgccgtccttggcctcctgcagaagggacacgaacttggtggtgagcagtcccaggctcttttcgtgccggcttggagtgcccgggggcggcggcgcctgtggcccggcctccgccatgcgcccgcccgccgcctcccctcagccaggccaggccaggcgcgccgccgccac

SEQ ID NO: 141998 - DNA, 10348 bp, Homo sapiens
acgttaaaattaatctctttactgatataattaaattttaaatcctgagaagaaaagagagaagggagaatggtgccgggtgtctagcacccccagccactggcccagcacaggccatggcatctgtgcatccagacacggggcgtggcatgcacaccccaccagggagacccaggccagtgttcccaaagcctgctcacggcaccttctactgcaggacagcagaggggccaacagccagcctgcaggagggaggacttctggcccagatgcaagagcagctgcaacctggcaacaaccagcaggtgactatcaggagaaaggacctggtcacccacatggggtgcagcacagctgctcctgctttctggaaggcctcaggctcagccccaccaggactgcagacactccctgcctggccactgccacaaagagcacttctgccacatggcagagacacgcacgttgcctggccgcccgcggcatgtgcggaagcccatagggaccaagctggctcggtggaggcagggcacaagggcacagacttccaaaggctccggccccagctgccgcctcacagtctctcccaccatggcgctcagcaggtggtgaccttgtggacatttcgtaaacaagtcagcagccggtgatatgggcttcctggggctgcaaccacctcaagcacagactggaaggccctgcggtcgagctcctcctctatctggtgtctgtagaagtctgtggcgaccaggcagaaaaggttcacgtccacctgctccagcttgcccatcctgctgatgacatgtgggaggatcgccgcgacccacgggctggtggacgcgctgacaaagaagcaggagaggctccacgtggccatggcgaccggggccctctgcgtgaagttggagagggacagcatgacccagtcccggaccatggacgactgcccggtgctgtgcagagtctgaaacaccttatacaccacggtggccatgaactgggggtatggctgctggttggacagaaactctccgatgactttgttcatgatgtcctggggtgggaagaagtcgtctagaaactggggcaggatcctggccaccactctggcttcacaaggaaagcctttcctgatcctatcaaaaagaacagatacccgctccatagcaacaatcactgactcgctgtcgggggctgcaggattagggtctgaagttctacccggactgactttctcctttcctgtgtacatgcaggtgagcatcaggcccagagccgccatggcccggtgcgggctgtgcacgttcactctgtccacactcagcttgaccagcgattctgcatccaggcgggagagctgctcagagagcaggaggcgctccaggcctctgagggcacagtggtaaatgatggagggggtggactcctcacttccagacagcatcaccccacacatctgtattattgatgctgaaaattccggccctacgtccagaggatagttctcaatgaggtaaaacgcagtggcacacatgaccagtacgtgctgctggctgtgaatgttcacgcagtgggcgatccctttcaggttggagaggagatagtcgctgatgaccgggatgagctgcttggcagtgtcgtccagcaggtcgcactccagcacatagaggacgccgtgcagggctccaaccctgctgggcaggtggctgctcctgagcgtgctctccagcaggcggctgacaggctccgccacggccttgtccatcccaaggacggcagctgccttgcaggtggcaggcaccaggtactgagcgaggatctcgtcttctgaagggtgcacccttcgcagttctgtcagcgtcacatacatcagctcaaactggttgcgctcggtgaacaagtctgagaccactagaagggatctgaccacctcactgatcaggatggccggggtcctcctggctgagctggacggcaggatccagcggctgtacaactcaagcaaaaactgcgaacaggagtggatgtcaactccagcccggtgtttcctggagttgactggagacgtgggtggtgacgaaggtgcaggggcgtcggcctcctcctcctcttcctcgtcccattcctcctccctcaggggtgtgatgctgttccccagccacacggagtgtatggacacctggccgagtttgtagctcatgctccccagctcccgctcggggttgatctgtagcagcagcttctcgtggctgatgagggcacctgtagtagccggagacagagaagggacaggatcccatgcctgatataaatgatgggtggcaatattctctctctttgaaaccattgcttgaatctcttgctccacaatccctctgataatgctcagcttcctcccaaacctggtgtcgagagctttcagaggcttgttccggggctgctgctccaagcagcttacagctgggttgccggccacaggcacagtcattgcactgagcaccagtgaggtgatggcctgcacggccaggacgttgatctgggtcctctctgtgtcttcttctggtgggctctcctcctgctccatcacgaggggctgcgtcaccaggacaccaaggagggtggcccaagtttcttcaaactgagtacgactggtccagcctagtgtgttgatgcggtagatgaactccttaaagacttccttttcctggaggaactccacggggatctcagggaatgctgtgccaaaatcccctcccggtttgggtgaccatccaagcttccacaccagtgggggcacacgtgtgtagctgttgacaaggggcaggcgggccaggctgatgatgatgttcctgagcaatggcgtgagaaacgccggcacgccgctattccttttatgacccaaggccaacaccgactgcagagactccaccatttctgccaccatctcacaggctgcagtgatatacttaggattctgtgtgtttggatctacttcctcctcctcctcgctgatggcttttggggtatttgtccttctttctggactaagaagctgctctccaggctgcactgcaacggcctccaggatgaagtgcacacagtagatgagggagcaggcgtgggtcacaaactctgtggaggagaccacgctccagaggccaggcagctgcagggccaggcagcagcagtccagccctgcctggagatccagactcagcgggatctgctcatggatcaaatgccaggacagggcctcaagggttgccaccacgaatttcacaatgtccttctctttctcaggaggaaggtgcaaatgactgggcagtttggagaccaccaccaggtactgtgccagggcccgggccagagtgggcagggactgatacagtgcagcatccccaaacagatcattcaacttgctccagtaggccgccggctctgcaggcagctcgggctggaagacatgatggacagcagggagctgctgcacggtgccgctcacacgggccagagtcacctcacgggctgcttcaaaaagggcactcttctggccaccagaaatttcactcatccctaggcttaagcatggagctagcaggcttaggttgaactccgagttcatcatgaaggcattcatatcttcagcaggaatccgattcaccagctctgcaccttccagcagtgcagaatctgacctggtccaacactgggatttgacaagatgaacgtaccagtctttgtccggactcactgtttccagtgacacgtgcccatccccgtccagcgggtgggaagagactggaggagagggactaagtgagtcttgcatggtggagagacgaaacctgtccagcagggaatagagcctttggtgtctctgagcgagcccgctgctctgaaggtattcctggattctgttgagttcttccattggcaactgggccatgctgctctgtaaatttgcagccagaagcatttctacccggcgacaagcaaggatgtcgaccatgcgagccagcacacggaaaggggtgcacagaagcctgtccacatacagcgtgagcacagctcccgactggctgagatggatcccctccaagcactgaagagttttcttcagcatggttggagttgaaaggttttcacaacgagactgaattgcctggatgaacaggccgctggcagcagagttccgatgaacggcactgatgaagtcctgtactggaggctcgtgggaaaggctgatcagatcttgaatgtgatttacaatgagccacgttaagtgctcggagtcatggaggttctgacagacataatcacagaagagaatgagagcccctcttcgtactatttctctattgcacattccaagtttggctgccaagtcagaatcctcctcttctccagacatctggggactaagtaactttgtgctggacagactgtgtcttttcggggtctgctgcacttctgcccaccagcggtagtcggtgtggttgacaagcagcagtatctgacaccagagcagcaccagggccgggtgggtggtgatcatggaacgagcccgcaagttcaagctgtccagggtgtagaaactgccgccacagccatcactgcggaacagcctagtggcagctgctgtgattctccggaacattccagacttgaagatgtggatcagacacattagcagtgtgcctagttcctggcaatagaaagtatgttgctgctcactcatttccaccttcagctgttttgtaacaatgtcttctaaaagaataccaaccagttgtaatagaaaccttgaaaatgtttcttctggcaaattctttatttgtttcccttcactgtgttcttctagcgttgaagtactgtccccatctcttaacctattaattactgtacaggagattaaatacggagagaaggagagctcctgaatacgagaaagaacaatatcttcagttgactgggaaatcagaaccctcaaaatggccagaattcccgatatccacagttgaacagtgctcacggacgccattgtgtttggagtgacgaacatactccgtaaaagcatgtctaccggacggagggaggaaggggccaaaatctcaaataatgtatttaacactccaagggcttcatgagagtcaatgtgcatctgctgtttggctaacattgggaggatgatgtcagctatctgtcgagacagtcgcttccacttgtcttcattctccttgtggcactgctgcaggacaagaatgaacatctccaacacctgatggtactggatgagtctcagtaacattgacaccaccacctctttttgggtttcaagctcttttcctgcatcagctttatttgttcctcttaatacaaagaggtcgtggactatgggctgcagagccggtatggcatgtgtcacagccttccttccactggccatgatgccatcacagagctgaatgattttaggaattccaatgatctgttttgaatgatagcgttcataagatagtaataccaagaagaaaaagatgtttggaatgattgcctctgattccctgaactggcccacttcaatgtattcaaactgtttcaatacaaagccaataaacacctgatctgaatccagaagacagtaattaacccgtaactgaaccagctgcgccagcaaatctaaaacctgcttctgtaactgcacacatgttgtagtcgtgtactgttttaaagcttttataacaagaggttcaaacaaacgaatgtgattatgaatagcattcttatctgcacggttctttgtgacactcgtgaggtttgtcttcaactgggtagacactttctggaggacatcaaaccatcccgaggtgtcgttctcctgctccgcctgcaccatgttcctcaggctggcgtcagcgagggcctgggtgaagtgggtgtacggggccatgaagcagtagtggtacaagcctggcctcacactggaggagccaaggcgctgtgctcggccttgtgacttgctggggttggaagataagccatcaaactgggaggccaagtttgtgccaaagagagtcttcaacaattgttgaacacaaacagttgccatcattggttctcgactaaagcaggatttcaggtatcctaggatctcttcaacacacttcccaatgtcctgcagtgtggccagctctagtatctgagaaagaacatccaaggctgagcggagaaaccctccaaacttttccgtgctgttctgaagatccagcgtgaccttgtagttagcgtgtgtagctttcaggacatcatgcagtttgaggtatgaaggaagatgatagaaactccccagtgatgaggatttacttgttgtaacaggacctgaggtatcagattgtctagaagctgcactggcctcactgcctttcttgggactcaacggtacagatgcttgttctcctggttctttctccttcccctttcgtcggatgggacttagagaaggggggtttgttagagaaggcaaggctgcctttattgcgggtccaggagccacgtcatccaggacgtgggcacaaatgttaatcaccttcagcaggtgagagaagagctgctccaccatgggcaccagggcccggtcccccagggctggccagacctcctcttgcttggtggctgctgggttggcttcttcttcagaggcccatgaacttctcagagatttgggagcactggctgcaagcaagtttccggccaaaatcaaagcatcttgatgggctgagagatccaatgggaaccaagctgacgagagcagggtcagaatcattgtggccatcccaacggtacagctcttcctagactcatctgaggcactcagtggaggcactccacagtgccaacctaaactccaaatgcaaactgggaaggcagtggaaagaagacacaaagcttcacagcatccaaatgtgagtgctctggtggttgatgtgattagttcatgagaaactgctgcaataactcttgaaaggttattttccatagtgacgtctgttatgcttggtagtaggttatagcctctatatattctggttattgtgctgacggagaaatgagatggaggctgcgtctcatgcatgagaagtttcaggtaaacactgctttgatctcttgccacggccactactggatcagcttgtccttggtcacatttataaaacagctttgggacaagcctaattagtgatgctgcggcaacatgtcgcaccctggggtcttcatctccaagcaaatggatgacaacattattgagcactcgttcttgcagttttaaaagccctgtataatgatgagcccctctgtgtaagttttctgcttttgcctccaaaaagctcaccagcctgaagtcaatctctgcaagggtttccagaagctctgtcctcaccagccaataggaactgttcctcagagtcagcacatcgatgatcagctgcagtcctaactcactgtagctgctgctgcagagactcatgacacagttcctcacagctgtacaagctaacttgcaagtaacagaagactcatccttcagtgttttccgcagcaaaggaatgcaatccgccaaagaaaatgtatttcctgtgagggttctaatggtgcccatccaatctcccacgtggaagcgggacctgctgaggatggagcagatgagggtcccacagagaatggcagtggctcctcgaacctgtgggtctccatgatcgatgtagttcaagatgtctgagacatactgttcctcagggtattccgtggtgtcaagaggaactttatagagtttgctgaagaaagattccgggtggagggccacagctgctcccacacagctgagggccagggccttcacgctgaccctcacatccctgtccggaaccagcacattttttccccctgttagcaaaaacgaagcagataaaaggcggacacaatggacaagaggtgcagagtcatcatcagtggactgtccaatgtcacctttgatgcggcaaggcttgttttcttgatcacccggttcagtagcttcatctctcaacacaaatttatcaacactgctgtcagaaggctgcctgcagtgactcatgtttttcaataaatgtgcctgttgaagggccatggaagagttcctgaaggcctccgaggcttcatcaggaagaatacctgtggcttcctcatcttcatcctggggctgtccaatctgcaggcccaaatactggttgtcggtaccgtctaacacaatttcagaactgtctgaaggggtaacagctgaatcaggcccttcggtggtggtctgggagctgtcgctgatgggcgacgaggcctgggtcccatcattcaggtccatggcagggtcagatgggacggcgctgacctggctggagctgtggctcaagatatcctcctcatccccatcagtggcagagcttgtcaagtcacagctggccagatccactgagtccgcctgcagtgtgtgctgtgaccgtggctgttctgtgatgatgtcatgacctgctgaccctggagtggaaacccctgaagaagcagccagctctccactgatctcatccttcactgaggctgttaaggcagagctgctgacatccgatctcgattcagagtcatcctccaaggcttcttcttctcctaagagcactttgcctttttgttttcttgaaaggacagggctgcatgaggaaccccctccagctataagttccacaatactcccactacggcttcggccaccagactcctccttagcagcggtgagctgcccaatgcccccgactgcggtcagggtttgcagaagctcgggtggaggcgttctgaagagctgctgcaacagctccagggctccggtcacaacattgtggtcttggtgctgtgtatgatgtaacgtcagttcataaacctggacaagctgctctgcagaaggagagacttccatttctttccttgtcactccgaagctgcctttcaggcttgtgtccttgacctgctgctgcagcaagggcaccaaatacctcagggtgagcagcacgccaagaatcagcagagtggagtgttcatcctcgacaggaacgagtaagcctaagagcacatttagtagccaactatagaaatattgtgtccttcttgagtgctggcagatgctcactgctgatccagccgctgtccgccgaatggtgggggagcttgacttcaggttcgctatgaaggcctttaacaaaaccttaatttcattgtcatttgcaaaattgccaaaagaagccataattttgggaacagctgcagccaaggtctcctggactgattcttcgggtctcttgcttgttcgagtcaggcacggcagaaggttcaccaggtaaggcctgcatttctgaggccgaaccaggtgagccagctcagcaaacctccacagggcagcacgcaaactccgaggggcaccattctttttaatttccttatagagctcgagctgtaaccttggaagattagaatccatcaaagctttgataactttgttgaggcattcgtcagccaccatcctgacatctgactctgcgtcatcactgcacagcagaaaaagttccatagcgatgcccagaagtttctgaaattctggagaatttctgacagactgtgccactatgttttcacatattgtcagacaatgattcacacggtctttcttggtagctgaaagttctttctttggtcggtgcagcggctcctcagccacagccgggccgggtggcggcgggggcggcggcgggggcggctgcggctgaggcagcagcggctgtgcctgcggcggcggctgaggaagctgaggaggcggcggcggcggcggcggcggtggcggctgttgctgctgctgctgctgctgctgctgctgctgctgctgctgctgctgctgctgctgctgctgctggaaggacttgagggactcgaaggccttcatcagcttttccagggtcgccatggcggtctcccgcccggcacggcagtccccggaggcctcgggccgactcgcggcgccgctcagcaccggggcaatgaatggggctctgggccgcaggtaaaagcagaacctgagcggccgtccatcttggacccgtcccggcagcccccacggcgccttgcgtcccagacgtgcgccggcggaggcggggccgcgccggcggaggcggggccacgccggccagcatgattgacagccctagcctgcggactctgccaatggctggccagggaaccagcccgcccctgcccccgcaggttctgcctcacacagcaa

SEQ ID NO: 141999 - DNA, 370 bp, Homo sapiens; identical to SEQ ID NO: 137778

SEQ ID NO: 142000 - DNA, 1998 bp, Homo sapiens
ttatggaatacctactgtgtacaccactgttaagttatgtgctgtggatatcttatatccaaagagaatctttgcagatatatccaacctttgccctgaagaggagaaattgcccaaattcctgttgaggttctcagactttgaggacaggaggaaaggaagagtggagggcttgggagctttatctctgaaggtggcccgtgcaataggatttctgtttgggacctcgagtaccaggaggtagtgagaatttggggcggttgggggagttgaagaatcctgctgagctctcccaggggcaatctgagtgttcgcgcaggtaggagccgctagataccccagaacacagagtgactctgccctgggccgaaaggcgacatttcgcatgtccccgtaaggtccggagtagctatccatccaggggcccatttcgcttttgacacaagtgggactgggatagggcactctgctcaccatgccgccagggtaccacacatcaggtgcggtgaagtcgctttcctggcccgccagcccctgagggggccgagtgtagccgtagggggctacagctcccgcctcgccgccgccgccgccgccgccgccgccgccgccgccgccgccgccgccgccaccacccccaccaccaccacacggtccatacaactggccttcttcggctgtgaagagagtgtgccaggatgaggaagcggcggctgagggtgacccagaaccgggtcccgctgcacccgcgccatgcaggctcgccaggtccccatagcggcactgcgccgccgcagccgcccaggcgctgccgtagtccagcgggttctccagcttgatgcgagcgtggggatggggaggcggcggagggggcggcggtccggccagagccagtggaaagttgtagtagtcgcgactctggtacgcagctgcctcgtccagtgctccggacttgtagagagacagggtagacggcagttcaagtgtcccggagctccctgctgcagcgctgccagagcagcctaggctctcgccttctagccctttggtgtaacctcccttgaaaggggaatactcagcagtatcttcagtgctcttgcctgcgctgtcgtctagcagagaacctttgcattcggccaatggggcacaaggagtgggacgcacagcgggtggaactcccaaaagtggggcgtacatgcaatccccccgaagctgttcccctggactcagatgctccaacgcctccacacccaggcccatggacaccgacactgccttacacaactccttggcgttgtcagaaatggtcgaagtgccccctaagtaattgtccttggaggaagtgggagcccccgaggcctccctcgctctcccgctgctgctgccttcggatactgcttcctgctgctgttgctgaaggagttgcatggtgctggcctcgctcaggatgtctttaaggtcagcggagcagctgcttaagccggggaaagtggggcccagcagggacaacgtggatggggcagctgagtcatcctcgtccggaggtgctggcagctgctgcggcagccccttgctggcggccacggcggctccaggctctgggacgcaacctctctcggggtggcactccagggccgactgcggctgtgaaggttgctgttcctcatccaggaccaggtagcctgtggggcctctacgatgggcttggggagaaccatcctcaccctgctgctgctgctgctgcctggggctagtctcttgctgctgctgctgctgctgctgctgctgctgctgctgctgctgctgctgctgctgctgctgctgctgcagcagcagcaaactggcgccgggaggtgctgcgctcgcggcctctgggtgcctggggcccgggttctggatcacttcgcgcacgctctggaacagattctggaaagctcctcggtaggtcttggacggcggccgagggtagacccttcccagccctaactgcacttccat

SEQ ID NO: 142001 - DNA, 1732 bp, Homo sapiens
gaattccaaaaccttactttttgtttaatttgttttgccaaacaaacacagtgaaaactttagtctgactaattgtacagaaaatagaatttgtaaccagtagcaaacaaaacaggataaacctaagtccctggcaagctggatctccatcagcaggtcatccagatccccttgtaaatggcctcctgggaaaataagtcctaggaggcagaggcacagatttcgtccccatcagaatcacaggctgcacctgggaaggaaaagcatgaaaaggaggagaactgatgttacttgaatctcttatcactacacacattagagttgtctgactgctgaccaaccttaaggtatggttttcccaaacctatagtccctggacatcccacctgcatccctagagggtaagtttcaagttcagtggttctgaagcctctgcttaaccagaatctgcaacaataactggggaggaagggtagacaaagtcataattgctggtgtcaccagggcagagtctaaggccccagcttccacttcaggaggaaacaattgaggatgccaggtcaccagcaagagagtccagctgccttaagcctcagtactgtcaaccagtgcccaggagtatagaggagttcaacaatggcctgcggtcccctggctggatggggtctgggagtccagcaggctgccggggcaccagttcacattccgtgcttcttgcggatgacagccatggcaagcagccgatccttctcacgcagttcttcgcgcagcttggcctcagtgagacgcaggtggcgaatgctgcctttcatctctttcatcttcacttccatcagagccaggatgtcccgctgctcattcagcttgcgcaggagctcctcctccgtggtgcctgacgacaaggagtacgaatggtcggagccagtatcagggaagccctcttcccctaccaccaccaactgggggcccatagggcactcggcagcctccagccctgcggtagcagcctgtaactccgacgcggcggccgcagcggctgcgccctctgcggctgcaaactccacttgcactgtgagatcgatgggcttcacgtcttctccagtgggagtgatgggcgccggctgtacggatcccggagcctgactgctgtctacagtggcctgaagggtgagaaagcacggccgcggaagcagataccaggttcggctgcagctgggcagtctgggcagtggaggcagagggtgaggactgctgctgctgctgctgctgcctgctgttgctgttgctgctgctgctgctgttgctgctgttgctgctgctgctgctgttgctgcttgcctccttcggcgggcggccgcggccccagcgggtctgcgcgctactttgcgctcattgacgccgcgcagcgggaagatggtggggacgcgtaccgtgtaggtcttgcggccgccctggaagtgaacgctgcagagacggtggcctgtggtgggctggaaggtggagaagcacccactgacgccggcacgcgatacgttcttgagccagaggcgccgcaactcagcgtcctttggaaacgtgtagaagtgcagcgccttgtcccggtgcgagttgttgtagcagcctggcacgcagcacgtaaagccagggcatggctgcgccgcgcggcccggcccggcccaccggcctcctgcgctcttcgacggcccagtggctacgccgccgcccggaattc

SEQ ID NO: 142002 - DNA, 542 bp, Homo sapiens
agggtttttctaaacattttacacacattaactcatttattcccctcaataacttcatggggtaggtaccgatatcgtgctcatttcctagatatgctaagtggtactgggaagggtaactaacctgccaagggtagagagtaagtcgtggagccacgaagccaacccaaagggtctgacccagggtcagcacttttaacagcacgtcactggagagcctctgagatgcttctaaaaggacgaatccatctgcttctgtctctggtactgagggctttttagattccggaggctttctgaagaagtgaaacattgctgctgctgctgctgctgctgctgctgctgctgctgctgctgctgctgctgctactgctacattacaattgtccactaagcaatcagagaaaattgctaaaagcttctttactgcttccattccatcagcagaacctttttttttctttctttcttttaaagaccagaatgaatgtttagagtactaaatcttattagtggtcaattgaagtattggagagccacat

SEQ ID NO: 142003 - DNA, 622 bp, Homo sapiens
ttttttactttgcacactactcttcgttttatttattgtttttggaaatggaaaatagaaaataggagacccagttgtctctttaaagttttaagctaatgatgctttggattggtaggacctgttccttacatcttacctcctagttacatcttttcctaggattcttaaaactagtatggatatgctgagcatacattctttagaaccttttggactgttttggtaaatttcgtagtcgtaggatcagcacaaagcggaacttgacacacttgtggagttttacggctgtacttggtccttctccatccctttgcttccttttcaaataaaatccaaaccgccttccaagtggggctctttcatgctgctgctgctgctgctgctgctgctgctgctgctgctgctgctgctgctgctgctgctgctgctgctgctgctgctcctcctcctcctcctccttctcctcctcctcctcctcttctagaccttcttttggagaaatggctttcggaagttttgccaggaaacgtagccaagtgccacgagctgcagttgaagagaagataataaagttcagagcctcaagtaccaggcgagtatcagggcagatgttagtcat

SEQ ID NO: 142004 - DNA, 1852 bp, Homo sapiens
agtaatataaatgtattgtaaaacaaccaaaattccaccaaaccaaaccaaaacacaggaagcaaagctccatgatcaagagccagcagaaacaacagactatagcaccaaatctgtaaatatttcacatattgggattatcagatatggatcctattctatcctgctctattctattacattcttacttaaaacatttaaagaaattaaaacttctagaaataaaaaaatgaaattaaaaattcaacttcatactgcaaaagagaaattggaagctggagctgaaaaaattaagcagggggcagcaattaaagacaggaatacggaaaatacgaaagagatgcagaatggctacaatcagaaaaactgtcaatcaactgttgacaaggatgtggaggaactggacctctcaaatactgctggtgaaattgcaaaatggtacaaccactttggaatcagtttgacagtttcttataaagttgaactatgctactatttgtcccagcagtctcactctcagataggacttcttgtttcccacctggcatataagaagcttagaagttaccacgctggccttacaataagtaaaaagctgaacaaactgaaaaatcgagaactcttcttagatctgtcagagactggcccagagacaaagcaagagaagcagcagaggctgttggccctggctgagaagaaagctctgggcaaagggggcatccccactaagagaccaccggtccttcgagcaggagttaacaccgtcaccaccttggtggagaacaagaaggctcagcccgtggtgactgcacaggatgtcgagcccatcaagctggttgtcttcctgcctgccctgtgccataaaatggaggtcccttactgcgttatcaaaaggaaggcaaggctgggatgtctagtccacaggaagacctgcaccaatgctgctttcacacaggttaactcggaaaacaaaggggctttggctaagctggtggaagctatcaggaccaattacaatgacagatctgatgagatctgccgtcactggggaggcaaggccctgggtcccaagtctgtggctcacattgcccatatggaaaaggcaaaggctaaagaacttgccaccaaaatcatggatattaataaagagaaagtagctcgaagagatattggtatttggacaacaaataagactacatcaagaattcacaaaataatagcgcctgcaaatatggagcgtcttataagtttaactcctccaccaccgacaccaccagataatgttctcatgtttgatgactttccacctccaccatcacccactccagtggattatgaagacgaggaggctgcaatagttcagtataatgtttcatatgcagataaggatactgcaaggtccccaaagaattatattgagaacatcattgcagtgtatgattatacaaaagacaaggatgatgagctgtcatttatggagggtgcagtcatttatgttataaagaatgttaatggcttatatgaaggagtcttcaatcaggtgactgctggcacatatgttaagatttgtcagtacggggagctggagttgggagccagagttaccttgcagaaggactgggttttcctccctggttccagtgtgccatcttggcaaggctcctatggccagacatttctcaaacaccctgacctgtcagttggttttgtagcaggatgtctctgggattacattaactggttcctttgccctctgacttccggtcagcttcaggcaatacctctccccagcaggagattggagggaggagggcgagatcagagtgtcagtcccctggttctttccttatga

SEQ ID NO: 142005 - DNA, 1110 bp, Homo sapiens
atgaacaatggaagtcaacaaaaagcagagcttatcgatgataagcggtcaaacatgagaattcgcggccgcataatacgactcactatagggatctctggagtgctgcagactcctggcctgtacccttgggtcaaagatgccttcaaagacatttccatatacttcaccaaggaagaatgggcagaaatgggagactgggagaaaactcgctataggaatgtgaaaatgaactataatgcactgattactgtaggtctcagagccactcgaccagctttcatgtgtcaccgaaggcaggccatcaaactccaggtggatgacacagaagagtccgatgaagaatggacacttaggcagcaagaactcaggaggaaggagactgaaggaaagatgtatagcctgcgagaaagaaagggtcatgcatacaaagagatcagcgagccacaggatgatgactacctctattgtgagatgtgtcagaacttcttcattgacagctgtgctgctcatgggccccctacatttgtaaaggacagtgcagtggacaaggggcatcccaaccgttcagccctcagtctgcccccggggctgagaattgggccatcaggcatccctcaggctgggcttggagtatggaacgaggcatctgatctgccactgggtctgcactttggcccctatgagggccgaattacagaagacgaagaggcagccaacagtggatattcctggctaatcaccaaggggagaaactgctatgagtatgtggatggaaaagataaatcctcggccaactggatgaggtatgtgaactgtgcccgggatgatgaagagcagaacctggtggccttccagtaccacaggcagatcttctatagaacctgccgagtcattaggccaggctgtgaactgctggtctggtctggggatgagtatggccaggaactgggcatcagatcttctatagaacctgccgagtcattaggccaggctgtgaactgctggtctgggctaaacagcaatcagccctttggggagactccaccactgacatcaaccaagtgccagactatggcccttccatttttgcggtttcaacacaactaa

SEQ ID NO: 142006 - DNA, 1375 bp, Homo sapiens
attaataaactcaggctccagtatgtgatgccaggccatataacttgtgagtgccgaggaattctgtctgaaacagtccaggctttttctaccatacatgcaacctctattcggagagttggtgaggctgctgtgaccaaactcttaaaaggcctgaagttttactattaccagacctccttccagatccccagtattgaatataatcctgatttttcagtagaacactcaaaacttagcaccgacctgaaacaaaaagtcagtaacgagatatttcagagatccaatttaaaccatcattacataaagtgtcaagttgtcaactttagtccagaggaagatggtgtgaaagtagatgtcattatggtgttccagttcccctctactgaacaaagggcagtaagagagaagaaaatccaaagcatcttaaatcagaagataaggaatttaagagccttgccaataaatgcctcatcagttcaagttaatgtggccatggtcaagaatggcaatgtggggccaggttccggagcaggagaggctccaggcctgggagcgggtcctgcctggtcaccaatgagctcatcaacaggggagttaactgtccaagcaagttgtggtaaacgagttgttccattaaacgtcaacagaatagcatctggagtcattgcacccaaggcggcctggccttggcaagcttcccttcagtatgataacatccatcagtgtggggccaccttgattagtaacacatggcttgtcactgcagcacactgcttccagaagtataaaaatccacatcaatggactgttagttttggaacaaaaatcaaccctcccttaatgaaaagaaatgtcagaagatttattatccatgagaagtaccgctctgcagcaagagagtacgacattgctgttgtgcaggtctcttccagagtcaccttttcggatgacatacgccggatttgtttgccagaagcctctgcatccttccaaccaaatttgactgtccacatcacaggatttggagcactttactatggtggggaatcccaaaatgatctccgagaagccagagtgaaaatcataagtgatgatgtctgcaagcaaccacaggtgtatggcaatgatataaaacctggaatgttctgtgccggatatatggaaggaatttatgatgcctgcaggggtgattctgggggacctttagtcacaagggatctgaaagatacgtggtatctcattggaattgtaagctggggagataactgtggtcaaaaggacaagcctggagtctacacacaagtgacttattaccgaaactggattgcttcaaaaacaggcatctaattcacaataaaagttaaacaaaaaa

SEQ ID NO: 142007 - DNA, 435 bp, Homo sapiens
ttaagctccaaaatgagctccttttactccatgtctcacatccaggtcatgctgatgcaaaaggtgggttcccatggccttaggcagctccacccctgtggctttgcagggtacagccttccttctggctgctttcatgggctggcattgagggtctgtggcttttccacacacacgatacaagttgtcagtggatctaccattctggggttgctctagcagatgttctccatgagagccctgccctgcagcaaacttctgtctggacatccaggagtttccatacatcctctgaaatccaggcagaggttcccaaacctcagttattgacttctgtgcatgcacaggctcaatactccatggaagctcccaaggcttggggcttgtaccctctgaagccatggcctgaactgtaccttggtcctttttagtcat

SEQ ID NO: 142008 - DNA, 1140 bp, Homo sapiens
tcaaggagcataaggagagaaatctaaatgttgtagtggtgttccataggaaactctgaaatcatacaactgccataattttcccatttgagttagactgtgagagggaaatgcagaaatgatagtttttctcactgtggtacctggtaccatgaggtagagttcacactcagagagcaggggatgctctactttcccatcaactgtgatcatgagtatcacctgctgggggaccttgaaattgtgaatcttttcatattttggaatttgctcgttttctttcagagttgctcttctaacaagtgatgtcaacagttccccagccagcatgacaaaccataaggccaggcagggtgaggttgagagggccaccgtgctgaggggcagtgcacaggttctgtggtcctcctcaccagcagcattggcagaagtggaaagcagagcagtggctgtcatttttggcttctgcagcatcagatatgtacttgcccttcccgtgtaatgggaccaaggaagaagcacagacctactgcccggggctcccgccctccacagcccctcccctccgggtttcccagcgcgggagctatggggcaagtgcactgcctcgccgctccacactcgcttgaacgcgtaagaaatcctcgtcagactcagctccgggctgggagggactccaacccgagcaaatctagcgctcctgccaacaccgcccgccgcaacagcaacgaattcatccatcccagattcgccaccagggtccgacggttctgtccccgcgggccttaccacttggcttgcggtgttgacgctggactgtccgaaggcttttggcaaagttgcttcccaagcatgtttactgtggaagggtgaacagccaccaaagacaccacctgtcactccatccagggtctccctcttagcctctgagcccaacacaataaggctcaagaatgtatttccaagggttttcccagcgtgcacctggaaaagccacagacactcaacgccagcccatgaaagcagccagaaggggctgtaccctgcaaagccacaggggtggagctgcccaagactatgggaacccacctcttgcatcagtgtgacctggatgtgagacatggagtcaaaggacatcat

SEQ ID NO: 142009 - DNA, 399 bp, Homo sapiens
caatggagacactgcaataggtcacttcttcctgtccaaggaaaaagcggcgctttggaggggataggccctcctcgagtttttctcccccgagtaaagagcttttggcggtcaaagggctccgccggacattcctaccgccctcccctcgacaccccactaaagacagaagaaccgcggctcgatcgggtccgcggcggaagcgcggccaaacgaatgagtaggcagcctgtgcgttgtcactccacacttttattcttgctcggggtcgactttcttttttcttctcccctggatccggagatctgcggacggcgattttgggacgaaaagggtcggatgggccgtgggagagagaaggtgtgggaaacagcatcaagtagttccgcaaaactttga

SEQ ID NO: 142010 - DNA, 879 bp, Homo sapiens
ttacaacttggttccattcttctggtcactttcaggtacaccaatcaaacgtaggtttggtcttttcacatagtcccatatttcttggaggctttgctcattcctcatcattcttttttctctaatcttgtcttcatgctttattttatcaagttgatcttcaatctctgatatcctttcttccgtttgatcgatttggctattgatacttgtgtatgcttcacaaagctctcgtgctgtgtttttcagctccatcaggtcatttatattcttctctaaactgcttattctttggtctttgctgttggtgacttttggatggagattttgtgtggtcatcctttttgttaatgttgacactattgctttctgtttgttggttttccttctaacagtcatgtccttcttctgcaggtcttctggagtttgctgggggatccagaccctgtttgcactcatggtggaagatgaagggaaagcaggcatcttacatggcttctcctgggtccctcccacaacacgtgggaatctttctagacacaaggaggggacaggtattggataaacacagctgttccaaatgggagaaattatccgaaacaaaggggttacagggcctatgcaagtccaaaatccagcagggcagtcaaattttaaagctccaaaatgatctcctttgactccagatctcacatccaggtcacgctgatgcaagcggtgggttcccatggccttgggcagctccacccctgtggctttgcagggtacagtctccctcctagctgctttcacagcctggcgttgagtgtccacagcttttccaggcacacagtgcaagtagacatctaaattcaatgcgtccacagatgaattcatcat

SEQ ID NO: 142011 - DNA, 1485 bp, Homo sapiens
atgggttttgaattgcgagaagaaaaaattgggcctgaatctccgtgctttactttccgaccatgtgactttgggtttatcctcaaatttctctgtgccccagcttctttgtatgcattcagttttataagggaagcagagcataaaaatttggaaaatttgcagcctgactatgcaatagaaaagaaaaacccattttctggggagaaactcaagcctattgcagaaatttgcctaagtagcaaggagcctaatgttaatccccaagaccatcggggaaatgtctacaggccatgtcagggaacttcatggctgcccctcccatcacaagcctgcaggcccaggagtaaaaagtggtttcatgggccaggcccagggttcctgtgccgtgtgcagcacagggacttggtgccctgtgtcccagctgctccagctatggctgaaaggggccaaggtagaggttgggctgtggcttcagagggtgcaagacccaagccttggcagcttccacgtgatgttgagcctgtgggtgcacagaagtcaagaactgaggtttgggaacctctgcctagatttcagaagatgtatggaaacgcctggatgcccaggcaaaagtttgctgcaggtgtgggaccctcatggagaacctctgctagggcagtgcagaaggaaaatgtggggtcagagccccccacacagagtccctactggggcaccacctagtggagctgtgagaagggggccactgtcctccagaccccagaatggtagatctacccaacagcttgcactgtgcacctggaaaagccacagaaactcaatgccagaccgtgaaagcaactaggagagggtgctgtaccctgcaaagccacaggggtggagctgcccaaggccatgggagcccacgtcttgcatcagcatgacctggatgttagacatggagtcaaaggagatcattttggggctttaaaatttgactgccctactggatttcagacttgcgtgggccctgtaaccactttgttttggccaatatctcccagttggaatggctgtatttactcaatacctgtacctccactgcatctaggaaagaataaaatacctaggaatccaacttacaagggacgtgaaggacctcctcaaggagaactacaaaccactgctcaaggaaataaaagaggatacaaacaaatggaagaacattccatgctcatgggtaggaagaatcaatatcgtgaaaatggccatactgcccaagatttgaaagcctcagagaaggaccaaacagtgcctgagaagtttgaatttagaataaaaggagaaaaaaaaatgaatagttgtaagcaccaatttatgatcacatggtaccagttgagcatctgtaatccaaaaacccaaaatctgaaatggtctaaaatccaaagctttttgagcatcaacatgatgctacgagtggaaaattccacacctaatgttatgtga

SEQ ID NO: 142012 - DNA, 1737 bp, Homo sapiens
tcaatataagcctgtgtagtcccgtaggcctctgggaataattagctcaacagtggactgtgaaacacacactgcttccttcctggtgagttctgctctgagctccaattgcagcccagttgtcacacactgaaaagcaaaacgcagttcagctggttttaaaagacccattgacagcccagggcttgtaaaacgatgtgtacgggtagcttcagctggccccttgccttccccagagcccgcttcggacatggtgtgggttgcatccttctctgcaaactgcctgtgtgctctgtggcacggcttccggcaagagatttcctctgcagcattaatgtctcgtggaaggccaagtctcttgctttgtgatcccattccactcttccaccatgattgtgaggcctccccagccatgtggaactgtaagtccattaaatctctttcttttgcaaatttcccagtctcaggtatgtctttatcagcatcgtgaaaacagactgatacagtaaattggtaccagtagagtggggtgctgctgaaaagataccctgcaaagccacaggggtggagctgcccaagaccatgggaacctacctcttgcatcagcatgacctggatgtgagacatggagtcaaaggagatcattatggaactcaatggagacactgcaataggtcacttcttcctgtccaaggaaaaagcggcgctttggaggggataggccctcctcgagtttttctcccccgagtaaagagctcttggcggtcaaagcgcctcgcgaggggcggaggggcccggggaacgagtcccggagcgaacccagccagcctctggattcccacggcccagggctccgccggacattcctaccgccctcccctcgacaccccactaaagacagaagaaccgcggctcgatcgggtccgcggcggaagcgcggccaaacgaatgaaattcgagggtgtaaagaagaggaaggggaaaaatatcttgtaccagcccaggggtgaagaagcccccggcctgagaaagaaggaggagtgggggaggcgaacagtctcgttgctgcctctgtgtacgctgaggggggagggctcttcttttcgactaccctcgctgaagattttctcttccttccctcgcccaactctccctcggggcctctacggagaccccccccccccatgggtggcccaaaatggagaacgcggagcagcgcaagatggaggctccgcttctctgtgtagcagtagatttaggttccttttctccggcaggctcctaagcctaggagagcccgaactggagagagggaacaacattcatgtgacgggcccctctgcttctcccccgccccatcatctccagcgcgtggtgggggaactgctggggaaggcgattggcatcgatctctccatcccttccgaggcccgacttcggaattgtcttagaagaaagaaggcaagccaccattttacccacgtaaatatatgaatatatttctgacattgaggtgttccagaagatgataaagaaatgatagcagctccagaaataccaactgattttaatctactacaggagtcagaaacacatttttcttctgacacagattttgaacgatatcgcaggaaaaaaccgaactcagggcaaaggcaatacttgtagaaaaggcgaagagggcccagcagaaaaggtctgaggtggaaaaggaagaggaacacctacttctgcgcg

SEQ ID NO: 142013 - DNA, 525 bp, Homo sapiens
atgacagtgcacagcgaagcagcaagtgctgacgtaggagctgcagcaagttatccagaagatctagctaagaccattgatgaagatgtagagttatttcttctggatgaacaaagaaagtggtttcctgagatggaatctactcctggtgaagatgctgtgaacattgtggaaatgacaacacaggacttagagtattccataaacttagttgaaattgctccagttaccctaaccttcagcaaccacaaccctgatcagtcagcagccaacgacatcaagctgaaaatgaaaacaattgaactcatggagacagagtcgaatgatggttaccagaggctagaaagggtagtgggtgaattaaaaattgtaaaaatgttggaaggagaccaaggagatgaaggacacgaaggagacgaaggagatgaagaagacaaagaagacgaagatgaagacgaagaaaaagaagaagaagaagaagaggaagaagaagaaagcatattgtgtctcattttaaactgctag

SEQ ID NO: 142014 - DNA, 396 bp, Homo sapiens; identical to SEQ ID NO: 130913

SEQ ID NO: 142015 - DNA, 1501 bp, Homo sapiens
atgaagttccacaggaatgccgggtgtgctccggtgccccagcggaattggaagggccaattccgcagtgcaatcgccaccgccaatcatttttgtggcgatatccagcgcaataccggtcacgataattactgccacacccgacaggatccccagcaaaccagtgtgggctatcacagtcaaatcaatggtattgcccagcgcgaaggcaaagaatggaatcagcgtttgcaccgctttgctgaaaaattctcgcaattcagggtcaaggttcctcagggcaaagcccaccaggaacgcgccagcgttgaaagtccggcaaagaatccaacttcaacaccatgttccggaataatacgcgaggcaattgccgcaaccacccacgcgacggcaattttagttaccaccagcgtaccggatttacgcagtaccgatgccgtctcaattaattggggcatccatttattactcaaccgtaaccgattttgccaggttacgcggctgcaggcatgcaagctttggcgctatgtggtggaagaagatccgggcgttaaatcggtgcgcaatatctacgactactataagcaacaccactatgaaaccattgtgatgggcgcgagcttccgtcgcaccgaacaaatcctcgccttaaccggctgcgatcgactgactatcgcaccgaatttactgaaggagctgcaggaaaaagtttcgccagtggtacgtaaattaatcccaccttctcagacgttcccacgcccagctcccatgagcgaagcggagttccgttgggagcacaatcagtatggcacgtcggtagagccactgtctcaacgcgtgggtgccgagctcaggtcgtatcaatgctccggggatagtgtcttacatatccacgagcaaggactaagagtcagtgattctgtaaacccaagagcgcactatgctataaacagcctcgcattgggcgatgtgaaaggcattaaagcatatggcaatgcaggttatatccgcatgtatagcggtcacgcaccagaacgtcaggtcattgacaatgttcccgctcccctaagtgaagtggcgcaggccgatgatgttaacgccatcgaccaagcgattagaaacgtagacaaacaaactcaggatttcgccgctcgccgcatggaccagtcggttcgtcgtgcgttgaaaggccattccgtggacgaggatctctgccctgatggcgctgttctggaagctaatagcggtgaaaccattctcgacgcagctctgcgtaacggtatcgagattgaacacgcctgtgaaaaatcctgtgcttgcaccacctgccactgcatcgttcgtgaaggttttgactcactgccggaaagctcagagcaggaagacgacatgctggacaaagcctggggactggagccggaaagccgtttaagctgccaggcgcgcgttaccgacgaagatttagtagtcgaaatcccgcgttacactatcaaccatgcgc

SEQ ID NO: 142016 - DNA, 1222 bp, Homo sapiens
agctcagggccagcaggccagcgtctgtgaccggggtctcgcacaggttcagcacctggagcatggtgaggtgttccgacaggagccgaaggccagcgtctccaaactgtagagcacagaaactctcagccctctcccggccactcctggggaagtgactctgagggcagggcatccatttattactcaaccgtaaccgattttgccaggttacgcggctgcaggcatgcaagctttggcgcgacggaactacagacgcgacactgacccgtgggtccaagccgcggaccatcgcgagcagcacacgggtcgcggtcacatcagacgactcgactagacgtaagactgataaggtgataaaactggaagactgagcaactcgcctctcggcacgaacccgagtggcgatgccatagacgtaccacaaatcagcgacgtaaaaacgaataggctcaatctttgaggtagttgagaaggccccctgaaccggcaaggccccagcaaggccccagcgtgtcaccgcccggcagacctcggggcatccgcacaatcttggactcctggaggcccatacatagcatccccccgcccagtccctcgggaccggtggaaggctactcatcactgcaacgtgaattttacggacatgttttccggcggcgacccaaccaatccgaaaaccaggcaccagacatttcgaaaacgaagagcaatgcaaaacgccatcgtggcgatcccacgctttcgcaggcagcggtttttcccgtccaaaataaagttcgctgtaaacgtcatcttcaatcagcgttacgttgtactgattgagcaacgccaccagttgtgcttttttttgcggcgttaaggtaaatccgagtggattctggctattagtcatcagccagcacgctttcaccggatactcctgcaacgccagttccagcgcctgaagatctatcccttctttaacatccgtcgccaccgataacgccttcagccgtagccgctccagcgcctgcaacgcaccgtagaaacaaggattctctactatcacccaatcgcccggttcagttaccgcttgcaaactgaggtttaatgcctctaacgccccggcagtaatgacaatttcatcaggagaaatggtgatgccctgtaaggcatagcgacgagcaatagcctgacgcagttctgcgtttcctggcggtaagttttcaatcacgctcat

SEQ ID NO: 142017 - DNA, 3678 bp, Homo sapiens
  misc_feature (1)...(3678): n = a,t,c or g
atgaagcatgccgccacgtctttccccgaaagggaagataagcccggacaagctattcctggtaaatcggctaagaatcaggaactaggatgtcgcgcactgaagcggagctttcccagggccgataacgcctcgttgtactacaatgagtccctgatcggccttttctgccaaccctactgtactgtgaagctcttgatctattctgtagatgtctctctcacaggagtgtcaggaagcaccaatggaatacgactgccaagcaatcgacaggccttttgtataacaggccatttcttcgctgcgacgatcgttgctctatccactcgcagtgaatgcaccgatggattgtctcatcggatatactcnaatgcagactgcgctacggaccacggtatctccacgagcctggataatgcaggagcacgtcgagccgcgaactgcatattcaatcgtgacgttagcatctacttcattagagcatctcccaaggcttacactactagtatgcatttccgtgcatccgatatgtttgtgctgggaatttcgctgacacaggatcaacacatctacactacaatggaccacagcttaatgcaaccattgatgtatcgaatctcgagtctcggctacccaccgtatacttactacgaagtttattactctatgtcgggtgcggagaaagaggtaatgaaatgtgccccgcttacgcagggcatccatttattactcaaccgtaaccgattttgccaggttacgcggctgcaggcatgcaagctttggcgctctatgtcgggtgcggagaaagaggtaatgaaatgtgccccgcttacgcagggcatccatttattactcaaccgtaaccgattttgccaggttacgcggctgcaggcatgcaagctttggcgccagatcctgactgaagagcagtatctgacgcgctggaagagttcggcagacgcgatgaaagaagcgggcatcaatgttgattacgttctggaattcgacgtaccggacgaactgatcggatggagcacgaacgctatgtcgggagctcttatgtccgaagatatctttgacgccatcatcgtcggtgcagggcttgccggttcggttgccgcactggtgctcgcccgcgaaggtgcgcaagtgttagttatcgagcgtggcaattccgcaggtgccaagaacgtcaccggcgggcgtctctatgcccacagtctggaacacattattcctggtttcgccgactccgcccccgtagaacgcctgatcacccatgaaaaactcgcgtttatgacggaaaagtcagcgatgactatggactactgcaatggtgacgaaacctcgccatcccagcgttcttactccgttttgcgcagtaaatttgatgcctggctgatggagcaggccgaagaagcgggcgcgcagttaattaccgggatccgcgtcgataacctcgtacagcgcgatggcaaagtcgtcggtgtagaagccgatggcgatgtgattgaagcgaaaacggtgatccttgctgatggggtgaactccatccttgccgaaaaattggggatggcaaaacgcgtcaaaccgacggatgtggcggttggcgtgaaggaactgatcgagttaccgaagtcggttattgaagaccgttttcagttgcagggtaatcagggggcggcttgcctgtttgcgggatcacccaccgatggcctgatgggcggcggcttcctttataccaatgaaaacaccctgtcgctggggctggtttgtggtttgcatcatctgcatgacgcgaaaaaatcggtgccgcaaatgctggaagatttcaaacagcatccggccgtttgcaccgctgatcgcgggcggcaagctggtggaatattccgctcactgccggaagcaggcatcaacatgctgccggagttggttggtgatctgcacgagcgcagccttatctttgttgccagcggtccggccgggaactcaaaggagactgccagtgataaactggaggaagccctaccaaccaaaaactgggaagtaccaggagccaattggaacacccctgggaatggaataccaagtgtaccagagaagttgaagggaatgttaagtgccccgaactaccgccggatggtcctgcctgcaccgctacaaatattgttactacaaaacgccaaaggcggagagttattaggtgccgcaggtgggcaaatagcgtttaacctcggtagcgccgtcggcgcatattgcggaggtatgatgctgacgctggggctggcatataattacgtggcgctgcctgccgccctgctttcgtttgctgcgatgtcgtcgttgctgctgtatggtcgctataagcgccagcaagcggcggatactccggtgctggcgaaaccactggggcagctcgacaatgcgcccttccggtgtgaaaacgtaaatctcatccgggaagagatcgccgatgctcaggcagagattgcagtaagcatgcagctgctgcctacttaccaatatgaatacgatgctcccgtacgggtaatccccctgaccagtgaaaccgtcagccacaccacctgccgttacgatgtacttgaccggctgatacaggaaaccggctttgacgtccgcacacagcgttatcaccacgacctgaccggcaaacttatccgcagcgaggatgagggtctggtcacccactggcactatgacgaagcagaccgcctcacgcaccgcaccgtgaagggtgaaaccgcagagcggtggcagtatgacgaacgtggctggctgacagacatcagccatatcagcgaagggcaccgggtggcggtgcattacaggtatgatgagaaaggccggctgaccggtgagcgtcagacggtgcatcacccgcagacggaagcactgctctggcagcatgagaccagacatgcgtacaacgcgcaggggctggcgaaccgctgtataccggacagcctgcccgccgtggaatggctgacctacggcagcggttacctggcaggcatgaaactcggcgacacaccgctggtggagtacacccgcgaccgcctgcaccgggaaacgctgcgcagcttcggccgttatgaactcaccaccgcttatacccctgccgggcagttacagagccagcacctgaacagcctgctgtctgaccgcgattacacctggaacgacaacggcgaactcatccgcatcagcagcccgcgccagacccggagttacagctacagcaccaccggcagactgaccggcgttcacaccaccggtactgagctcgagttattcttcgatattttgacgttttgcctgatgtggtgggtattccatgccaacacgccggaaacgcaaacgctgttccagtcgggatggtttgtggtgggcttactgtcgcaaacgctgattgtgcatatgatccgcacccgccgtgtgccgtttattcagagctgtgcatcgtggccgttaatgatcatgaccgtgatcgtgatgattgtcgggatcgcattgccgttttcaccgctggccagttatctgcaattacaggcgctgccgttaagctatttcccgtggctggttgcgattctggcagggtatatgacattaacccagttggtgaaagggttctatagccgtcgttacggctggcaataa

SEQ ID NO: 142018 - DNA, 492 bp, Homo sapiens
cagcagctgtgtatacggatgatgcgggtcgtcgagcacgcggtcggttaacccactctccaccacttgcccctgcttcatcaccagcaaacggtccgccagcaggcgggcgacgcctaaatcatgggtgacaatcaccaccgcgaggttcagctccaccaccaggccgcgcagcaggtcgagcaggcgggcctgcaccgacacatccagcccgccggtcggttcatccataaacaccagcttcggatgcgtcaccaggttgcgggcaatctgcaaacgctgctgcataccgccggaaaaggtggtcggcaggtcgtcgatccggttggcgggaatctccacctcttccagccacttccggggccgcccattggtcaagtcctcacctttggagtcgcgccaaagcttgcatgcctgcagccgcgtaacctggcaaaatcggttacggttgagtaataaatggatgccctgcgtaagcggggcacatttcat

SEQ ID NO: 142019 - DNA, 560 bp, Homo sapiens
ccccaagaaaaactgttcagtttggtggaactgtgacagaagtcttgctgaagtacaaaacgggtgaaacaaatgactttgagttgttgaagaaccagctgttagatccagccataagggatgacccagatcatcaactggctgctagaattccgttcttctgtcatgtacttgaccaaaagactttgagccaacttatcagtattatattgagattgccttggttgaatagaagtcaaaacagtagtggaagagtatttggcttttcttggtaatcttgtatcagcatagactgttttcctcagaccgtgtctcagcatgattgcttccccattttgtgcctccccgagtgatcattaaggaaggcgatgtagatgtttcagattctgatgatgaagatgataatcttcctgcaaattttgacacatatcacagagccttgcaaataatagcaagatatgtaccatcatgagtatacttttccttattttgaatgtttaattctcaagaaaattgtaatcaattagtaaaaattataaaatgttaatagtattaaaaaa

SEQ ID NO: 142020 - DNA, 2991 bp, Homo sapiens; identical to SEQ ID NO: 123578

SEQ ID NO: 142021 - DNA, 669 bp, Homo sapiens
atggcggcgaccctctatacagattctgatagggctaaaattattgatggaggtgctttctacctaggagatcagcgttcacacctccagttgctggaaaccgaggccacacgaaaagaagccatgagagtgaccagctctggtgacagccggccaggtcagcctgagagcgacagccgaccccaccacctgccaggtgctgccactcacgcgggcctggagcccccatttgtctgtgtcaccggggctgaggctccctcctgcaaggccactactgtgactctgagcagcggttcttctcatgaatgtgatagctcggtcagctctaagactgcaacctgcagggacttcatggggcaaccctgggggcacgcaagcatcccacccactcccaaccccccacctccagccgtcgtgcccggcatcttttcccagcatgagaacccgttggcttttctcttttcccgccttgccatgaaggacctgctgccaggattcgagcctcagaccttggacaggtctcgggccagcctcagccacgttctgcgtgcccggccatcagggaggaaggatgttggagtgcggatccatgcggacaccctgtttggggacctgggtgtcggggcagcagcaggagtgactgggtgcacgtgtgcctttggtgtctga

SEQ ID NO: 142022 - DNA, 933 bp, Homo sapiens
gatgaatcttaaagcaacactccattggaggagctgctcccttccccgttcagtgctgtaattgtctgaatatttatttctcggcattcactgcagaacaagctgcaagtggtgactcggacgtgatcaagtggtgactcggacatgatcaagtggtgactccgacgtgattgccttgaagttatgcatggagtaggatgactcaccaatcttcggggaataccggactagagtggatccccataaaatgagtgaagccataatatgagttagagactactgaaaaagcccctcctgatgatgaaggacctgtcattggagaatcgaccaaaactgacagtgataacttggaaggcacctgacattacctggggacagctaaagaaactggaccaacagggaactatctggcttgcatctatgggagcccctgaaactgcagagaaccagtttcttatgtatctgatggtaattgggggagcttctgagaaggagtatctttactatcagcccaaaagggatgctaagcctgcaaacttgacttttatttctgctgttaccagtaatcttactgaggtttctaatgaaattatacaaatgcctgatcttctgatatgccatctgagaaaagactggcgacataagtttgaggctgtccagtggtccccatgcagacaacctgtgccgcatcaaggacctctgtttgataatggcaccttacttgactggggaccccatggatatctcatgtctgcaaatcagactattggatttgggactccatccaatagttccatcacctggcatctgcaaatggctctgtgctgccactcaaccaactatgaccagggaagaatgatagaagcttactttgcattggataatccgcatgttctaagaattaaagaagggggaaatgtgaggggtgtatga

SEQ ID NO: 142023 - DNA, 321 bp, Homo sapiens
  misc_feature (1)...(321): n = a,t,c or g
gcccttcccacaatggcagcagcggcgggggctatggcgccagtaagaagaaaaaagcgtccgcttccagctttgcgcaggccaactacacagacccccagagcaaactgcggttcagcaccattgaagagttttcctacattcggaggctgccctctgacgtcgtcaccggctacctggccctnaggaaggccacgagcatcgttccctgagccccagaaagggagatgaagtgggaaagctgtttcaaaaacagactttgggactcatgatttttgtttcacggaaacaaacttcgttctgctgttcaattttgaaaat

SEQ ID NO: 142024 - DNA, 422 bp, Homo sapiens
gcagggtgctgtaaccccatgtgtccaaacgaagggaaagagtagtcattcactccgcggggcagcgtctttcaaccccaacggagaccgcacgcgcagcgccccacattacgcacgcgccctggctcggctccgccccgccaagtcccgtttcgcgacgcgcacgcgcagcctgggagcgcgactgcgtacctgcgcaaagctggaagcggacgcttttttcttcttactggcgccatagcccccgccgctgctgccattgtgggaagggctggccggcctcttcttgctgttccggactattccgggagtggaagtggtggccacaattggaatttgcgccgccatcgcactccgagtcttcccctggtccccccacctttttaacagcgcggaccttggaacttcctttccgcacgaaa

SEQ ID NO: 142025 - DNA, 451 bp, Homo sapiens
gcctcgagatccctagcaagggagaggaagttccaaggcccgcgctgggaaaaaggtggggggaccaggggaagactcggagtgcgatggcggcgcaaattccaattgtggccaccacttccactcccggaatagtccggaacagcaagaagaggccggccagcccttcccacaatggcagcagcggcgggggctatggcgccagtaagaagaaaaaagcgtccgcttccagctttgcgcagggtatcagcatggaagccatgagtgagaataaaatggtgccctctgagtttagcacaggacctgtggaaaaagctgccaaacctttgccatttaaggatcccaactttgtgcactctggccacggtggcgcagtagctggcaagaagaacagaacctggaagaacctgaaacaaatcctcgcttctgaaagggcattgccgtggcaact

SEQ ID NO: 142026 - DNA, 1232 bp, Homo sapiens
aaaaaggtggggggaccaggggaagactcggagtgcgatggcggcgcaaattccaattgtggccaccacttccactcccggaatagtccggaacagcaagaagaggccggccagcccttcccacaatggcagcagcggcgggggctatggcgccagtaagaagaaaaaagcgtccgcttccagctttgcgcagacttcagtattgatgctcctccatcctttaagccagctaagaagtattctgatgtttcaggtctgcttgccaactacacagacccccagagcaaactgcggttcagcaccattgaagagttttcctacattcggaggctgccctctgacgtcgtcaccggctacctggccctgaggaaggccacgagcattcgttccctgagccccagaaagggagatgaagtggaaagctgtttcaaaaacaggacctctggactcatgattttgtttcacggaaacaaactcgttctgctgtcaatctgaaaatgccagttgctgtgccttggaaagaatgtttggctttaatccaagggtttttttttcagttaacaaagtctgctcagaagatggagcagacatatgactttagttcagctttccccatctatggggatgtatgtagaggaccctttgggaggcagaatagtggccacctcaaagatgcctattcccgagtccctggaacctgtggatatgtcatgttacatggcaaaagggactttgcagttgtgattaatttatgtagtatcaagtgcaatgaaaaaatccttggtgtagatgagtggaactctcgtttgctgctggtgggaagtcagggcatcaatatcccagagaaagccccagcagcctttgccaaaggaagtgtggcattggtgagggaaacaggagctgcaagtaccaggaaggaagctgaagaggaagtgcaagagagggcgcacactacggcagggtgttgttgtgacctggactggctcagcattgggtcacaccaggtcttggcaatcaggagtcaaaaaggacgctctatgctcaggttaaagagaaggaaagaaattcaaaagggggagccctttgaagagttgtcagtgactggagagggatgtggcctctcgctgctggggcacactgagaggtggaggagggaaagcaaagaggactgcccacactcctgcctccacgctgtgatgagtgccctgtgcagggaagatggaaagagttag

SEQ ID NO: 142027 - DNA, 2409 bp, Homo sapiens; identical to SEQ ID NO: 130080

SEQ ID NO: 142028 - DNA, 1070 bp, Homo sapiens
taaaactagctgtgaatttagaagatgattcataagctctgtgcattccatggttatgactggtggaaggcagagattcttacatcagtcttctttacattttagcagcaaggaaaataacaggttagaggagtactttgtatctaccctcccttgcttccggcaaattaatgaaagccaaataaattgcaacactttgatatctgtgtctctgtaacgttaaagacagccctgggctgcgagagatgaacgtggtagagcacctccgggccagcttcccagtggagcaatggtattggagaggtggacaacatggggaggctgagggagctagatcttcgaaggcagagaacaacacgcgagaaagaagctccggaaactatcaatcaatacaaggctgccgttcggcggccttttttattcctagcaacagcactcgcacaaagcgaggtgagagtatgtatcgcatggacaaactaaccactggtgctgcctatggcgcttcagccgggagcatcctaaacggcatgttgaatgcctacagccccgagcagtggaacgctatcggcgtgctgacaaccgccgcagcaggagccgagatgaacccaacgttgaggaataagctggtgggtgccattgttggcggatcaggggcaatcactattgctgcagtaatgctgggcaatgcggatggactcgaaggtcggcgttattacgcctatcaggatgtggtcggcgtctggaccgtttgcgatgggcacactggtaccgacattcgccgcggtcaccgatataccgacaaagagtgtgacaacctgcttaaggcagatctgcgaaaggtggcaagcgccatcgacccgctgatcaaggttcgcatccctgagccaacccgcgccgcgctttactccttcacctataacgttggctctggtgcttttgccagctcgacgctgctgaagaagctgaactccggtgatgttccgggtgcgtgtaaagaactgcagcgctggacttatgctggcggcaaagcagtgaaggggctgatcacccggcgcgagattgagcgttga

SEQ ID NO: 142029 - DNA, 867 bp, Homo sapiens
  misc_feature (1)...(867): n = a,t,c or g
attgttgatggtaaatggaaaaacttttgagtcagagcttgagctcttgggacaaaaaggggaaaagaagagggatgaaggggaaggggccccaattcctctttgacttgattnctaaagcttcatagggggattcccaacttcacagcttagcccttcttgtactaaggaacccaggacgaatcttgacctnccccagggaacctagaccttgggaaggcttgaacttgctatttgagggtcaagtctacttcccctgaaggtggagtgctggatattttgatggggacaaggagggaccaatagatcaaccttcagcaaaggctggtaaggcctgggcaaggtttccaccagggatggatcttccctaaggggtggggggggcttcccagttcctagaaaatggcggtgcggcgcagactgcctccctcctcttcattgtagcttgatcctgcgcagtgaccgttcacggaaagagtcaggcctgggaggggccggaccggggcacaaatgctggaggtttcagagactggctggcgctggcgaaggcaggtctgccagtgacgtatttgtcctgtgggtcctgggctctttcgtggcacgcagggcactctccttcctgggatgggagaatggaattcttctaggcgaggacgggcagcagcggccctgggaaggcttccgtggaaacttccaaaaccaccttgccaggtaagtgaaagtgcgctccgttctctagccacatcctaggccaagtaagttcttcttcattctttcagcagtcctgatcttcttggggagcacccctaaatcagcctgtcaagaaggaaggcaggctacgggtatcttctcaggaacagatgaagg

SEQ ID NO: 142030 - DNA, 741 bp, Homo sapiens
atgcctgaggaattccgagtgtccggtgaatttggcacacttggcccttcatcacgccagtgtggtatcattaactgtaatgatgccacgctgctccagcctccaccttgcagtgtggccacagacacagttggatggcagttggaagagtactggccctgggaagacccagctttgagcctcaggttgtgtctaatcatctctctgtccttgggccagtcaactcacctgttcgtgctgccacagagacagagtgcttggaatacagtaggcactcaatatgtgtattggttgaatgacaatgaatggatgactaagtgtatcctgaatgatctgtactggctcaaggaggggttgtgtgggagccatcaatcacgacctggccctccacctaggaatcataccttcatcccccatactcataaggtgtggagcttcccgaccggctggggagggaatgtcctgcgggagccgccgaggaccctctttagcctcttccctggcttggctgcagctgcagtctggtactcgcccattctgctcttcttcacctccgtattttctctctcacggaagaagaattccattctcccatcccaggaaggagagtgccctgcgtgccacgaaagagcccaggacccacaggacaaatacgtcactggcagacctgccttcgccagcgccagcccatctctgaaacctccagcatttgtgccccggtccggcccctcccaggcctga

SEQ ID NO: 142031 - DNA, 3943 bp, Homo sapiens
gtgcattgagcgcgctccagctgccgggacggagggggcggcccccgcgctcggggcgctcggctacagctgcggggcccgaggtctccgcgcactcgctcccggcccatgctggaggcggcggaaccgcggggacctaggacggaggcggcgggcgctggggcggcccccggcacgctgagctcgggatgcggacgctgctgcctcccgcgctgctgacctgctggctgctcgcccccgtgaacagcattcacccagaatgccgatttcatctggaaatacaggaggaagaaacaaaatgtgcagagcttctgaggtctcaaacagaaaaacacaaagcctgcagtggcgtctgggacaacatcacgtgctggcggcctgctaatgtgggagagaccgtcacggtgccctgcccaaaagtcttcagcaatttttacagcaaagcaggaaacataagcaaaaactgtacgagtgatggatggtcagagacgttcccagatttcgtcgatgcctgtggctatagcgacccggaggatgagagcaagatcacgttttatattctggtgaaggccatttataccctgggctacagtgtctctctgatgtctcttgcaacaggaagcataattctgtgcctcttcaggaagctgcactgcaccaggaattacatccacctgaacctgttcctgtccttcatcctgagagccatctcagtgctggtcaaggacgacgttctctactccagctctggcacgttgcactgccctgaccagccatcctcctgggtgggctgcaagctgagcctggtcttcctgcagtactgcatcatggccaacttcttctggctgctggtggaggggctctacctccacaccctcctggtggccatgctcccccctagaaggtgcttcctggcctacctcctgatcggatggggcctccccaccgtctgcatcggtgcatggactgcggccaggctctacttagaagacaccggttgctgggatacaaacgaccacagtgtgccctggtgggtcatacgaataccgattttaatttccatcatcgtcaattttgtccttttcattagtattatacgaattttgctgcagaagttaacatccccagatgtcggcggcaacgaccagtctcagtacaagaggctggccaagtccacgctcctgcttatcccgctgttcggcgtccactacatggtgtttgccgtgtttcccatcagcatctcctccaaataccagatactgtttgagctgtgcctcgggtcgttccagggcctggtggtggccgtcctctactgtttcctgaacagtgaggtgcagtgcgagctgaagcgaaaatggcgaagccggtgcccgaccccgtccgcgagccgggattacagggtctgcggttcctccttctcccacaacggctcggagggcgccctgcagttccaccgcgcgtcccgagcccagtccttcctccaaacggagacctcggtcatctagccccacccctgcctgtcggacgcggcgggaggcccacggttcggggcttctgcggggctgagacgccggcttcctccttccagatgcccgagcaccgtgtcgggctggtcagcgcggtcctgactccgtcaagctggttgtccactaaaccccatacctggaattggagtcgtgttgtcattgactcaacttaaactccagcatttagataatcttgtgcaaaatgtgtttcagccgtatagtggatccacttttttttttttttttttttgagacggagtcttgctctgtcgcccaggctggagtgcagtggcctgatctctgctccctgcaagctccgcctcccgggttcacgccattctcctgcctcagcctcccatagctgggactacaggcgcccgccaacacgcctggctaattttttgtatttttagtagagacagggtttcaccatgttagccaggatggtctcgatctcctgacctcgtgatgggcccgcctcggcctcccaaagtgctgggattaaggcgtgagccactgcgcccggcccaagagaataggggagccaaggaggaaatgtggaaacgcagttgtgtggcccagcacgagcctgggcgaccaccgggtgacatccgtcccacatcagggcggcctcccaggtcccataagggtagccccctcatctgcaggacagagggaagccagtcagggcccccccggacgttaggaccaggagaaatcaacaggagggcagcccgtcctctctcttggggcgcccacccggcccggctgagccctgccccacccaactccacagggctgttttgcctccccacggaaggcgggctgaggagacaaccagatcaggagagcaaggtcatgaaggaggggacctctccacacaggtgttccgtgggaccctcagcagctctggctctgcctcaggaggtcacctgccgccctgtgggagccgcagagcctgacgctcagccccaggccagctgcggccaggcctgcgggcccctggtgatggggttacgtggggtgcgggatacagctgagtgggaaccggaaacctattctctttttaacaaaaataatcttaggataagaattattttaacaacatataaaactgtttcaagccctcctccccagagctggcgctcagcagccctagcggctgctccttcaggcgaagggtggtttgcagatgtggggagggtgtctggggacgttgctgagctggctgcagaagggtggggatatcagggcacagtctccatgtgtgtgccaagccctggcccccacagcgctcgatggacctcagcaagctgcccagccctggcccaggtgccccgactgtgggactcagttgttctgagcacatttgactccacttttcctttaaaaatgaatgtcttgttcctgtgcattggtggcatcacagaccccagctggggcgcgatgtcaaaggtcgggacagctgtgccgggaggcagccacagggaagctcacacatcctgtcagtgtcaccttggtttgcaaaacccatatccccggtaaaatgaggccggacagaggggctgttaggacagcaaagcagcagtgtccagagacccctcaatccccaaaggtccgcaccctgtcctgcacaccctgggccacgccggccacacccctctgctgcaacaagctcatccctggacttctgggagaatgaacccgaggttggtttggggagacaggtgaggcggttggatctacagaacaacccaccatttctgggggccgcagaggatccatcacagacggatactggggagtaaacggcccaggccaggtgcccaggaaaggacggctgagcatgtggagcgagagggaggcaggtggacgctgcagaccccaggttcagtgcggcccctcggctgttcctcccctgtagggtttggacagacccacccccagccttgcccagctttcaaaggacaaaagggagcatcccccacctactctcaggtttttgaggaaacaaagatttgtggtaactgaaggtgttgggtcagtggccaggtgccgacactgagctgtgacccagaggggacgctgaggaagtgggcgtgagtggacatgtcaggtggttaccaggcactggttgttgatggtcggtggttgggtgtgggcagtcatcagtcatcaggtgtgctcaggggacaatctcccctcaaccgcacatgtgccactgttcagcggagctgactggtttctcctggtagagggccggctgtatcctgacagatgcctggtgagcaggggaagcaggacccagtggtcaacaggtgtctttaactgtcattgtgtgtggaatgtcgcagactcctccacgtggcgggaatgagctgtgtaaatacttcaataaagcctgatctcacatctgc

SEQ ID NO: 142032 - DNA, 1776 bp, Homo sapiens
atgagcctcctcctcacggtcaggatccggtcccaagtaggtcccctgttgccaggaggttgcagccagtgccacgtgtgcgaccggcactgtggcagcgcttccggctgcgccttcggctgcacttccggctgctacctcagcctcggcgccctgacgccctcgagtccgcttcctcacatcctgacagcgtctagctctgctccctcaccctgcagtggcgtctgggacaacatcacgtgctggcggcctgccaatgtgggagagaccgtcacggtgccctgcccaaaagtcttcagcaatttttacagcaaagcaggttgccacctcagtcatttcctgtccttccacatctgccccatgtgtctcaggagtgagaagtcagaaaggataaagaaccttggcaagggtgctggccaggaggagggagggtgctgtcgggaactggagcaggcgggacacctggtcactgtcgtgctgttgggaactggagcagtggggcatctggtcaccgtcagtggcgagggtgctggccgggaggagggagggtgctgcccagaactggagcaggcggggtacccggtcactgtcggtggaaacataagcaaaaactgtacgagtgacggatggtcagagacgttcccagatttcgtcgatgcctgtggctacagcgacccggaggatgagagcaagacctccatccttgccggcagccctggcagcaccgtgtgggtggcgggcaccatagcaacctgcagccagaggaacagtcggaaccgcctcatcggatcttctgagacccgttcactatcacaggaacagttggaaccgcctcgtcggatctcgaacagtcggaactgcctcgtcggatctcgtgagactcattcactaccacaggaacagtcggaaccacctcgtcggatctcgaacagtgggaaccgcctcgtcggatctcgaacagtcggaaccgcctcgtcggatctcgtgagactcattcactaccacaggaacagtcggaaccgcctcgtcggatctcgtgagacccgttcactaccacaggaacagtcgggggaacggcctcgtcggatctcgaacagtcggaaccgcctcgtcggatctcgtgagacccgttcactaccacaggaacggtcggaaccgcctcgtcggatctcgaacagtcgggggaaccgcctcatcggatctcgtgagacccgttcactatcacaggaacagtcgggggaacggcctcgtcggatctcgaacagtcggaaccgcctcgtcggatctcgtgagacccgttcactaccacaggaacagtcgggggaacggccttgtcggatctcgaacagtcggaaccgcctcatcggatctcgtgagacccgttcactaccacaggaacagtcgggggaacggccttgtcggatctcgaacagtcggaaccgcctcatcggatctcgcccagcaggtgccaagctcaatgccagccacgagggcattggctcatcgagtgatgggaacggggacagcaaggcggccacagagagggtggtctcagccatggacacagtacggcggaagcatcccgagtgcagtgttctcatcctgaatcttgaaacagcacctccgtttttagaagaagcttccatgggccatgatgcccttggaaaagattgcagtggcatcttggagaacatttcccacaaaaataggttatggtttctgacggtgtctaaaacatttgagaagcaaaaggaagctccagccttcgacttctaa

SEQ ID NO: 142033 - DNA, 524 bp, Homo sapiens
atccccacagggtaatgggtgtcccgatctcgcgggggactctgtgatccgtgttcccctgaccctcctagtgcacaacttggccgggctcactgggctcctgcaccactgcctgtcaggtccgctgccagccccaagccccccaccagccatgagctcctccagaaaggaccacctcggcgccagcagctcagagcccctcccggtcatcattgtgggtaacggcccctctggtatctgcctgtcctacctgctctccggctacacaccctacacgaagccagatgccatccacccacaccccctgctgcagaggaagctcaccgaggccccgggggtctccatcctggaccaggacctggactacctgtccgaaggcctcgaaggccgatcccaaagccccgtggccctgctctttgatgcccttctacgcccagacacagactttgggggaaacatgaagtcggtcctcacctggaagcaccggaaggagcacgccatcccccacgtggttctgggccgga

SEQ ID NO: 142034 - DNA, 1806 bp, Homo sapiens
atgggcaaggacttcatgtctaaaacaccaaaagcaatggcaacaaaagccaaaattgacaaatgggatctaattaaactaaagagcttctgcacagcaaaagaaactaccatcagagtgaacagggaacctacaaaatgggagaaaattttcacaacctactcatctgacaaagggctaatatccagaatctacaatgtactcaaacaaatttacaagaaaaaaacaaacaaccccatcaaaaagtgggtgaaggacatgaacagacacttctcaaaagaagacatttatgcagccaaaaaacacatgaaaaaatgctcaccatcactggccatcggggaaatgcaaatcaaaaccacaaaaaaactaatgctgtactacgatgtgattcgcatctgtcatgacagccataaagagcttgaacaaaaactggcggccttcctggggatggaagatgcgattctctactcttcctgctttgatgctaacggtggcctgtttgaaacgcttctgggtgcggaagacgccattatctccgacgcactgaaccacgcgtctattattgatggtgtgcgtctgtgcaaagctaaacgctatcgctatgccaacaacgatatgcaggagctggaggccgcatacagacgatcaaccaggcctttatcgacaaggttatttagcttcaggtcgcgtgtactcaccgagttccgcgtttgtccctgcctcgttcacaccacttggggtggtaacctcatgcggttatccgcgcggagcctgtggcagcgagccgcagtcaatatacccaagctggaaggcataatcgaggagtacccctgctggtcggcgcgccatgctgacgaagtcaatctgtcaccgaatccaggcctcgtggatcgcattaacttcggtgcgcacaaagatatggcgctggaagatttccaccgcagcgcgctggcgattcagggctggctaccccgtttcattgaatttggtgcctgtagtgcggaaatggcaccagaagcggtactccacggattacgcccaattggtatggcttgcgaaggtgatatgttccgcgccactgcgggcgtaaacacgcataaaggcagcattttttctttagggctgctatgtgcggcaattggccgtttgcttcaactcaaccaaccggtaacgccaacaaccgtttgttctacggcggcaagtttctgccgtggcctgaccgatcgcgaactgcgtaccaataattcacaactgacggcaggtcaacggttgtaccaacagcttggccttaccggcgcacgcggtgaagccgaagcgggttatccactggtgatcaatcacgccttgccgcattacctcactctgctggatcaggggttagatcctgaactggcattgctcgataccttgctcctactgatggcgatcaacggcgataccaacgttgcatcgcgcggtggcgaggggggcctgcgctggctacagcgcgaggcgcaaacattattgcaaaaagggggcattcgaacccccgccgatctcgattatctccggcagttcgacagggatacctcgcagggatcctctagagtcgactgtagcgtgtgggagttatgccgggcaggccgaacagccggggttatggctgttgctgccaaaacgaaaaacgccggaaaatggcataaccacataatccggcgtttcgacattaatcctggcgatcgtctttatgatcaaggcggtcgcgctcatcatcctttcgctggtactcaccatcaaaagtattaccgccaccggtcccggcgctaa

SEQ ID NO: 142035 - DNA, 1977 bp, Homo sapiens
atgcctatgacagtccatacacaagcggcagtcgtggcaagtggacacaaagtgtggcacctctatgcgctggacggacgctcggtcaagggctattaccaaaacagcgaaagaccacagcttggcgctgcagatgcgctacacgccgtgtacatcctcagtcagcaggacctggactacctgtccgaaggcctcgaaggccgatcccaaagccccgtggccctgctctttgatgcccttctacgcccagacacagactttgggggaaacatgaagtcggtcctcactctgtttccagccctttacatccgttacgccgtcaagacttatgcagactgcccttgtatcaaaaaatcggcgctatacgatgtctgtagtagttgcaggcagataatcgatgagtacgccttgctgggctggcgcgccatgctgactgaagtcaatctgtcaccgaaaccaggcctcgtggatcgcattaactgcggtgcgcacaaagatatggcgctggaagatttccaccgcagcgcgctggcgattcagggctggctaccccgtttcattgaatttggtgcctgtagtgcggaaatggttttaggagtggtactccacggattacgcccaattggtatggcttgcgaaggtgatatgttccgcgccactgcgggcgtaaacacgcataaaggcagcattttttctttagggctgctatgtgcggcaattggccgtttgcttcaactcaaccaaccggtaacgccaacaaccgtttgttctacggcggcaagtttctgccgtggcctgaccgatcgcgaactgcgtaccaataattcacaactgacggcagcgggacccgcaacagcgtttagccccgaattgggccccacttcaaatggcgcccccaggtgtcccgcgtcggccgctcagggcacgagcggggctcagcgctcgcaacccactggaagcagcgaccggcatggcgaatccgttgccgatttatttgtcctacttcggacggccgtgtttccgctcaagtgcccagccgtacgcctcccgtatcacacttaccgcatagcgctgactgaggcactggacaacaacgacaaacacacaacccgcagccagacgcaacaccgcaaacagcgcataagcggaggacatccgcacacagcgcagcaccagaacaccgccacacagacgcaccaccaagaaaacaacaacaaacggaccacaggagccaagaaccacaaagcgaaacgcgcgacaacaacgcaaagaccacacacggaaacacgcgcaacacaaaaagaccaccacagcgcaaacgacgccacgccgaaacccaacacccccacgacccagagcacaataagccaccacaacaaagcgcagaccaggacaggaaacaggactagcccggaaccacaccccgccgcaaccggactcagcaaaccccaaagccccggcacaggcgaaccaccagacccacgggcaacaggcaacgcgcgcaccgaacgggcggcacacagacaacaacacagacggaccccggccgacacaccgcacagaaaaccaccgacacgaaccacggaaccacgggacaaccccgaaccaccaccaccagcacgccgcaaccacgcgacccacaccccaccccagccaaccactagcacacccacgccccacaccacagacaccaaccacccccgggcacccacctcacacctcccacacccccacccgccccaccaacacccgcagcagcacaccaacacacgccacccaccccacgcccccccccgcccccccaccacccccctccacaccacccaccgcacacccaccaccaccacccacacccaccccaccccccaaccacaacgacccccaccgccagcccaccccgcacccagcaccaagcacgagagctccgaccaacacacattcaacgtagaatcaacatcaaataagatagtcaagtga

SEQ ID NO: 142036 - DNA, 508 bp, Homo sapiens
ttaagggttaatgtgttcaatttatttttgcaaagtcaccagaaagactgaaaagatgagcatccacctccttttatgggatgggataggtgaggcagcagacagaagtgagggatgctgtgctcgtgaagattccttcctatagaaggaggattaagagtggggaagatgcagtcccaagcttagaggcatcattttcctcttgatgacgtcttctaccttttctagatagataattctccgcttaaatttcccagagaccttgttctgaagtctgctacagttggtactgatctgataggaaatgcttttaattgtttttccactttgaagaactggatgagattctgccaatgtgatgacacatattcggttagagtgctgtagtatacagtggtcctcacaaaattttcctttgacatccggtttgtaccagcgagtgaagtatcgatccacgagcgaaggcaccaccggctccgggcttcgggctcgggaaccacctcgtgcc

SEQ ID NO: 142037 - DNA, 1042 bp, Homo sapiens
  misc_feature (1)...(1042): n = a,t,c or g
aataccgcgcccgactatccgggtcgacaatgtcctcccggagggcggcggtggcggcgccggatttcggcatggttaccgagcccgaagccgcggagccggtggtgccttcgctcgtggatcgatacttcactcgctggtacaaaccggatgtcaaaggaaaattttgtgaggaccactgtatactacagcactctaaccgaatatgtgtcatcacattggcagaatctcatccagttcttcaaagtggaaaaacaattaaaagcatttcctatcagatcagtaccaactgtagcagacttcagaacaaggtctctgggaaatttaagcggggggcacagtttctaacagagcttgcacctctctgtaagatttactgctcagatggtgaagaatatactgtgtctagttgtgttagaggacgtttgatggaagtgaatgaaaacatcctccataagccatctattcttcaagaaaagccatcttactgaaggctacattgcagttgtgtttacccaaatttgaagaaagtaaaagcataacagaagggttactgacacaaaaacaatatgaagaagtcatggtgaaacgcattaatgccacaacagctacgtcatgaggattgacatcggaacaaaaagcaaagtgggattcttgttacctggcctaaaccatcagggtactaaaggagaagaaccagtatatgtaaagcatacctaacagccagccatatgcaggggaggcctagtgcttcacttagttttccctctctgtcttcataatgagccttggttcccatttgtctacagcctgccagatctggcctgcccatgtactcacactgttctcttgcatctctctaacaactggcatgcaaggcatgttttttctgattaaaaacaaacaaagctctttgaagaagatttagaaaatacagaagagtttttaagtagccaagtaaaaataatttacccatcatcccataatccaggaagtaaatacatttggcccttggagcaacataggtttggactgcnagggg

SEQ ID NO: 142038 - DNA, 755 bp, Homo sapiens
tcctgcacagctagagatcctttattaaaagcacactgttggtttctgctcagttctttattgattggtgtgccgttttctctggaagcctcttaagagaagaacacagtggcgcaggctgggtggagccgtccccccatggagcacaggcagacagaagtccccgccccagctgtgtggcctcaagccagccttccgctccttgaagctggtctccacacactgctggttccgtcaccccctcccagggaagcaggtctgagcagcttgtcctggctgtgtccatgtcagagcaacggcccaagtctgggtctgggggggaaggtgtcatggagccccctacgattcccagtcgtcctcgtcctcctctgcctgtggctgctgcggtggcggcagaggagggatggagtctgacacgcgggcaaaggctcctccgggcccctcaccagccccaggtcctttcccagagatgcctggagggaaaaggctgagtgagggtggttggtgggaaaccctggttcccccagcccccggagacttaaatacaggaagaaaaaggcaggacagaattacaaggtgctggcccagggcgggcagcggccctgcctcctacccttgcgcctcatgaccagcttgttgaagagatccgacatcaagtgcccaccttggctcgtggctctcactgcaacgggaaagccacagactggggtgaagagttcagtcacatgcgaccggtgactccctgtccgaattcc

SEQ ID NO: 142039 - DNA, 610 bp, Homo sapiens
cggacgcgtgggcttttcacaaaatggcgccgaaagcgaagaacgaagctcctgcccctcctaaagcttgaagccaaagcgaaaggcttttaaagggccaagaaaggcagtttttaaaaggtgtcccacagccaccaaaaagaagaagatcccgcacgttcaccccactttccgggcgggccgaagaccactgcggactccggagacagccccaaatatccctcgggaagagcgctcccctggagaaacaaggcttgaccacctatgcctatccatcaagtttcccgctgacccactgagtcctgcccatgaagaagatagaagacaaccaacacacttgtgttcattgtggatgttaaagccaacaagcaccagattaaacaggctgtgaagaagcttgtatgacatttgatgtggccaaggtcaacacccctggattcggcctgatggagagaagaatggcatatgttccgacttggctcctggattacgatgcctttggatgttgccaacaaaattgggattatctaaacttgagtccagcttgcctaatttctgaatatatatatatatatatatctttttcacccataaaaagaaaaatagaaaa

SEQ ID NO: 142040 - DNA, 407 bp, Homo sapiens
ttttctcattaataatttttattttgataagatgttgaagtgatattttggataatgctaacattttaggtgaaataaaactaatttcacctgtttctttgtaacctttttttttttttgagatggagtctccctctgtcgcccaggctgtgttttctctggtcttcaggtctcctcactgcggcgggatccaggcgcatctgttcaatctctagagagatttgttcaaaatctggacctgaccccggggtagcagttgaggactcagaggtggaatttttgtgggcacccacatggtagtcgatccgctgtcctccggaagacggtcaccctttgggacctggaaatttttttttcaggtggcactcccccctacaagctggctgtccttccgggggagcacacag

SEQ ID NO: 142041 - DNA, 469 bp, Homo sapiens
  misc_feature (1)...(469): n = a,t,c or g
gtggaaccaaggctgagtgattaaaggaaagggagagtctaaaaacagggttagtaaaaaccaggttggccactacattccccacttgtgtttttggggaatcaaatcattgattcctcagttataacaagggggttatattgagtcttaagatacataagtttgacagaagctatgcattgttttacaaaattaagnnnnnnnnnnnnnnnnnnnnnnnnnnnnnnnnnnnnnnnnnnnnnnnnnnnnnnnnnnnnnnnnnnnnnnnnnnnnnnnnnnnnnnnnnnnnnnnnnnnnnnnnnnnnnnnnnnnnnnnnnnnnnnnnnnnnnngccatccaccttcagagccgttggcatcgtgatgacggtgtgaggtctcttccaagcaggagggagtccttctctctggaactgaccccggggtcagcagttgaggactcagactcgtgcggaattcctgcagagagg

SEQ ID NO: 142042 - DNA, 1642 bp, Homo sapiens
atgcaccctagtcatacctccaaccagacctcacccgcgtggaatcattttagcaacgtacaaccaatatcaacacccacatgcccgatcatcgctgagttcctgattcgcactcctaatcctcgtgtccctggcgcgcgtacagttggaattgcactgaactgtagcacacccagttggtgtccgctgaagaactgtttagtgtgggagaaaaaaactccacacattggtggcctccaggtgcaaagtgggaagtgtgagtcctcagtcttgggctattcggccacgtgcctgccggacatgggacgctggagggtcagcagcgtggagtcctggccttttgcgtccacgggtgggaaattggccattgccacggcgggaactgggactcaggctgccccccggccgtttctcatccgtccaccggacttcgtcgggcgctcgcactggcgctgatgtagtttcctggacctctgacccgtattgtctccagattaaaggtacgacatttgggagggcccagcgagaaacgtcaccggggagaaacgttaccggtcgagagccggggcccgctgtgtgctcccccggaaggacagccagctttgtaggggggagtgccaccttgaaaaaaaaattttccagggtccccaaagggtgaccgtgcttccggaggacagcggattcgactaccatgtgggttgcccacaaaaattccacctctgagtccttcaacttgctgaccccggggtcagtttccagagagaaggactccctcctgcttggaagagacctcacaccgtcatcacgatgccaacggctctgaaggtggatggcattcctgcgtggattcatcactcccgcatcaaaaaggccaacagagcccaactagaaacatgggtccccagggctgggtcaggccccttaaaactgcacctaagttgggtgaagccattagattaattctttttcttaattttgtaaaacaatgcatagcttctgtcaaacttatgtatcttaagactcaatatagacccccttgttataactgaggaatcaatgatttgattcccccaaaaaacaccaagtgggaatgtagtgtccaacctggtttttactaaccctgtttttagactctcccttttaccttaatcacctagtcttgtttccacctgaatcgactctaccttagctaagagcgcccagatggactccatcttggctctttcaactggcagccgcttccttcaaggacttaacttgtgcaagctgactcccagcacatcccaagaatgcaattaactgataagatactgtggcaagctatatccgcagttcccaggaattcgtcccattaataacgcccgattaataacgcccaaagccccgcgtctatcaccttgtaatagtcttaaagccactgcacctggaactgtttactttcctgtaaccatttgtccttttaacattttttgttagcctactttatttctgtaaaattgttttaactagaccccccctctcctttttaaaccaaagtataaaagcaaatctagccccttccttgggcgcgagagaattttgagcattagccgtctcttggccaccagctaaataaacggattcttcatgtgtctcaaaaaaa

SEQ ID NO: 142043 - DNA, 824 bp, Homo sapiens; identical to SEQ ID NO: 131059

SEQ ID NO: 142044 - DNA, 2623 bp, Homo sapiens
  misc_feature (1)...(2623): n = a,t,c or g
cttcctcggccgagccgggccgcgccgtcgctgtcgccgccgcgcgcggattctgcttctcagaagatgcgctatgatagatactctaacgccaaggtcagctgctggtacaagtacctccttttcagctacaacatcatcttctggttggctggagttgtcttccttggagtcgggctgtgggcatggagcgaaaagggtgtgctgtccgacctcaccaaagtgacccggatgcatggaatcgaccctgtggtgctggtcctgatggtgggcgtggtgatgttcaccctggggttcgccggctgcgtgggggctctgcgggagaatatctgcttgctcaactttttctgtggcaccatcgtgctcatcttcttcctggagctggctgtggccgagctggccttcctgttccaggactgggtgagggaccggttccgggagttcttcgagagcaacatcaagtcctaccgggacgatatcgatctgcaaaacctcatcgactcccttcagaaagctaaccagtgctgtggcgcatatggccctgaagactgggacctcaacgtctacttcaattgcagcggtgccagctacagccgagagaagtgcggggtccccttctcctgctgcgtgccagatcctgcgcaaaaagttgtgaacacacagtgtggatatgatgtcaggattcagctgaagagcaagtgggatgagtccatcttcacgaaaggctgcatccaggcgctggaaagctggctcccgcggaacatttacattgtggctggcgtcttcatcgccatctcgctgttgcagatatttggcatcttcctggcaaggacgctgatctcagacatcgaggcagtgaaggccggccatcacttctgaggagcagagttgagggagccgagctgagccacgctgggaggccagagcctttctctgccatcagccctacgtccagagggagaggagccgacacccccagagccagtgccccatcttaagcatcagcgtggacgtgacctctctgtttcttgcttgctggtgctgaagaccaagggtcccccttgttacctgcccaaacttgtgactgcatccctctggagtctacccagagacagagaatgtgtctttatgtgggagtggtgactctgaaagacagagagggctcctgtgggttgccagggagggctttgacttcaggaccccctgcagcttaagcatgtctgcaagacaccctgggcccctctccactggcatccagacatctgctttgggtcatccacatctgtgggtgggccgtgggtagagggacccacaggtgtggacagggcatctctctccatcaagcaaagcagcatggggggccttgcccgtaaacgggaggcggacgtggccccgctgggcctctgagtgccagcgcagtctgctgggacatgcacatatcaggggttgtttgcaggatcctcagccatgttcaagtgaagtaagcctgagccagtgcgtggactggtgccacgggagtgccttgtccactagtacccctgtgtccacctagctattctcctggcgccggaactgcctctggtcttgatagcattaagccctgatggcgccggtggcgcggtgggcatggttcttcactgagagccggctctccttttcttaaagtgtgtaaatagtttatttataggggtaagaatgttctcaaaaccatttcacttcctcttcctctcctccagcattctcctctgagcagccttagatagtgttccatggctgggagccgaccctttgagtccccgggggtgtcttaagaaccagcccacaacagcctctctttctcctccacatactgcagcctccctccatgcatcccacatacaagcactcaccccactccccagcggggactgactgtcttctggtcttggagctactgaaattgtcacccagaatgtgaatcctgacccttcccactgcatacccagggagccccagcccaagatggccatcctgaaactgttggccagggctcctcttgtggccatgtacccagggctggctggcctgccattttgcctctccccggagaacagccgttcttctggcaaccacacccggtgcctgagccacaaccccaggctggcagctgcttcagaagctccagggcatttttgttttctggtgaccgcccctaatggggatattcggtgattcattgggtccacccttgctggcagggattttctgggggctgctcttggaaatgaagtcttaaagtactggataactcccctggggattagctggggcatttgtctagctgggctactaatctaacactttggccatagctcagaccacttctcatcgttcagggatggactgcaaccttaatttacttgccggagtgtacattctagtgtggtgtatactggtggctgttgatgatgannnnnnnnnnnnnnnnnacacaattttttgtaaactaggaaaaaaatgcttgtgtttttcggaagggggatgcttttttttgactgccaaactcttttagggaaaatatttttatattaaggctggtttggtcatttttggtgggggtcactattgaaatattgctaacccc

SEQ ID NO: 142045 - DNA, 1104 bp, Homo sapiens
ttaacctcggtcccttccccagtgcttcccgttccggattaaaaagcgcaaggcccgcctcgctcttcctgcagcaatttgcaaacgggtacgctctcggaagctgctacgggttcggtcaccttcctcttcggcgtctggcccggcgctgtccttccagtcccgcgcctcggggtttggccgtccagaggccgggggcttgggggcttggggcttggaccttcgtgcggcctgtgtttcctcctcctcctcctcctcccgccgctcagcttttatccctgcctgctctctgcagggagtcctgagctggggccaggagccccgggccgcggcgagctcactttcagcagcagggctggcaccgacaatttgcactagacgcagcgttagctgcaggtcgggcattcctgggtcacgtctttcattcacctttaacactggcgagccccgaggctgggcgctgggagaggccgcccgatgcgatgaggccgcgcggagccagggtctcgcaggaaagggcagtgggcggcagggcggggtcgtggcgctgctgaccggtgttccctcctccccgcagcgtatctggtgcaggccgtgagagcagcgggcaagtgcgatgcggtcttcaagggcttttcggactgtttgctcaagctgggcgacagcatggccaactacccgcagggccgcaagaggaggacagagggtggggagtcctcgaaggttggcagaggtgggcaccacgccttccccgcagttccggccttggaggctggcgctacatcctgaaagctgtggggaggaagccccatggggcccaagcccacggaaaagactggggagggagaaacaggagggacccaacgcgcaggcctgggacacttggattcgcaagagcagatgaaggctacgaggccggccccaggtgctcggccactaacactcaccgaccccggggagaagagaggcaggcaggagtctccaggccgaatctgagccgggaactgtggagagcaaggaggatccaggcaggttgtgggaagaaggaagaggaagtggggaacagaagagaggaaagcacgaaatcgtcgacccgggaattcc

SEQ ID NO: 142046 - DNA, 785 bp, Homo sapiens
ctctctctctttctgtctcttcctcgctccctctctttctctcctccctctgccttcccagtgcataaagtctctgtcgctcccggaacttgttggcaatgcctattttttggctttcccccgcgttctctaaactaactatttaaaggtctgcggtcgcaaatggtttgactaaacgtaggatgggacttaagttgaacggcagatatatttcactgatcctcgcggtgcaaatagcgtatctgggtgcaggccgtgagagcagcgggcaagtgcgatgcgggtcttcaagggcttttccggactgttttgctcaagcttgggcgacacaatggcccaactacccgcagggcctggggacgacaagacgaacatcaagaccgtgttgcacatactggggagggatttcccacagctgcacgggtcacagcccttacggattgccaggaaggggcgaaaaatatgtgggataaactgagaaaagaatccaaaaacctcaacatccaaggcagcttattcgaactttgcggcaacggcaacggggcggcggggtccctgctcccggggttcccggtgctcctggtgtctctctcggcagctttaacgacctggctttccttttgagggtggggccagctccccccgcgcgcccacccacactcactccatgctcccggaaatcgagaggaagatccattagttctttggggacgttgtgattttctgtgatgctgaaaaccctcatataggattgtgggaaaaaaaaaaaaaaaaaaaaaaaaaaa

SEQ ID NO: 142047 - DNA, 579 bp, Homo sapiens
ccgcagtcctgtaccatggatgacagtcttctgcctctggggtgcttgctagaagatcctgaagctccttggccagacagctggaaggaaggctggcctttgctctggaggaccactcggcttcactgatgtggtgcagtttccccctccttttcttgttcaagtggtgtcaagccccacagctgacagaagggggtcctccagaggtgtgagccagtctcctcctccttgcctttcttgcagaactggccagccttaaagcaggcctccagaaatccagggaatattcgtgctcctcctttatttcaagcctctcctctacagatgctcactgtgtcctgtcagaatacgccagacctctctctagcgcccggctccgaacggatcgtctcctcgttgccaggcttcagaggcccagagcccaggtcatcggcctccccctcctctcttcagctctcctctggctgctcttcagttggattcccaccgctttcccagcgatccgaatggcaaagacgagtcccgccccccacgcctctgcaccaaactgggcaggggctgcgcaggatgcggcaagaa

SEQ ID NO: 142048 - DNA, 1118 bp, Homo sapiens
atgctctctttctccaactgtcccctgaattgccccctcccccttctcaccaacctccagaggtgtgagccagtctcctcctccttgcctttcttgcagaactggccagccttaaagcaggcctatggacaaacagatgaaaaaatgctcactgtgtcctgtcagaatacgccagacctaccgcgcagacagactttgacatcaacctggagtctgtgggaagggacagcacccaggacacggggccccacaggcccctttccggaatcagggcccggagcagcgaacgcgacccacctcccacgggctaggcacagagctgggacgctggcccacgagggcccccccaggcgccccccaactgcctcccgggcgccccccaacacggctcccgtttggccatttctcccgcaggagcctcccccacagccgtctctcggtaccgaaaccgtcgagggctgcgcgcgggcgcctgcaaagctggctgggaagcggtcagcgcggttctcctccagacgatctgacggtgcctctggagccagcccctcagcccttgctctcctctggctgctcttcagttggattcccaccgctttcccagcgatccgaatggcaaagacgagtcccgccccccacgcctctgcaccaaactgggcaggggctgcgcaggatgcggcaagaaccgctctctccgcgagggtgtcgggaaggggggcggagggatacggcgcgaaagtgcaggacgccccccctcacagaaccaccatagttccgacccagagctgctccagctgtggctgaaaggggccaacatacagcttgggctgtggcttcagagggtggaagccgcaagccttggcagcttccacgtggtgttgagcatgcaggtgtacagaagtcaagaactgaggtttgggaacctctgcctatatttcagaagatgtaagaaacgcttggatgcccagactaactgtaaagctataggaatcaaagacagtatggtagcagtgaaaggaaggacaacagatagagagcaatgcaacagaacagagagcccagaaatagatccatataaatatggtcaactgatctttgacaaaggagcaaaggcaatataa

SEQ ID NO: 142049 - DNA, 389 bp, Homo sapiens
  misc_feature (1)...(389): n = a,t,c or g
cggacgcgggggcaaagacatcctcatccagtatgaccggaccctgctggtagctgaccctcgtcgctgcgagtccaaaaagtttggaggccctggtgcccgcgctcgctaccagaaatcctaccgataagcccatcgtgactcaaaactcacttgtataataaacagtttttgagggnnnnnnnnnnnnnnnnnnnnnnnnnnnnnnnnnnnnnnnnnnnnnnnnnnnnnnnccttttaaaaaaatccctgggggggccaaaattaacgggggggggaaaaaaaannnnnnnnnncttttggggggggtaaaaaaaacccctggggggtttttgggaaaaaaccctttttttgggggggggaaatatggggcacaccccccccagaaa

SEQ ID NO: 142050 - DNA, 976 bp, Homo sapiens
tcggaatctcccgggtcgacgatttcgtggcagatccacagctgagggacccccggaagtctagaaatgggaccattggaatttagagatgtggccatacaattctgtctggaggagtggcattgcctggacactgcacagaagaatttatatagggatgtgatgttagagaactacaaacacctggtcttacttggtattgttgtcactaagccagacctgatcacctgtctggagcaaggaaaaaaacccttcactgtgaagagacatgagatgattgccaaatccccagcgccgggcggtgaggttctctagtccacgctcgcaaccatgccgtccaagggcccgctgcaatcggtgcaagtcttcggacgccaagaagacagcgacagctgtgggcgcactgcaaacgcggcaaatggttctccatcaagttgaacgggcgggcccctggaaaatgattgaagccgcgcacgcctacagtacaaactgctggatgcccaagttctggcttcctcggcaatggagcgatttgctgggtgtagacatcccgtgtcccgtgtaaaagggtgggtggtccacgtggccccagatttattgctatcctgtcagtcccatctcccaaaagcccctggtgggcctattacccagaaatatgtgggatggagggtttcccaaggaagggagatccaaagacaatccttcatccagtatgaccggaccctgctgggtagctgaacccttcgttcgctgcgagttccaaaaagtttggaggctcctggtgccccgcgctcgctaccaggaaatcctaccgattaagcccatcgtgactcaaaactcacttggattataaaccagttttttgaggggttttaaagtttcaagaactgtgtgtggccttatgtgttggtattggatgtttaaccagacagaaatcagtaaacatcctggacctataaaaaaaaaataataaata

SEQ ID NO: 142051 - DNA, 151 bp, Homo sapiens
tgggttcaaggtgccagaaatttgatctaatgccgggttacgtcatgtgtgcagaacaagctgccagagtggccgagccaggagctgtcatgtcggattacacactccttgggtctcctaagtgccttggcatccctggggcatcagatgg

SEQ ID NO: 142052 - DNA, 1176 bp, Homo sapiens
tcagtctccctctcggaaggcgatcggagactgacatcggcccatccaggagttggagggatccatttgaaagtgattgtttcccctcccgctctccagccgaacagttgggttggcgtcgtcttgcaggtttaggaatcccagctctgccaggccggctggtcttaacctctgctcttcattcactgtggtgcacccacacccagccaaggaaagcacgcgcgagaaatccccgaggctcggccagcccccggggtgccctcttccgctaccgccgcgttccgactctgctgggggacctgccggaagacgcgaagagccaaacttttctttgaggttttcgaggcaagaccgcttcgaaagccggcgcagctgccgcttaaccagttccaggacaccgacaaggctgggttgcggctccggatccccacccttctcggcgcaccgcccggtaccgcagcacttacgactcctctgagatttctgggggtcgccccggtggagatgttgacgctggtgtttctggtgctctggatgtgtgtgttcagccaggacccgggctccaaggccgtcgccgaccgctacgctgtctactggaacagcagcaaccccagattccagaggggtgactaccatattgatgtctgtatcaatgactacctggatgttttctgccctcactatgaggactccgtcccagaagataagactgagcgctatgtcctctacatggtgaactttgatggctacagtgcctgcgaccacacttccaaagggttcaagagatgggaatgtaaccggcctcactctccaaatggaccgctgaagttctctgaaaaattccagctcttcactcccttttctctaggatttgaattcaggccaggccgagaatatttctacatctcctctgcaatcccagataatggaagaaggtcctgtctaaagctcaaagtctttgtgagaccaacaaatagctgtatgaaaactataggtgttcatgatcgtgttttcgatgttaacgacaaagtagaaaattcattagaaccagcagatgacaccgtacatgagtcagccgagccatcccgcggcgagaacgcggcacaaacaccaaggatacccagccgccttttggcaatcctactgttcctcctggcgatgcttttgacattatag

SEQ ID NO: 142053 - DNA, 2041 bp, Homo sapiens
atgggatcagggacctgcttaatgaagcactctggctgcggttggtggaggaggtgcattgcactgggcggtggggagctcactcgtcgaaatgcctggattcttcagagccagcaaggggaaagcttaagtccactatctgcagccactgcagccctggctggggttgctgaaattcccaaagggggccctgcgtgcactgcttcctacagaggctctgtctcgtggttgacaaccttgattgattatacaagcactggggagcttttccaaatcctgattcccaggctataccccaatcgagtaaatcagattctctggggagaggaaccagacatcagtatatttagagtttccagacggacgttgtgcagactcaggcagctcactcggggctgggcagcagacagtgattatcgtcaccccctgctttcatccattacggcgggtgttagcagtggcgggtcgggggctccggcgctgggccaggcgtgatgttgcacgtggagatgttcacgctggtgtttctggtgctctggatgtgtgtgttcagccaggacccgggctccaaggccgtcgccgaccgttacgctgtctactggaacagcagcaaccccagtgggttcaaggtgccagaaagtttgatctaatgccgggttacgtcatgtgtgcagaacaagctgccagagttggccgagccaggaggtgggagcccttcgcccgcggcctggcgatgtgctgccggaggaacgcgcgcgattacctggaaccgatttgtaggcgtcccgaagcccgccgggtatgcgggagactagaggtgggcgccgggggcggtcatagtgcgcgtgctggacaccggccagtcgcagacgtcccgtgttttcggaccctggaagtggagtggggaggttatccagagtgcccggcggggtcctccgggtctggagcagttccgaacctttattgcttcccggcctgtgcacagaagtcggccccgctaggcccataccgcactgctttctctgggacagaggctagcttccagctgtgtgccggtctcggtgccctcctagcctcccctcagcatgcaggcaagagagggattccctgcttgaataatgtcagcgcagatgaagatgggaagatttccccacaagcagtccgccggttacagaaccaggagggagttccccctatcccgctagtccaagatagtcttactcaggtagccgcccaagtcctaaatgaaccgctgaacaggagtggagatattcctgaaagtttggttcaaaaaacaagagtctcctggagctgtcatgtcggattacacactctcttgggtctcctaagtgccttggcatccctggggcatcagatgggcaaaacaagctacttctcacataacgggttcctggttttcaatgtcaaaccaccacgaatgaaggaaatcttcccccagcggttcagcaggacacagagctggctgcctctggttgcaccaacatgcaacccattaactgcttttcagttggcagtatttgaatttgtagattttttcaccacttttcaatgtcttgcctgcaaggatggcgaacagaatttaatatttcatggagcccaaagcacaaagcatgttcaaattcaatacaagaaaatgctttatcacatcctttatagattaataatccaaaacggtgagaaacttcaggaagccatgacaagttttaaccaaatgacatgcctgaggggcgaatccttactgaaagtgaccagtaacaagaacacagaaaacaaacagagagatcattcagcttcaccagaggaatacatggaggcagccagccctgtcaatttggaagaggctaatgaaacattatctgcagcagtggccatgtggcacagggaatcttgcaagagggagagtgcagtgactgtattagaactcagtgctgccctggtcacagcagaaaggaacatgggcagagaatttgggccagccccaaccagaggcaaactgcccatcccagcagtcagaacctga

SEQ ID NO: 142054 - DNA, 1434 bp, Homo sapiens
ttagaacatttgtccccgtgtgactcgatacgacacagcaggactcgcgccactgcggccataagatccaggtgttactcgaagtacgcccagtgaattcgggatcatcgcgtcaacggtgatggcgtcagcaggctgtacgccgccaaccagcaccgtacctgccagtaaaatgtaggagagcgttaacagcagcatcagcgttgaagtgacggaggtaattggccccaacattttcgccccgttggtggaaacccaggtggagaaggcgaacagcaccatactgataatggtggtggcaaccggcgtcataatatattcgtatccgaggaaggcatacgaagcataagcaataacgcgcggcaacagtgaggtgaaaaagaacaggtttacgaaccagtaggtataggcagtaataaatgcccaacgtccgcccagcgaactttttacccacgcgtagacaccggcttctgagtttttatttaacgaaacaaattctgcgatgatcagacagaagggaataaaataaaaaatcgtcgcgaggaaaaacatcggtgccgaggccagtccaagctcaatattattattgataacgttgttaaagctgtaaacggcggcaaaagtcagcgagagcaagccgaatttgccgattgtattacgtttggtatcagacataacacatctccgaaaatgagtagggtacgcggtggcggcaaactccttgggccgtgctggggatggccgaggcctcttcttcacttcaatccagttctcagaatccaggtcaggcaggctggcagacaggcccttgggtagtgtctttaggttgctgacctcctctgttttggttggcactggggtgactgcacgaggagagccaggtgccgactctgtctccttttggtagtgctgacggggaacaaattcagggcagttgagaagctgggagaaatcagtctgtgaataatccactattgggggaagaggccacttttctggttcctccctcctacgaactttctcatcaacgatctccaacaagccccagtaacggctgtccgcgctgttgtcgcggttgtcgcccatcatgaagtattgtcccggaggaacaatccaggttgccagttgttgccctggctgctggtaatacatccccacctgatcctgcgcaatcggcactgtcagaatgcggtgcgtcacatcacccagtgtctctttacgctcggaaagacgaattccattttctttggtttcgtttttcggcacttcaaagaatccgctggtcgcttccccaccattacggcgtgagaaggtctgaacgaaatcgctcggttccacgtttgagtaggtgaccggcagcgcgttttcacacgcctggccggaactgcatcccggttgaatcgtcagctcgcgcgcttgactgccgtaaaacat

SEQ ID NO: 142055 - DNA, 2268 bp, Homo sapiens; identical to SEQ ID NO: 139401

SEQ ID NO: 142056 - DNA, 639 bp, Homo sapiens
atggagagagacctaaacatcgttgtccacgtccagcattatgagaacatggacacgagaacccccataaataatcttccccccatgaccagagataacaaacagctgacccagaaggagacaattgatcacaatgctgcccaacagccaattagattcccctcaggaagctgtggctcagaggttaagacctttgtgggagatcacatggacagcaatgaccccaccagggctggatttagacgcccaactcctaaccccggcctcttcctccactctgtgtccgactccacttcagcagcccttgcaccaattacgacacgccgctttggctcaacaccggcaaagccccccggccgcaaggacgaccccttgcacgaccccaccaaggacaagaccaacctgatcgtctacatcatctgcggggtggtggccgtcatggtgctcgtgggcatcttcaccaagctggggctggagaaagcgcaccggccccaaagggagcacatgtccagcttgtcagcaaacagcttggtggtgtggctgcagaagcccacgtggacagttctggcctttgggtatcaccaggtcccaggcataattagtataaatcaaaatcctctagactatgacaggaaaatg

SEQ ID NO: 142057 - DNA, 2415 bp, Homo sapiens
  misc_feature (1)...(2415): n = a,t,c or g
ttactgatagtcatcagcaagtccgctactaaataacgtttctgcattttcagcggtagcaacagcatcctgcacatcctgccgtttcaaatctaacactcgtaatttaccctttacttcggcgacagattcgattcgcctgtaagcatcagaatgatgttcggcatatagcgcaagtccttccagtttgggcaaagcatcagccagatgtaggctatgtggatctaccangtccacaaccattttgccatcctgttcggcaaagaacaggaaatcgggacgaacaatcttgtactgttcagcttcaacataagcgattcccagtgacgactgccctgtgtactgtggattacgataccagaaagcaaatccttcacgtttggtttcgatctcaaaaaccttggtttcccaatggttcaacagagccggatagttcccgctttcgtcacacaacaaatggtgtttccagactggaaggtcagcttccttttcaccttcacgcaccctggtcatttcaaacttgttcgccggcctgaccagatccacatcctgcggttcggtactcatttcgacgatttgacgataggcctctttacgctcatctttcaacgacttgatttgcggtgtgtactcggccagccacgccttcgccagtctatcggcctcgccatcgaagtaatcctgcacctccatcaccagccccatgccagcaacggtaacacgagcctccatgattgcttccagatattcctctgcatcctcttctcgatccgcaggggatcctatagcagcccagcgatccggttcgataacgtgatagagccataatccttgtcgttgctccgggccaaaaggttcgcaaattcgcatatgacgcagaggaacgcctgcctgatacattaggttatacagtgggttgcagagactttgatgatttgcataccaggtccagatatcagccactttccagtcgtaaatggggtaaatgtaccagctatgaccgcctggtgcggccgtagtccagggtttatcgtcggcaaaacgttgtttatttaaactggcgatggcgacaaaacggttgtaggactcatccgcacggatgccgatcatcatcgccgccggacgtttttgtgaaaaccattcggcaaactcacgtacaaattgttcgaaggtcatgcctggctggtaaaagcagaaaaagtcagggtcggttatcgcatcttggggaggttgacgtacccattcgacatcaggttcccagcactgccattcgggttggtattgtgaaagggaattttgcgtcgtaagcgggagcgcatcccagtaaaactcttcgatgacatcggtgtacaactcgcgcagggactgaacatagttaatggtgcaagagaattgcgcttcccagtcgataaacaaaacgcagatttttttgcccatttgtcgggcaagttcggctgtcagatgcagcattaaaccagagtctttgccgccagaaaatgagacacaaacgcggggtagggtgttgagtgtccaggtaatacgctctcgtgcagcttccagaatattgagcggaagaggaattttataaatagacatatttttcagtgtctgctttgagaataaagctgatgggctctgaagggactgccctccatcactcagtccttccatcacccgctccgcaaatgacaaccttgcaccgaccggaatatcagcatgaacaggctcgggcggtactttgcgatatttatccagcagatggatctggatcctgcgcagcgtgtcaccattgaggcgatagaaacggaagtagagaatcagcgttaccatgaaaaacagagttggtagagcaatcataataaactgcatacctaatagggcttgcgtagactgttcaacattcggtacatagccaatcatccataacacaaccgcaatgaaaaaagccgcaaaggctgaaccgcccttcaccaccatagtctgcacggagtaagcgatactttcacagcgtacgtgcagtttatgattcaccgtaatcaacgatatctgtcccggaccgcgtgcacacgggtccaggatatccatggaaaactgtttactggatccgctattgccaaccgtttccaggacgctatggccataccgttcctgggaacgcaaggcaaacgtgttcctcgaaacggcatggccataccgtttcctgggaaccgcaatgtcatagcgggtgcgttcatcccgcaccgccaacacctcgggcaaattcaactcaatccagtccgccagtgcagcaaccttttcgctcacctgctcgcccagcggagtgaggctatattccacatgcggcggcaccaccggatacgcgatacggttaagaaaaccatcctgttctaacgcctgtaacgactgcgcaagcat

SEQ ID NO: 142058 - DNA, 1569 bp, Homo sapiens
atgccatccagcgcattgagcgccatacggataaaaagcacgatgggcaatagcaaaaagaggatgggttgtgccgccaacatcaacagcaatccgtggacgctggatacacagctgcgccagcaggccggaacagaccggagcagcaagcagagtgcagtggagcagagtgaagcaggaagagcagccacaaatgacagcataaccagcctgctgccccagcgccgttgggccgatgtcgatgtgaatggcaagctgggcacggacaagcccgggccgttaacgaaacatgctggtctgatgtggtctgtggtctgtgaatgtatcttcttctcggttaatgcctttgtgacgaggagtatggggcacaatatacacttttttctgcgggccgttggccacaacaaagactattatttcggtgcccgtgttttctcccctttccacgtgggggaaatcctgaaggggttcccactccgatctgcccgtgacaacggctttcgggtaaacgtacagaccgtccaccgtactggcctacaccggccgacctgcccgtgggatacctggaagcaggcgtttgcgatggcgcatttcaatccggacatcgccaaagagaatatccgcgcggtcttctcctggcagatccagcctggcgatagcgtgcgtccgcaggatgtgggctttgtccccgacctgatagcgtggaaccttagccccgagcgtggtggcgatggcggcaactggaacgaacgtaataccaaacccagccttgccgcctggtcggtgatggaagtgtataacgtcacccaagataaaacctgggtggcagagatgtacccgaaactggtggcctatcacgactggtggttacgtaaccgcgatcacaacggcaacggcgtgccggaatatggcgcgacccgcgacaaagcccacaacactgagagcggcgagatgctgtttacggtgaaaaaaggcgataaagaagagacgcagtctgggctgaacaactacgcccgcgtggtggagaaaggccagtacgacagtctggaaattccggcacaggttgctgcatcgtgggaatcggggcgtgatgatgccgccgtctttgggtttatcgacaaagaacagttggataaatatgtcgctaatggcggcaaacgtagcgactggacggtgaaattcgccgaaaaccgcagtcaggacggaacgttgctgggctactcgctattgcaggagtcggtggatcaggccagctatatgtacagcgataaccattatctggcggagatggcaaccatcctcggtaagccagaagaggccaaacgctatcgccagttggcacagcagctcgcggactacatcaacacctcacggcagtctctggctgggcttcggggagcccacatgtctgatcggcagggcttggctggccaggcggtgggcaccagcgtgatgtctggagacctggggtcgtccagctcaggaggccatctggagctgccgctgcagcctgcagagtgtaaggtggcgtttgttaccaagacctgtgggtgttctggggcttcctga

SEQ ID NO: 142059 - DNA, 1392 bp, Homo sapiens
ttaatccgtcgaggattgcgcttttttctgcgctttaatttcttggcggcgcatgcgaaagaagtcactgagcaacgccgcgcactcatccgccagtattcctccgtaaatttccactcggtgattcatacccggatgatgcagcacatccattaaagatcccgcagcgccagttttcgcgtcacgcgcaccaaagaccacgcgaccaatgcgactgtggatcatcgctccggcacacattacacatggttcaagcgtgacatacaacgtggcgtcgatcagacgataattttgcatcaccagaccaccctgccgcagggccatgatttctgcatgtgcggtgggatcatggcgaccaatcgggcggttccagccttcgccgattacccgattgttatgcactaataccgcgccgaccggcacttcccgctcatcccaggcacgtttcgccagcgtcagcgcgtgacgcatccagtattcgtggctaaattcgacgcgcggggttactcgccaacgatgctgacagaaataaagcagcggattgtcctgattactgtcgctatagccactgtacagccgcagcggagtgccgattttgcgctccagttgtgcgaccttttcatgtcccagacaacgcatcgtcaatacccaaccaccatagccacgctgaatttggctggcgataagattaacccgcggcagccagggcgtatcgaaataaaccgcttcaaccagcggctgcggagagccggtaatcaaccagatatcagcatcggaacttaacaggtaggtggttaatcgctcctgaaccagagccagtccaagctcaatattattattgataacgttgttaaagctgtaaacggcggcaaaagtcagcgagagcaagccgaatttgccgattgtattacgtttggtatcagacataacacatctccgaaaatgagtagggtagcggtggcgcaaactccttttgccgccgtagttgttatttgttatggaaatacacatcttcgatggtgactttgagaaccacttttttgaccgcgttattgcagataaaccgatacgcttcatggatatcgcaaataacgatttgcccttcgtggacctcaacggtttctccgcagcctgtaatgtctctttcggcgcatattcaattttttgctgcccttgcaggtagtaatgcacttcaaaatagcgtcgatgcccggtaaatagcgcatcggtcgcggagtctgtctccacgcggtaagtcaatgagtcaccgatggagtgggcgacgccaggctgaatgttgtcgatattttcaatcgcttcaacgcagcgttgccacttcttgccagaggcgtaaatctggcggaactgttctaagttatcgatgatcctcat

SEQ ID NO: 142060 - DNA, 3111 bp, Homo sapiens; identical to SEQ ID NO: 139404

SEQ ID NO: 142061 - DNA, 1896 bp, Homo sapiens
  misc_feature (1)...(1896): n = a,t,c or g
ctttttgactggctggtcagccagaacgaactcaaagctaacccggcgaaaggtgtttcggcaccgaaagcgccgcgtcatctgccgaaaaacatcgacgtcgacgatatgaatcggctgctggatattgatatcaatgatcccctcgctgtacgcgaccgtgcaatgctggaagtgatgtacggcgcgggtctgcgtctttctgagctggtggggctggatattaaacacctcgacctggagtctggtgaagtgtgggttatggggaaaggcagcaaagagcgccgcctgccgattggtcgcaacgctgtggcgtggattgagcactggcttgatttgcgcgacctgtttggtagcgaagacgacgcgctttttctgtcgaaactgggcaagcgtatctccgcgcgtaatgtgcagaaacgctttgccgaatggggcataaaacaagggctgaataatcacgttcatccgcataaattacgtcactcgttcgccacgcatatgctggagtcgagcggcgatcttcgtgcgagaggcgcttacctttgtgccaaattattatccggggctgcgcaggttccagaatggagatctgcattcgcctggtttgcccgctgtgccgaacaggcaaggcaaaaccagtacttacaggtcagctcttgcgtacccgccctggaaggctgcgatgttaacggtgccagttttacccttgaacagatgctcgcctggcgggaccatccgcaggttaccggccttgcagaaatgatggactaccctggcgtaattagcgggcagaatgcgctgctcgataaactggatgcatttcgccacctgacgctggacggtcactgcccgggtttgggtggtaaagaacttaacgcctatattactgcgggtattgaaaactgccacgaaagttatcagctggaagaaggacgccggaaattacaactcggcatgtcgttgatgatccgcgaagggtccgctgcccgcaatctcaacgcgctggcaccgttgatcaacgaatttaacagcccgcaatgcatgctctgtaccgatgaccgtaacccgtgggagatcggccatgaaggacacatcgatgccttaattcgccgcctgatcgaacaacacaatgtgccgctgcatgtggcatatcgcgtcgccagctggtcgacggcgcgccactttggtctgaatcacctcggcttactggcacccggcaagcaagccgatatcgttctgttgagcgatgcgcgtaaggtcacggtgcagcaagtactggtgaaagggcgagccgattgatgcgcaaaccttacctgccgaagagattgggagactggcacaattcgctccggcatatgggaacaccattggccggcagccactttccgccagcgactttgccctgcaatttacgcccggaaaacgctatcgggtcattgacgtcatccataacgaattgattacgcactcccactccagcgtctacagcgaaaatggttttgatcgcgatgatgtgagctttattgccgtacttgagcgttacgggcaacggctggctccggcttgtggtttgcttggcggctntggactgaatgaaggtgcgctggctgcgacggtcagccatgacagccataatattgtggtgatcggtcgcagtgccgaagagatggcgctggcggtcaatcaggtgattcaggatggcggcgggctgtgcgtggtacgtaacggccaggtgacttctgagggagcaaaggaaagaatgatgggaaaaaggtacaaggagacttcaggctctattgggctgaaggtcccagctccactgaacttaaatctaagtttacaacccagagagcagctcggtggtcagagcactgctgagccctactgcccctg

SEQ ID NO: 142062 - DNA, 3296 bp, Homo sapiens
atgtgcggcccgcggcggctcgcagctcccggcagcagcctcggcagcttcggccgcgcctcgagaggcggccgcagaggctccagcggcggccgagcggccgagcccgggctgggagacaccatgcgccgcgtccttcggctgctcctcggttgcttcctcaccgagctgtgcgcccgcgtgtgccgggcgcaggagcgagcgggacacgggcagctggcgcaactgggcggcgtgttgctgctggcggggggcaaccgctccggggccgcctccggagaggccagcgagggcgctgaggcatcggacgcgcccccgacccgggcgcccacgccggacttctgccggggctacttcgatgtcatgggccagtgggacccgccgttcaactgcagctcgggcgacttcatcttctgctgcgggacttgtggcttccggttctgctgcacgtttaagaagcggcgactgaaccaaagcacctgcaccaactacgacacgccgctctggctcaacaccggcaagccccccgcccgcaaggacgaccccttgcacgaccccaccaaggacaagaccaacctgatcgtctacatcatctgcggggtggtggccgtcatggtgctcgtgggcatcttcaccaagctggggctggagaaagcgcaccggccccaaagggagcacatgtccagcctctccgctgggggatgtcaccgggaagccaacttcggcttggaacacggagaaggggcgctgggctcagcacagggggtatccctctcccggtcccgcagccccgcttgttctccgctcttggccaatcccactgtttcggcccccgcctctgttgccactttcctcaccagcatggatcttgccctctcctttgtgtcactcactaaaggctcaaagtctggttcaagcaacgatttgatcaacgaatttaacagcccgcaatgcatgctctgtaccgatgaccgtaacccgtgggagatcgcccatgaaggacacatcgatgccttaattcgccgcctgatcgaacaacacaatgtgccgctgcatgtggcatatcgcgtcgccagctggtcgacggcgcgccactttggtctgaatcacctcggcttactggcacccggcaagcaggccgatatcgtcctgttgagcgatgcgcgtaaggtcacggtgcagcaggtactggtgaaaggcgagccgattgatgcgcaaaccttacaggcggaagagtcggcgagactggcacaatccgctccgccatatggcaacaccattgcccgccagccagtttccgccagcgactttgccctgcaatttacgcccggaaaacgctatcgggtcattgacgtcatccataacgaattgattacgcactcccactccagcgtctacagcgaaaatggttttgatcgcgatgatgtgagctttattgccgtacttgagcgttacgggcaacggctggctccggcttgtggtttgcttggcggctttggactgaatgaaggtgcgctggctgcgacggtcagccatgacagccataatattgtggtgatcggtcgcagtgccgaagagatggcgctggcggtcaatcaggtgattcaggatggcggcgggctgtgcgtggtacgtaacggccagaaattactcttcagaatccccagcttcagcatcatcagcggtttcgtttgcgaaatcatcgcgacgctcacggcgctcgtctttcgctttaaccatcggagatgcttcggtaacagcgtgcttggtacgcataaccatgctgcggataacggcatcgttgaagcggaaggtagtttccagctcatcgatcacttcctgcggagcttcaacattcatcagaacgtagtgtgctttgtgcagtttgttgatcgggtaagccagctgacggcggccccagtcttccagacggtggatcttgccttctgcaccagtgatggcagcagtgtagcgctcgatcatgcccggaacctgttcgctctgacagaagggaataaaataaaaaatcgtcgcgaggaaaaacatcggtgccgaggccagtccaagctcaatattattattgataacgttgttaaagctgtaaacggcggcaaaagtcagcgagagcaagccgaatttgccgattgtattacgtttggtatcagacataacacatctccgaaaatgagtaggttgttatttgttatggaaataaccatcttcgatggtgactttgagaaccacttttttgaccgcgttattgcagataaaccgatacgcttcatggatatcgcaaataacgatttgcccttcgtggacctcaacgaacagttggataaatatgtcgctaatggcggcaaacgtagcgactggacggtgaaattcgccgaaaaccgcagtcaggacggaacgttgctgggctactcgctattgcaggagtcggtggatcaggccagctatatgtacagcgataaccattatctggcggagatggcaaccatcctcggtaagccagaagaggccaaacgctatcgccagttggcacagcagctcgcggactacatcaacacctgtatgttcgacccgactacccagttctactatgacgtacgtattgaagataaaccactggcgaacggctgcgcgggcaaaccgattgttgagcgcggtaaagggccggaaggctggtcgccgctgtttaacggtgcggcaacgcaggccaatgccgacgcggtggtgaaggtgatgctcgatcctaaagagttcaacacctttgtcccgctgggaacggcggcgttaaccaatccggcttttggcgctgatatctactggcgtgggcgcgtatgggtggatcagttctggtttggtctgaaagggatggagcgttacggttatcgtgatgatgccctgaagctggcggatacgttcttccggcacgccaaagggttaaccgccgatggaccaattcaggaaaattacaacccgctgacaggcgcacagcaagcacaccagatgtcagtgcgcgagttgtacaccgatgtcatcgaagagttttactgggttgcgctcccgcttacgacgcaaaattccctttcacaataccaacccgaatggcagtgctgggaacctgatgtcgaatggccaggcatgaccttcgaacaatttgtacgtgagtttgccgaatggatcagcctatcgattcattactgttacccggagtatgcctcatatggtgtttcacatacagtacttgcttaataaaatgggcaacttcatctgacctagcaatcccatga

SEQ ID NO: 142063 - DNA, 2148 bp, Homo sapiens
atggggcagctggttcctggccgccaggctgcgtttcagcagctcacagcccactggctccgtgagacctgtaaaagcaaaggttttgtggcacagcaggccgagagggtgccgtgtgctaccctcctgcagacgtacatcagccacgaaactgctgtgactttaaagccggtcctcgccgcttcccgcacacctcgccgcttcccgcgcacctcgccgcttcccgcacaccaccaggcttgtgcttcccggagctgggtctgtgcacgtggcatccgtgcctctaaaggcgttgcaggccgggcacggacctcagagctggatctggttgtcatcccagatgaggaaacaggtcaggcggatgatgcagaaggagctgtgactccccggtggccactggggatgctcctggcccttgtgtgggtgaacgggtgccgtgatgtggccatgaggcgcacggacctctggactcaacgtggcctctccataggcttgagggaaaacaggaacggtcaggccctgagaaagtgccccaagaccgtgggcctgggagaaagggtcacggggcttgtgctggattttgggacttttctcttcagcctgtacacaaaggttacacacaaagaagacggcaaagggagcttccttgtggaatatgtagtctgtggtgcacacaccaggccccgggagacctgggatcccttatgcgagcgtgaggcaccccacgtcggaaattcggatacctgggatcccttacacgagcctgaggcaccccacgtcggaaatggaaattcggagacctgggatcccttacgcgagcctgaggcacccacgtcggaaattcggagacctgggatcccttacgcgagcctgaggcaccccatgtcggaaatttggagacctgggatcccttatggtgcgggccaccattcaggacaagcgttcctgtggacgacctgccagaggtggcagcctgcggacaggggccccactcacttcagctctggcttacagaaccttcatgggatcccgcggaagccgtcatttctgtcagaatattggcggctcatcttcattgcctggctggacgcagacccagccctttcatctgacagaggtgccgtgaatctcgcttcctggcggagacacgtgctgcacaccacctcctgtgtgtggggcttgcacactcctatgttcaaaaggcctgcgttccacacccatgacgtggaggggcctgcattccacacccacgatgtggaggggcctgcgttccacatccacgacgtggaggggcctgcgttccacaccgatgacgtggaggggcctgcgccgccccctcctccgtgcagggggagagctgctcccggaactatgctccatcaagtttaccatcatacaggatggatgggctccggccacgtcacacacttcctgaacgagtttacaatcatatgggatagatgggcaccggccacatctcgctcctggacaaattcaccgtcatacaggatggatgggcgccggccacgtcgcatacttcctggacgagtttaccatcatatgggatggatgggcaccggccacatctcgctcctggacaagttcaccatcatacaggatggatgggcgccccccacgtcacacacttcctggacgagtttaccatcatatgggatggatgggcaccagccacatctcgctcctggacgagttcaccgtcatacaggatggatgggcaccggccacatcacacacttcctggacgagtttacaatcatatgggatagatgggcaccggccacatctcgctcctggataagttcaccatcatacaggatggatgggcgctggccacgtcgcatacttcctgaacgagtttacgatcatatgggatggatgggcaccagccacatctcgctcctggacaagttcaccgtcatacaggatggatgggcaccggccacatcacacacttcctggacgagtttaccatcatacaggatggatgggcaccggccacatctcgctcctggacgagtttatcatcatacaggatggatgggcaccagccacatcacgcacctcctggagaatcccgccatctcatcacagttctttgaccagttggctattttctccattgagtaa

SEQ ID NO: 142064 - DNA, 464 bp, Homo sapiens
  misc_feature (1)...(464): n = a,t,c or g
agcttatttaaatttagcccaaaaatgtgtggatcagatgaagaaagaagcggggcgaataagcacggttgagctacagaaaatggtaatcattcctggggtatttatccagaatctatctctaccttaccagtggataatagtctactgtccaattctgtttactctgaattaccatcagctgaagggaaaatgaaggtaactgttacacaaataacagtggcactgagcagcttaaaaaatatttttactcctcttctttttcgaggacttctgtcttttctgacctggtggattgctgcttgcctcttttctacaagcctttttgggcttttctatcaccagtatctgactgtggcatgaatctcagttaacaaaaaagcatatccaaatcaccctttaaatctaaaatatctgtgaaattaaagcgctgatgaaaaccagaagaaaacntattcaatggg

SEQ ID NO: 142065 - DNA, 397 bp, Homo sapiens
attgtaacagaaaattatctggaatttggacttgaaacagggtttacaaatttttcagacagtgcgatgcagtttcttgaaaagcaaggtttagaatctcagagtcctgtttcaaaacttactttcaaatttttcctggctattttctgttcattcattggggcttttttgacatttcctggattacgactggctcaaatgcatctggatgccctgaatttggcaacagaaaaaattacacaaactttacttcatatcaacttcttggcacctttatttatggttctgctctgggtaaaaccaatcaccaaagactacattatgaacccaccactgggcaaagaaagtatccctttaatgacagaagccacattcgatactctgcgactctggttaa

SEQ ID NO: 142066 - DNA, 405 bp, Homo sapiens
tttcgtctcggctcaaggaccgggaggtaagaggtttgggactgccccggcaactccagggtgtctggtccacgacctatcctaggcgccatgtttgaggtggtatcaacatcctacagaagaagaattaagaattcttgcagggaaacaacaaaaagggaaaaccaaaaaagataggaaatataatggtcacattgaaagtaagccattaaccattccaaaggatattgaccttcatctagaaacaaagtcagttacagaagtggatactttagcattgcattactttccagaataccagtggctggtggatttcacagtggctgctacagttgtgtatctagtaactgaagtctactacaattttatgaagcctacacaggaaatgaatatcagcttagtctg

SEQ ID NO: 142067 - DNA, 502 bp, Homo sapiens
gagggtatatagagaaaaggatctcatgtattgctctacttttttcttctagatacctgttaacttcttacgctttcatgatacatttatctagttctgttattcaagttaaagtattatacagttaagtctatggcagagtcagattcttttatgtgtctaactgttgcgaagtatagacttcttatatcttatatggtgaccattaacatataacgagcatgctagcatattgttgtctttgagagcaccgtatcaactttttgatctgtagaatgacagaagccacattcgatactctgcgactctggttaataatcctgccgtgtgctttgcggttggccatgatgcgtagtcacctgcaagcttatttaaatttagcccaaaaatgtgtggatcagatgaagaaagaagcggggcgaataagcacggttgagctacagaaaatggtaagttttataccctagtcaaaatgaaaaatagcaaaaaccgcactgtaaaa

SEQ ID NO: 142068 - DNA, 2141 bp, Homo sapiens
aagaaccacagtgtcagaaatgaaagagtacaacttcacagaatgtgttgtctctgacaggttgatagccacttaccttctccatcttttcttcctcaaggatagcagctgcttcccacagatacaccaacaggcaattccagcccctctctaccacacttaccatttgcaggtgcctgtggcttgtctatttacaaccttgtccctacacagcagaagcggaacccttcaggaagttctggattcatcctcagcaggatctgtttcacaaactattctccagtcccaccttccctccagatgttcttccggcttcaattgccacctgtgaatagtgaagaaacttctcactatgagattccattgcccggaaggagggtagagctacggtacccactaaggcagggaacagaagcaacagacggacaggtctgtggaaatgaggatatgctaataagggaccgagtcaggaaaactagagggtcagcaccgcccccagcccacaacctggcacccacggaagttgctttagaggacgtcctgcgtatcttcacctctgcgtggcgtggggtcgacggcgctctggagaagggaggaacttcctgtcccgcgcgcgcacaacttccggcagagccggaagaccctctctttcgctgtttgagagtctctcggctcaaggaccgggaggtaagaggtttgggactgccccggcaactccagggtgtctggtccacgacctatcctaggcgccatgctatagcagagcatgcagggtcaccaaagccactcaggaagagggaaccagaaacctggcaagctaacaaaaagggtgtgataggtatacagctggttgttaccatggtgatggccagtgtcatgcagaagattatacctcactattctcttgctcgatggctactctgtaatggcaggaaatataatggtcacattgaaagtaagccattaaccattccaaaggatattgaccttcatctagaaacaaagtcagttacagaagtggatactttagcattgcattactttccagaataccagtggctggtggatttcacagtggctgctacagttgtgtatctagtaactgaagtctactacaattttatgaagcctacacaggaaatgaatatcagcttagtctgcaaagttctattttcattaactacacactattttaaagtagaagatggtggtgaaagatctgtttgtgtcacctttggattttttttctttgtcaaagcaatggcagtgttgattgtaacagaaaattatctggaatttggacttgaaacagggtttacaaatttttcagacagtgcgatgcagtttcttgaaaagcaaggtttagaatctcaaactttacttcatatcaacttcttggcacctttatttatggttctgctctgggtaaaaccaatcaccaaagactacattatgaacccaccactgggcaaagaaagtatccctttaatgacagaagccacattcgatactctgcgactctggttaataatcctgctgtgtgctttgcggttggccatgatgcgtagtcacctgcaagcttatttaaatttagcccaaaaatgtgtggatcagatgaagaaagaagcggggcgaataagcacggttgagctacagaaaatggtggctcgagtcttttattatctttgtgtcattgcactgcagtatgtggcgcctctggtaatgctgcttcacacaactctgcttttgaaaacactaggtaatcattcctgggggtatttatccagaatctatctctaccttaccagtggataatagtctactgtccaattctgtttactctgaattaccatcagctgaagggaaaatgaaggtaactgttacacaaataacagtggcactgagcagcttaaaaaatatttttactcctcttctttttcgaggacttctgtcttttctgacctggtggtattgctgcttgcctcttttctatcaagcctttttgggcttttctatcaccagtatctgactgtggcatgaatctcagttaacaaaaaagtcatatccaaatcaccctttaaattaaaatatctgtgcccttaaagggctgatgaaaaccagaagaaagcaaatacaatggg

SEQ ID NO: 142069 - DNA, 2850 bp, Homo sapiens
gtagagagttgcacagtggaagagggctgcatgtaagaaggcagttctgtctcagaggacaaaaggcctgggagcacccagacagacagtcactgcatggaggtcactccctcccagtggccactgtggagacatttcacagaaatgcttgctggaccattcaggttcagagttgggacaaaaccgagaactcatggggatattggacaggagttaggaaatgaccttctcacacaactggggcagtgggggagaaccctgggcttgagacttgcaatccaccacttgcccctgcccctgcccctgcagtgtggccgctgttaccttttcctgcaactctgccttcttgagtccaaatgtcttcgaaaggggcaaatgcttcaatgtctggggtcctatgttccaggaacctgtttactttcaaattttccctgtttcagttggactcaggagcatctggtgagccaggtcactctctgggtcttacccttggcttttcttattgcggaaactgccagacggcggtggtcagtgcccagcctgaggggatggcttcgaatggagagcttcctgagtggcagccgggaccatcgagtactgcggaaagggtggcccgaatctgacccctatttagcacttgctgtgggtggtgccaggacaatcacttgcatgctgggcatgacgagttatggattatcttcagggttcctagggcgctggcttgggaaagatttccatccagtggttttgttttgcacacctctggtgacagaacaggatggctgcggcccgagtggggccggggcttccaacgtctttgtccagatgaggacagaggtggggcctgtgaaggccgctcaggcgcagaccttggtcctaactcaggcccccctcgtctggcaggctccaggcgccctctgcggaggtgttgtgtgtccacctcccctactcctggcagctgctcctgtggtgcctgttatggctgcccaggtggttgggggcacccaggcctgtgagggaggctggagtgtctatgagaactttcgactctggcagcactacaagcccctggtccggaggcaccttccccagagtcctgacaccgaagcgctttcgtgcttcctcatgtcattctgtgtgcacgctgtctcagtcagctcaggctctgccgtaacgaatgccgtagactgggtgctttatcaagacacattcatgtctcccagttccagaggccagaagtcccagatcaaggtgacagcagattgggtgtctgttctccgatcgctggcccggcggaagcccaccatgaccctggaggagggactgtggcgggccatgcgggaatggcagcacacgagcaactttgaccggatgatcttctacgagatggcggaaaagttcctggagtttgaggctgaggaggagatgcagattcagaaatcgcaatggatgaaggggccccagtgcctgcctcctccagccacaccgaggcttgaacctcgaggacccccggcccctgaggtggtcaagcagccagtgtaccttcccagcaaggccggccccaaggccccgactgcctgcctgccaccacccaggccccagaggccagtgaccaaggcccgccggccaccaccccggccccaccggcgagcagagaccaaggcccgcctgccaccacccaggccccagagaccagcagagaccaaggtccctgaggagatccccccagaagtggtgcaggagtatgtggacatcatggaggagctgctggggccttccctcggggccacgggggagcccgagaaacaacgggaagagggcaaagtgaagcagccacaggaagaggactggacgcccccagacccgggcctcctgagctacattgacaagctgtgttcccagaaagacttcgtcaccaaggtggaggccgtcattcatccccaattcctggaagaattgctttccccagatccacagatggatttcttggccctaagccaggacctggagcaggaggaaggactcacccttgcccagctagtggagaagcgcctcccacccttgaaggagaaacagcatgcgagggcagcccctagtcgtggcacagcccggttggactcaagttcttctaagtttgcagctggccaaggagcagagagagacgtccctgacccccaacaaggggttggcatggaaacctgcccaccccagatgactgcccgggactctcagggacgaggcagagcacacactggcatggccagggagccccttcagatgctccagggactgacagatgctgaggaagccctgatccctcccactaccgactcacaaggccctgcctgctttagggaggcttcttggggccccccatcgtcatcagcatccctggaaaatcctgggattggagagagctggctggctcttgttctgctcgaacacagcagtcagcctgacagatgcccctctgccccgtcccttctgctcgatgtgggcagtgtcggaggcctgctgtcttctgtggcctttgggaaggagagtttatcttggcagggcttccccagctcagtgcacatcaggccctcggggaaaatgtggggagcgaagagtcactggtgggtgatgtgggcagctcccgtgactcctctacattcagggccatcctcaagagataagattaagggtacttactatcagcaaaagagtgaaagtctgacagaaaagaaaaagatggaaagaaatgtggggatgtgcaattccttatgttggttggttcagcagagctttgccgttgttcagatggagtttaggcaagcaaaagatgaccagccattgctgggtatttga

SEQ ID NO: 142070 - DNA, 2433 bp, Homo sapiens
atgaacgctcccgccttgagcacagccacaggcctgctctggtcacaatgtggggtcgccccgtggacactggtgaccagtgggagcatgaccaggagaatgtctggggtcctatgttccaggaacctgtttactttcaaattttccctgtttcagttggactcaggagcatctggtgagccaggtcactctctgggtcttacccttggcttttcttattgcggaaactgccagacggcggtggtcagtgcccagcctgaggggatggcttcgaatggagcatacccagtgctgggaccgggcgtgaccgcgaaccctggcacctccctgtctgtgttcacggctctgcccttcaccacacccgctcccggcccagcacacgggccgctccttgtgactgcaggggctcctccaggcggccctctggtgctgtctaccttccccagcacacctctggtgacagaacaggatggctgcggcccgagtggggccggggcttccaacgtctttgtccagatgaggacagaggtggggcctgtgaaggccgctcaggcgcagaccttggtcctaactcaggcccccctcgtctggcaggctccaggcgccctctgcggaggtgttgtgtgtccacctcccctactcctggcagctgctcctgtggtgcctgttatggctgcccaggtggttgggggcacccaggcctgtgagggaggctggtcccagggccttcctcttccaccaccaccaccaccggctgcccagctgccccccattgtgtcccaagggaatgctgggccatggccacaaggggctcatggagagagcagcctggcttcctcccaggccaaggccccgccagatgactcctgtaaccccaggagtgtctatgagaacttccgactctggcagcactacaagcccctggcccggaggcaccttccccagagtcctgacaccgaagcgctttcgtgcttcctcatcccagttctccgatcgctggcccggcggaagcccaccatgaccctggaggagggactgtggcgggccatgcgggaatggcagcacacgagcaactttgaccggatgatcttctacgagatggcggaaaagttcctggagtttgaggctgaggaggagatgcagattcagaaatcgcaatggatgaaggggccccagtgcctgcctcctccagccacaccgaggcttgaacctcgaggacccccggcccctgaggtggtcaagcagccagtgtaccttcccagcaaggccggccccaaggccccgactgcctgcctgccaccacccaggccccagaggccagtgaccaaggcccgccggccaccaccccggccccaccggcgagcagagaccaaggcccgcctgccaccacccaggccccagagaccagcagagaccaaggtccctgaggagatccccccagaagtggtgcaggagtatgtggacatcatggaggagctgctggggccttccctcggggccacgggggagcccgagaaacaacgggaagagggcaaagtgaagcagccacaggaagaggactggacgcccccagacccgggcctcctgagctacattgacaagctgtgttcccagaaagacttcgtcaccaaggtggaggccgtcattcatccccaattcctggaagaattgctttccccagatccacagatggatttcttggccctaagccaggacctggagcaggaggaaggactcacccttgcccagctagtggagaagcgcctcccacccttgaaggagaaacagcatgcgagggcagcccctagtcgtggcacagcccggttggactcaagttcttctaagtttgcagctggccaaggagcagagagagacgtccctgacccccaacaaggggttggcatggaaacctgcccaccccagatgactgcccgggactctcagggacgaggcagagcacacactggcatggccagttcctgtgctgaagccctaacccccaacgtgatggtatttggaaatggggcctttgggagttattcagggttagaagagaccatgagggtatttattcgcgataagctcatggagcggcgtaaccgtcgcacaggaaggacagagaaagcgcggatctgggaagtgacggacagaacggtcaggacctggattggggaggcggttgccgccgctgctgctgacggtgtgacgttctctgttccggtcacaccacatacgttccgccattcctatgcgatgcacatgctgtatgccggtataccgctgaaagttctgcaaagcctgatgggacataagtccatcagttcaacggaagtctacacgaaggtttttgcgctggatgtggctgcccggcaccgggtgcagtttgcgatgccggagtctgatgcggttgcgatgctgaaacaattatcctga

SEQ ID NO: 142071 - DNA, 2795 bp, Homo sapiens
atgcttgctggaccattcaggttcagagttgggacaaaaccgagaactcatggggatattggacaggagttaggaaatgaccttctcacacaactggggcagtgggggagaaccctgggcttgagacttgcaatccaccacttgcccctgcccctgcccctgcagtgtggccgctgttacattttcctgcaactctgccttcttgagtccaagtgtcttcgaaagggcaaatgcttcttggactcaggagcatctggtgagccaggtcactctctgggtcttacccttggcttttcttattgcggaaactgccagacggcggtggtcagtgcccagcctgaggggatggcttcgaatggagcacacgggccgctccttgtgactgcaggggctcctccaggcggccctctggtgctgtctaccttccccagcacacctctggtgacagaacaggatggctgcagcccgagtggggccggggcttccaacgtctttgtccagatgaggacagaggtggggcctgtgaaggccgctcaggcgcagaccttggtcctaactcaggcccccctcgtctggcaggctccaggcgccctctgcggaggtgttgtgtgtccacctcccctactcctggcagctgctcctgtggtgcctgttatggctgcccaggtggttgggggcacccaggcctgtgagggaggctggtcccagggccttcctcttccaccaccaccaccaccggctgcccagctgccccccattgtgtcccaagggaatgctgggccatggccacaaggggctcatggagagagcagcctggcttcctcccaggccaaggccccgccagatgactcctgtaaccccaggagtgtctatgagaacttccgactctggcagcactacaagcccctggcccggaggcaccttccccagagtcctgacaccgaagcgctttcgtgcttcctcatgtcattctgtgtgcacgctgtctcagtcagctcaggctctgccgtaacgaatgccgtagactgggtgctttatcaagacacattcatgtctcccagttccagaggccagaagtcccagatcaaggtgacagcagattgggtgtctgttctccgatcgctggcccggcggaagcccaccatgaccctggaggagggactgtggcgggccatgcgggaatggcagcacacgagcaactttgaccggatgatcttctacgagatggcggaaaagttcctggagtttgaggctgaggaggagatgcagattcagaaatcgcaatggatgaaggggccccagtgcctgcctcctccagccacaccgaggcttgaacctcgaggacccccggcccctgaggtggtcaagcagccagtgtaccttcccagcaaggccggccccaaggcccagactgcctgcctgccaccacccagaccccagaggccagtgaccaaggcccgccggccaccaccccagccccaccggcgagcagagaccaaggcccgcctgccaccacccaggccccagagaccagcagagaccaaggtccctgaggagatccccccagaagtggtgcaggagtatgtggacatcatggaggagctgctggggccttccctcggggccacgggggagcccgagaaacaacgggaagagggcaaagtgaagcagccacaggaagaggactggacgcccccagacccgggcctcctgagctacattgacaagctgtgttcccagaaagacttcgtcaccaaggtggaggccgtcattcatccccaattcctggaagaattgctttccccagatccacagatggatttcttggccctaagccaggacctggagcaggaggaaggactcacccttgcccagctagtggagaagcgcctcccacccttgaaggagaaacagcattcgagggcagcccctagtcgtggcacagcccggttggactcaagttcttctaagtttgcagctggccaaggagcagagagagacgtccctgacccccaagaaggggttggcatggaaacctgcccaccccagacgactgcccgggactctcagggacgaggcagagcacacactggcatggccaggtccgaagactctgttgtgcttttgggatgtcaggattcccctgggctgagggctgcccggccaacctctcctccccaggaccacagacccacctgccctggcgtgggtaccaaggatgccttggatctccctggagggtctcctgtcagggagtcacatgggctggctcaggggtcaagtgaggaggaggaactccccagcctggccttcctcttgggttcccagcacaagcttctgccctggtggctaccccagagccctgtccctgcctcgggccttctcagcccagaaaagtggggaccccagggaactcatcagtccccatctgctgagagaagaggcctcaacctagcaccttctcctgccaacaaggccaagaagcaacctctctttggaagcctgtcccctgctgaaaagacaccccaccgagggcctgggctcagggtctctggggagcaatccctgacttgggggctgggtggcccctcacagtctcaaaagagaaagggtgaccccttggtctccaggaaggagaagaagcagcattgtagccagtaggggcttctgagcaggctctctggggctgatccccaaggatggggctctggcatccgatgccccaaagcggtcaaaagctatattctccctcagtgctgatcttgctgggccttagcacgaaatcgtcgacccgg

SEQ ID NO: 142072 - DNA, 534 bp, Homo sapiens
cggagagaaaacttaaaatgtttccacattatcaagcccccttcagaagtactgtggtctcggcccctcctttgaacagatgtccgctcgccacagtccaatcaggtttaaagcaagagtatttgtactgaaaacaagcttaaagtgggaagacacacacaaagcaggcctgtatcattcctttggtttcagttttcacgatgcacccttgaggctaggcacgctgattcaacacacttggagagcttcaccgaaacacactaaacacacagtgatgaactgtgccctggcagagatgacctggcaaaattctcaacttcttccctgaggcagtgcacccgcagttctcggcggcgaagtctttgggtaccgcggcgccagaggccgaggcccagccgcgcctgccttcctctttctcccgcccactgccaacctccagtcgcccgcagaacctccgctgcctcggcgcgaccccatcgccaccccggggctgccgctcgggaccggcaagcagggtagccgcgaggcggccgc

SEQ ID NO: 142073 - DNA, 1074 bp, Homo sapiens
  misc_feature (1)...(1074): n = a,t,c or g
atgatccgctctcggcgaccgcaagtcccggctcgcccggcgcctgcgcggcaacgggggtgggatctgcggacgcccatagagcaccagtggagggagcgttaccttagccttggcaagggagccctgcaaggaccttacaaggacacagaggaggctggagatgcctcaagcacgggggacttttcggtggggattttgggcgccgaccagacgcggcattttcggaaaatagcgccctgtgcagctgaagcgctttcgcacgatcagcaagcgttagattatgcgctttatcatttgcgcatcatgacgctggcccacgacgagcgcagcagcattgcggcaaaaggcttaacgggcgaaggctacaaaggccacgttttctgggatacagaagtatttttgttaccgtttcatctgtttagcgatccgacggttgcccgaagtttactgcgttatcgctggcacaacttgccaggcgcgcaggagaaagcgcgacgcaacggctggcagggcgcgctatttccgtgggaaagcgcgcgcagcggcgaagaagagacgccggaatttgccgccattaacattcgcaccgggctgcggcaaaaagtggcctcggcgcaggcggaacatcatctggtggccgatatcgcctgggcggttattcaatactggcagaccacgggggatgaaagtttcattgcgcatgaaggcatggcgctacttctggagacggcaaagttctggattagccgcgcggtgagagttaacgatcgtctggaaattcatgatgttattgggccagacgaatataccgaacatgtcaataataatgcatacaccagctatatggcccgctacaacgttcaacaggcgctgaatattgcccgccagttcggctgtagcgacgatgcgtttatccatcgcgccgaaatgttcctcaaagagctatggatgccagaaattcagcccgacggcgttttgccgcaggatgattcgtttatggctaagccggcgattaatctggcgaaaaattggacgggaaacncttgtaaaggtccaggaaaggacgagtga

SEQ ID NO: 142074 - DNA, 927 bp, Homo sapiens
tcactcgcacaccatgtgtccctccgcgcgcagcacgggggacttttcggtggggattttgggcgccgaccagacgcggcattttcggaaaatagcgccctgtgcagctgaagcgctttgtgtgtagcggggccgcgtcagcccggccgggtacgaggcgcctcgggtccccgcaccacctcctgctgccttcccgtcgccgctcccgaagcttttccaggtcagtgcgggtctgtgtagggccctgttaccaccggatgtggaagttgatctcttcgcaagcagctccgactgtttctcgtgctgctccagccagctggccatttcactgttggcgcgacggttagagagcacccatacggaagcgccagtcgcactgcggttcggtgcggcatcagcgtgaatcgacacgaggaaattggcgttttgcttacgtgccacatcactgcgccccatcaccgagataaagtaatccccgtcacgggttaaaacgcctttaaacatcggatcgtcattgagcaaagtacgcaatttacgcgcgatggcgatggtgacatttttctcccgcgtaccaccggggccgatagcgccagggtcctgaccgccgtgtccggcatcaatagcgatgataattttatcgccagtgttagccgtcgcgcgcgctgccggacgcgttaccgtattactgctgataacacccgtagtgcggttactttccgttttaaacggattgcgcgccggttcgctgacgcgcggtgcgacaaccgcaggcgtttcaacgcgtttcgcaaccacgggcggcggaggaggcggtggcggcacatcggcgttaatcgtaaagacgacagtgtaattgctgccattctgccgcttcaccgctgaggtcaagagtttgagaccagcctggctaacgcggtgaaaccccat

SEQ ID NO: 142075 - DNA, 1264 bp, Homo sapiens
ctcgcacaccatgtgtccctccgcgcgcagcacgggggacttttcggtggggattttgggcgccgaccagacgcggcattttcggaaaatagcgccctgtgcagctgaagcgctttgtgtgtagcggggccgcgtcagcccggccgggtacgaggcgcctcgggtccccgcaccacctcctgctgccttcccgtcgccgctcccgaagcttttccaggtcagtgcgggtctgtgtagggccctgttaccaccggatgtggaagttgatctcttcgctggtaaaaaataattccacttcccccggaacccagatcatccccgcgatttcctgtttattgcattaaggcgccgggtttccggggctcctggccccgcttattccgcgggggtcggcggggtcggcctgggcgcccgcgccgccgctgcgctttgtccgctgggcacactgcttctgggaggggcgggcagacatggtggcggccgccgccccctcctcggccctagcatgccgcggccgcctcgcggctacccggcttgccggtcccgagcggcagccccggggtggcgatggggtcgcgccgaggcagcggaggttctgcgggcgactttccttcacaaatatgctgtgaccttcgtccgcgccacggctgaccagcacctgctccggttttacgcctgcatattgcgcgtaattttcaatcaccgctttcggctggcattccgggtagcggttgagcgtttgctgagtaagctgaaactccacggcagtggggtattcgttggcgttcagccagacatcgccgttaccgcccagacgacgcgccgactgatacggcgtcaggttgcggacgttttcacgcgctaaatcggtaatagtcacggtgctcatgcttgctcgcaaagtaacggcatttttgtgggcggtcaggcgctcggcggcggccagtgtttctatggttgaagccagcgcggagaacccctctttcgacagttcctgtacggtcatgcgcttctggaaatctgccagcccgaggctggaacaggtggcggtgtaaccgtaagtcggtagaacgtggttggtgccggaggcgtaatcacctgccgattccggtgaccagtcaccaagaaataccgaaccggcgctggtgatgctatcgaccagttcacgggcgttgcgggtctgaatgatcaggtgctccgggccgtaaggcggcttgcgttcaatgcctggcgggcggtttcggcacgccggcagttttgccat

SEQ ID NO: 142076 - DNA, 1904 bp, Homo sapiens
ctatgttaacatgtaatggatttattttttgtttttggaaaaaaaaaaccaagagaaaagaaaataaagtcatctttagtttccttaaattcaaagtctgagcctgaaaatggaagtatcaaagctgatggttatacgtcagtgagaaaaaaatttaaaccaagctgggtgggtctttacatgagataaactatctacaggaaagaatgaccactaacttctgcataataaatgagagtggatcttttaattctgagatggcaatgtactttacaaggaccatttacagactacatcaaacctttttctagataaaaaacgtacttcagtaacttgcctggaattgaagagagcaaaacaggtccgggagaggaaaactttaaaatggtttccacattatcaagcccccttcagaagtactgtggtctcggcccctcctttgaacagatgtcggctcgccacagtccaatcaggtttaaaagcaagaggtatttgtactgaaaccaagcttaaagtgggaagaacacacacaaagcagggcctgtatcattcctttggtttcagttttcacgatgcacccttgaggctaggcacgctgattcaacacacttggagagcttcaccgaaccacactaaacacacagtgatgaactgtgccctggcagagatgacctggcaaaattctcaacttcttccctgaggcagtgcacccgcagttctcggcggcgaagtctttggggcagaaatcccgaagccttcaagaaacggcaggcttctcccccctcaagacttccaagtcccccgcggccacagcgtgtcgctgcgggggccccgcgcgggactggccaggctcttccattaaccctgtctggtccggccgatcccgccgcggaccccgacgcgtctcggccccgcagcacagggcgcccaggaccccgccaccctcgccgcccgttcccctctccggagagcccggcggggccgtcaaggctgccgagacaaagggtaccgcggcgccagacgccgaggcccagccgcgcctgccttcctctttctcccgcccactgccaacctccagtcgcccgcagaacctccgctgcctcggcgcgaccccatctgccatccccgggcgtgctcgctcgtggaccggcaagccggcgaagagatcaacttccacatccggtggtaacagggccctacacagacccgcactgacctggaaaagcttcgggagcggcgacgggaaggcagcaggaggtggtgcggggacccgaggcgcctcgtacccggccgggctgacgcggccccgctacacacaaagcgcttcagctgcacagggcgctattttccgaaaatgccgcgtctggtcggcgcccaaaatccccaccgaaaagtcccccgtgctgcgcgcggagggacacatgaacataaacgaagagcttaatcccaacgcacttgtctttgtcctccttcctgtctatgtgttatgcatcttctcaattagaaggcatgtctgtacagctcagcagctcaggagtaaatgcaaggagtctcggtctgtccccagagctgaaagtgcagttgcgggatgtcagctaaagctgcccaacaggcactttgaacagatgaaggatgatgccatcgtgtgtaacactggacactttgacgtgaaaatcgatgtcaggtggctcaacaagaatgctatgaagaagattgagctgtggacccactcagataagtaccccattgaggttcacttcctgcccaggaagctggatgaggcagtggctgaagcccatctgggcaaggtgaacatgaaactgaccaagcagactgagaagcaggcccagtacctgggcatgtcctgtgatagtctcttcaagctggatcactaccactactga

SEQ ID NO: 142077 - DNA, 419 bp, Homo sapiens
aagaggcaagagagcacaggttcttgattgttcttgtagctggtttgtctctgttgttaaaacagggttctgcatacatcctgaggttccttcctgccttaccaatattgaatgccaaaaaggagtcaactgacttgaccaggtctatatttcttttctgtcgctccaggattcttctacagccagatgattccttacagatcttggcaccagtggaagcagatgtgggtttctacacttgcaatgccaccaatgccttgggatacgactctgtctccattgccgtcacattagcagcaacagtattcctgcccccatgacttcaggctgatctgggaagggacccttagcaggcggctttgcggggaagatcacagtcaacaatgaagaaggcaatttaaggagccctgggccggatg

SEQ ID NO: 142078 - DNA, 405 bp, Homo sapiens
cttacttctacttcctgcctttcctctgacaggaggattcttctacagccagatgattccttacagatcttggcaccagtggaagcagatgtgggtttctacacttgcaatgccaccaatgccttgggatacgactctgtctccattgccgtcacattagcaggattatgttgtcatactgtactccagtcacacatgctacccccttgcatatctgtttagcaacagtattcctgcccccatgacttcaggctgatctgggaagggacccttagcaggcggctttgcggggaagatcaaagtcaacaatgaagaaggcaatttaaggagccctgggccggattaaagactgatattattaatgcctattttttgtgaataaaacatttgcttttcttctaaaaa

SEQ ID NO: 142079 - DNA, 508 bp, Homo sapiens; identical to SEQ ID NO: 71193

SEQ ID NO: 142080 - DNA, 1014 bp, Homo sapiens
atggtgaccgagcattggcgcctggacgacatcctggggaacctctcccagcagcccgaggagctgcgcgacctctacagcaagcacctggtggcccagctggcccaggagatcttccgcagccacctggagcaccaggacacgctcctgaagccctcggagcgcaggacttccccagtgactctctcgcctcataaacacgtgtctggcttcagcagctccctgcggacctcctccaccggggacgccgggggaggctctcgaaggccacaccgcaagcccaccatcctgcgcaagatctcagcggcccagcagctctcagcctcggaggtggtcacccacctggggcagacggtggccctggccagcgggacactgagtgttcttctgcactgtgaggccatcggccacccaaggcctaccatcagctgggccaggaatggagaagaagttcagttcagtgacagatggagaaggttcagtggaatcttgatagaaacagagacgtggcagccaggtgcaaagaacactaaagcactgggcctaggcaagcagagggaaagtcctggattctccatcatccaggacatcgttgtgggggagggtagcactaagaggagctgcccatatataactcgattgattgatggaagccttacttctacttcctgcctttcctctgacaggaggattcttctacagccagatgattccttacagatcttggcaccagtggaagcagatgtgggtttctacacttgcaatgccaccaatgccttgggatacgactctgtctccattgccgtcacattagcagacataagcacagagattggagaatcatcttggctgttaaattcagcactcagccatcttgctcagaaatcttccaaatccgaatggcctaggcaaacttttgaaggaaaggaagtagttccaggcagtatctctactcctggtggggaatatttagctttgacattgccaagtctcctcttggtcttgtcctcctga

SEQ ID NO: 142081 - DNA, 702 bp, Homo sapiens
atgaaaaaccacatgattatctcaatacatgcagaaaaagcatttgataaagctaaacatccttttattattataactcttcgcaaaatatgtatggaaggaaatttcctcaacatcaaggctatttatgaaaagcctatagctaatatgatcaacggtggttgtggggtggttgtactgaaagctttccccttaagatttgctaaaaagcaaggatgcccactcttaccacttccatttgtcatagtaccaaaaatactagcaggagcaagtctcaaatatagaaaccaaaaattgatgtgtagtgttaatgtgcttacagatgttgataccacctatccagataagaagtccatcttaatgtacatcacatcactcttccaagttttgcctcaacaagtgagcattgaagccatccaggaagtggaaatgttgccaaggccacctaaagtgactaaagaagaacattttcagttacatcatcaaatgcactattctcaacagatcacggtcagtctagcacagggatatgagagaacttcttcccctaagcctcgattcaagagctatgcctacacacaggctgcttatgtcaccacctctgaccctacacggagcccatttccttcacagcctctaaaagccaccactctaatctctgattctctgagtttggcaattttagatacctggtgtgagtag

SEQ ID NO: 142082 - DNA, 1542 bp, Homo sapiens
tcaggccctggcccgggccactcggccacattctgcatctgcttccgatccccaggactgtggagaagccacgtcgtgtcctacagagtcctgagggcctcgcatgtgcatgtgaccactgaccgtccactgccagggcgttcttcccaagtgcgaccatggggactctgctgagcactccacactgtcctttccttcgtctgccttcctcaggcatacggcagtgaatcctgcagaagtctcaacaggctcagtaccaggacccagcccttcaccacattcagtggcccttccaagcatgtggccccagaccaggagctcctgcggcactgggaaggtggctgcccaggctgagatcaggaggccgtacctctgaacgagggcaggactgttcttcacaggcagctttcctccaaggaggcagaggacggcactggcacgttcactcagcagccaacattggcaagcacccactctaccccgtggcccggggtgccactgcccatggagcttggaggtgccaactgctgccagtgaccttgggtaagtcattttgtgcttgatccttgcatccccatctgagaccccatcagcgctgacaccataggccccaagagcctgtgaccatggctggtgagagctccccagaacagtggggctctcagagaagtagagtgaggagcacagagagacggatgggtaggtcctttctattttgtctgtctctctcctgccccagatacccactagaatgttggctccatgaggacatggatttgtgtctgcttcagtcactgttgcacccctacccagcccagcatccggggcattgcaggctctaacaccgggcctctgggactcagtttccttgtctgtaaaaatgggggggagcgtaagaagctgcgacggggtgaagtgagcagagacgaggtctgatttggattttgtgaaggtttctggctctcctcctccaagactttctgcgtgcaccagcatcttccattttgtgtttcctgtctgcctctggactctctggcgtccatccagccacttcagtgcgacgtgtgactgctgcttgtgcccttccccaggagtggctgtgttccgctcatcatggaggcctggtgcccggcacagtgcgcacttcaaggcctcagagcatgtttccctcttctgtgatgcaggcctagaggtggcagttctggaaagttcctcctcaccttgcaggggaaactgttgaggtggagggcacttgtccagggcagcacagctgttggccgcgcactctgccttccgaacacgttcctgtactgcttgccgtgcacggagggccacgttcatgcctttggggccacgacagctctctctggaagggaccgtctggccacatctgactgccaagtgctgccggggagaacctgctgaaggtgctggacgtggctgtcggggcgctgggccgccctccagccaaggctcctggcctagagccaggctggacgccagcagggctgtgtgcagcttggccagctttggagctcccat

SEQ ID NO: 142083 - DNA, 549 bp, Homo sapiens
tcagtctgtctcctcctcttgtgtccaagggaatgtatcgctcccgctggctcagaaccatggctgtgccagccggcacccaggtgtggagacaagatctacaaccccttggagcagtgctgttacaatgacgccatcgtgtccctgagcgagacccgccaatgtggtcccccctgcaccttctggccctgctttgagctttgctgtcttgattcctttggcctcacaaacgattttgttgtgaagctgaaggttcagggtgtgaattcccagtgccactcatctcccatctccagtaaatgtgaaagcagaagacgttttccctgagaagacatagaaagaaaatcaactttcactaaggcatctcagaaacataggctagggtaatatgtgtaccagtagagaagcctgaggaatttacaaaatgatgcagctccaagccattgtatggcccatgtgggagactgatgggacatggagaatgacagtagattatcaggaaataaataaagtggtttttccaatgtacacacctgtacccaaaaaaaa

SEQ ID NO: 142084 - DNA, 1338 bp, Homo sapiens
tttgggtttggacgggtgcgtttgtttttcatagtgcaggtctggagccggactgagatggggagtagagggaccccttgaaacttcagggtggatgaatatgaagtttcatcaccagctgtgatgtttgatattggactgtggttgtgccagttgacactcaggagtggagactagatctgcaatctgttgggactgtgatgaggggatcatcctgccctcgaaccagacccagccctgtagcccaggcactattgcctggagttcctgggctctcagcgccaggaaatcatgaggttcagtgtctcaggcatgaggaccgactaccccaggagtgtgctggctcctgcttatgtgtcagtctgtctcctcctcttgtgtccaagggaagtcatcgctcccgctggctcagaaccatggctgtgccagccggcacccaggtgtggagacaagatctacaaccccttggagcagtgctgttacaatgacgccatcgtgtccctgagcgagacccgccaatgtggtcccccctgcaccttctggccctgctttgagctctgctgtcttgattcctttggcctcacaaacgattttgttgtgaagctgaaggttcagggtgtgaattcccagtgccactcatctcccatctccagtaaatgtgaaaggtctagtctattgttgacttacccaacctctcaaggagaaaatgcgagtacacttactttatcttttgataactcccttcttgaactccccatcagtatgaagctcaccctgttgaatggcctagatggaggatattacaaggaaccaaaaggacattcaggaaaaaacaaaaactacatagagggaggaggaataaaatatcaggtgggaaagaaagaagtggctggtaacaccctcagcatagctgaaagtttcccaatcatggaaaaactggatgttgaaaatccagatagcagctgccaagtcaaggaacctgggctcttccctctactggataaaggcccctcagtatgcaccatccccacaatgccagcatttctcaatggactggacctcaaagtgggggagaagcagctgtcttggcgtctctctgcatcctcagccttctctgatcatgtggagcccccagtggcccccatgggtgcttatctgatgctgtgccagccacaggcaagatgtggggacacgttctgtgaccctctgcagcactgctactatgacaatgccatcctgccctcggatgggacccagaggggtggaactgcaccttcagagtctgcttcgagaagtgctgcccctggtccctcagtcccccagcgtccctcatggtga

SEQ ID NO: 142085 - DNA, 481 bp, Homo sapiens
  misc_feature (1)...(481): n = a,t,c or g
ntaacggcgctcctggaactgatcngcatctgcagggncgacccacgcgtncggagaatcactacaagaaaaactccttgtggtgaaggttctaagacgtgggatcgtttccagatgagaattcacaagcgactcattgacttgcacagtccttctgagattgttaagcagattacttccatcagtattgagccaggagttgaggtggaagtcaccattgcagatgcttaagtcaactattttaataaattgatgaccagttgttnnnnnnnnnnnnnnnnnnnnnnnnnnnggggggggccgttttaaagaatccttgggggggcccaattttaccggggcttgaaaggttatatttttttccttttgggggggcgtattaaaacctacctggggattttgggaaagaaccctttttttgggggggggccttattgggccaacctcccttcaaaaattaaaggctttaggggtaatataa

SEQ ID NO: 142086 - DNA, 276 bp, Homo sapiens; identical to SEQ ID NO: 115565

SEQ ID NO: 142087 - DNA, 1034 bp, Homo sapiens
  misc_feature (1)...(1034): n = a,t,c or g
atggtcttccttgtaccaagtcctcagcagtttaggacttacttagctcaagcaagtcatcaaaggcaaagccaagtcccaacccttagtgctttgactcccaagtcccacactcttcctccgaaaaaagtcacatcgtgtgagattgattttaccctctactatgcttctgttcgcacagtaaatgtcaacatttctgttaattcggttcgtgcatttttgagcactttttctgttcttgcaagacattgtgatgaaagtgaaggactgagggtgttactggtggagggtgtcaaggttcttggcattttgaacaaagaattggacaaaatgcacaaacaaagcaaggaaagaatgaaacaacaaaagcagagatttattgaaaacaaaagcacacttcacagtgtaggagcagcccaagcaagcggatcaagagtgctgaattccggaaacacactcgtggagccagaggtggcaattcaccgaattcgaatcactgtaacaagccgcaaagtaaaatccctggagaaggtgtgtgctgacttgatcagaggagcaaaggaaaagaatctcaaagtgaaaggaccagttcgaatgcctaccaagactttgagaatcactacaagaaaaactccttgtggtgaaggttctaagacgtgggatcgtttccagatgagaattcacaagcgactcattgacttgcacagtccttctgagattgttaagcagattacttccatcagtattgagccaggagttgaggtggaagtcaccattgcagatgcttaagtcaactattttaataaattgatgaccagttgttnnnnnnnnnnnnnnnnnnnnnnnnnnnggggggggccgttttaaaggatccttgggggggccaaagtttacgggggctgggaaggtaatatttttttccttttggggggccgtattaaaacctacctgggaattttgggaaaggacccttattttgggggggggacttattgggccaacctccctacagaattttaaggctttagggaaaa

SEQ ID NO: 142088 - DNA, 1129 bp, Homo sapiens
  misc_feature (1)...(1129): n = a,t,c or g
aggggtagcagaccaggggcncactgtnaacggttgaacnagcacangccgcggaattnggaagacgcggtcgtaagggctgaggatttttggtccgcacgctcctgctcctgactcatcgttgttcgctctcgccgaggaacaagtcggtcaggaagcccgcgcgcaacagccatggcttttaaggataccggaaaaacacccgtggagccggaggtggcaattcaccgaattcgaatcaccctaacaagccgcaacgtaaaatccttggaaaaggtgtgtgctgacttgataagaggcgcaaaagaaaagaatctcaaagtgaaaggaccagttcgaatgcctaccaaggtaaagtaaatcggaggggcaggaagtaggagttgcttccggatgttgcataaattcaggttctttaaggagttcggctgccaaaattgttaacactgatgctgtctacaaacgcacatagaaatcggtggtagattgcggttcctagtaagtagctaatgtttagatatgattgttgaattattgttgctgtgttcttggtgtgctttggtgcttaacaggcgcaagctctaagggtggtgtcctagcacagtgaaaacagacctggcattttcaacccatggtacctgaaaatctattagtgtaaattggaatcataccaaagggaaactaatgaaatgattagaagtaatgattttccagatgttctagggataagtataaaacgataaacacttggtttcctttgtcttttgttacagactttgaagaatcactacaaggaaaaactcctatgtggtgaaggttctaagacgtgggggtattcgtttcccagatgagaattcaccaagcgactcattgacttgcacaagtccttctgagatgttaaggcagattacttccatcagtattgagcccaggagttgaggtggaagctcacacattgcagatagcttaagtcaactatttttaataaattgatgaccaagttgttactgaaaaaagaaaaagaaaaatgactgacaaaccaatacctgggggggtggtttttaaaaatttttgggggggcccaaattcctcgggggtttggaaaaaaaaattttttttatttaggggg

SEQ ID NO: 142089 - DNA, 459 bp, Homo sapiens
gttttaaagaaggcgaactggggaagaagagagctccctgcttctagtgagcaaaggcagcccctgagcttccacagccctccacatttattgggtaggatgaaagggaggaggaggtaacgactggtcagctgcttaattgatcacaagttcacattattgttaacaggcttcaattatgcctaatcacaagaaacacttgtgcctgggtcgtgactgccttcagcattccttctgggtggcagacgcagtttgtcagtttgccaacatcctgctttcatgagaaacggtttgctgtttactcatatagcctccagtggcatactgagttgatcacgaccctcattctttcggcctggacgctgacggaggcaggggcgcctgcagccgactcagccgatccgcactctagcctctgtgtagaaggaacaccgcttctcgcgtttttccgctctttca

SEQ ID NO: 142090 - DNA, 431 bp, Homo sapiens
gcgcgccctcatggttgcgttagcatggctacctagggatctgttcactgatttagagggtcccagagctctgggtcgggactgaggtgaaagatcggaaaaacgcgagaagcggtgttccttctacacagaggctagagtgcggatcggctgactcggctgcaggcgcccgtgcctgcgtcagcgtgcaggtgaccgccgttcccgcgccgatcttgcctgggtggactggacgaggccgcgccgatgaacctgaccgaggttgttggcatggagccaaagatgaagaggtaccttccaagcagtgtgtttctgtaagagtggtacaggtcacaattccaaagccagctttgtccaccctgaaggcccaaccctggaagatgtggaactcaattctggaggacattcttgccctggctgagcacgatgga

SEQ ID NO: 142091 - DNA, 543 bp, Homo sapiens
gccctcatggttgcgttacgataggctacctagggatctgttcactgatttagagggtcccagagctctgggtcgggactgaggtgaaagagcggaaaaacgcgagaagcggtgttccttctacacagaggctagagtgcggatcggctgagtcggctgcaggcgcccctgcctccgtcagcgtccaggtgaccgccgttcccgccccgctcttccctgggtggactggaggaggccgcgcagtgaacctgaccgaggccgaaagaatgagggtcgtgatcaactcagtatgccactggaggctatatgagtaaacagcaaaccgtttctcatgaaagcaggatgttggcaaactgacaaactgcgtctgccacccagaaggaatgctgaaggcagtcacgacccaggcacaagtgtttcttgtgattaggcataattgaagcctgttaacaataatgtgaactttgtgatcaattaagcagctgaccagtcgttactcctcctccctttcatcctacccaataaatgtggagggctgtggaa

SEQ ID NO: 142092 - DNA, 2693 bp, Homo sapiens
atggatttgacaaggtgtgaagagcaaagcataaaggacctctgtggttactatacctgtttgatgactatggcccatggtgatgaacaggttagacgttatttcactgggacctctagggtcccagagctctgggtcgggactgaggtgaaagagcggaaaaacgcgagaagcggtgttccttctacacagaggctagagtgcggatcggctgagtcggctgcaggcgcccctgcctccgtcagcgtccaggtgaccgccgttcccgccccgctcttccctgggtggactggaggaggccgcgccgatgaacctgaccgagggtccattgcagtggcagcaatgcataaggaccctgcacagacatttgtgatggggctgtctcctccctccggagttcacgtgcacttcaccagcatttctgttcttacaggttgttggcatggagccaaggatgaggaggtaccttccaagcagtgtgtttctgtaagagtgttacaggtcacaattccaaagccagctttgtccaccctgaaggcccagccctgcaagatgtgtagctcaattctgaaggacattctgcacctggctgagcacgatggaacacaccctgagcaagggctgtacacatgtgcagcagagcatgacctgcaccaaaaggagcagattagagagaagctcaccagaagtgatgagtggaggccttcatttgtgaaccacagtgctcacgtgggagagaggaacttcacatgcacgcagggtggcaaggattttactgccagctcagaccttctccagcaacaggtcttaaacagtgggtggaagctgtacagggatacccaggatggggaagcctttcaaggtgaacagaatgatttcaactccagccaaggtgggaaagacttttgccaccaacatgggctgtttgagcaccaaaaaacccataatggggagaggccttatgagttcagtgaatgtggggaattgtttaggtacaactccaaccttattaaatatcagcaaaatcatgctggagaaaggccttatgagggcactgaatatggaaagacctttattagaaagtccaacctagttcagcaccagaaaattcacagtgaaggctttctttcaaaaaggtctgaccccattgaacatcaggagattctcagtagaccaacaccttatgaatgcacccagtgtgggaaggcctttcttacacaggctcatctggttggtcaccagaaaacccatactggagaacagccctatgaatgcaacaagtgtgggaagttttttatgtataactccaaactcatcagacatcagaaagttcacactggggagaggcgttacgagtgcagtgaatgtgggaaattgtttatggacagcttcacactcggtagacatcagagagttcatactggagaaaggccttttgaatgcagcatatgtggaaaattctttagtcaccgctccacactcaatatgcaccagagagttcatgctggcaaaaggctttataagtgtagcgaatgtgggaaagcctttagcctcaaacataatgttgttcagcatctgaaaattcatactggagaacggccttatgagtgcactgaatgtgagaaggcctttgttagaaagtcccacctagttcagcaccagaaaatccacactgatgcattttcaaaaaggtctgacctcattcaacacaagaggattgacattaggccaaggccttatacatgcagtgaatgtgggaaggccttccttacacaggctcatctggttggtcaccagaaaatccatactggagaacggccttatgaatgcactcaatgtgcgaaggcctttgttagaaagtcccacctagttcagcatgagaaaatccacactgatgcattttcaaaaaggtctgacctcattcaacacaagaggattgacctcaggccaaggccttatgtgtgtagtgaatgtgggaaggccttccttacacaggctcatctagatggtcaccagaaaatccagactggagaacggcgttatgaatgcaatgaatgtgggaaattctttttggacagctacaaacttgttattcatcagagaattcacactggagaaaagccttataaatgcagcaaatgtgggaaattctttagatatcgctgtacactgagtagacatcagaaagttcacactggagaaagaccttatgagtgtagtgaatgtgggaaattttttagagatagctacaaactcattattcatcagagagttcatactggagaaaagccttatgaatgcagcaactgtgggaagtttcttagataccgctctacattcattaaacatcataaagtttgcactggggagaagcctcatgagtgcagtaaatgtagggaattgtttaggactaaatcgagccttattatacatcagcagtctcacactggagaaagtccttttaagttaagggaatgtgggaaagacttcaacaaatgtaatactggtcagcgccaaaaaactcacactggagaaaggtcttatgagtgtggtgaatccagcaaagtgtttaaatacaactccagcctcattaaacatcagataattcatactggaaaaaggccttattggagtgaatgcaggaaagtcaccaaaactgtcacctcattcagcaccaaaaggttcacatcgga

SEQ ID NO: 142093 - DNA, 425 bp, Homo sapiens
  misc_feature (1)...(425): n = a,t,c or g
gagtgccggggtgcccagcgccgagccggagcccgacttggcaggtgctgctccgcctggttttagaggggtgatctcagccctgagatagtccccgcttctcccctgctgccctggccctctccgccagtcctggccccacgctgatggcgcccgggcagaggaaaagcttgccggttttatttttcctgagctagacctgaacacaacaaaagagcgcaaaggagacctgcggctcataaacacgaccacagagcctcttttctcctgctcagatttgcagttccagttttgccttgagcccaatgatcatgttaaggtgatccagggcaccgtgttcgtgttcaagtgtatgcaccccgcatcctgcgagctttgnggtggtgaggggaaagagatggctgggctggttggtgcttgagttg

SEQ ID NO: 142094 - DNA, 597 bp, Homo sapiens; identical to SEQ ID NO: 122520

SEQ ID NO: 142095 - DNA, 510 bp, Homo sapiens
tcagggttggcccagcctttctgcgatggcagcgaggggtctcttcggagcagccgagacgggtgtaacgccgtgggcgggagaagacggctggtgtccacgctctgcagggactcgagccttcagagctgtcgcagggggacgcgcgacccggttcccttcctcctccgcccagacgcgggggagagggggatccagcagccggtggctccgggagctcctcgccgcctcccgtgccaacctgaggatgcgtgttccccggatggaggggaagccaaaggctcctgaagagcccagggctgctgctgggagggtgggcttgggtttggccatcaaggctatagaggtttgattcttgctgctcatatcccatttgaaatcaacacatttaaactgcttaagcttgcatttcacctttggagaatccccatcctctgagtgcctccctgtcttctcttttgcttgctgttcttgtggaaaatagaggtatatctgggagtggtagcgcat

SEQ ID NO: 142096 - DNA, 1529 bp, Homo sapiens
cacaatctctcttcttcaaattctttccccaaaatgtcctttcccaacagctctcctgctgctaatacttttttagtagattccttgatcagtgcctgcaggagtgacagtttttattccagcagcgccagcatgtacatgccaccacctagcgcagacatggggacctatggaatgcaaacctgtggactgctcccgtctctggccaaaagagaagtgaaccaccaaaatatgggtatgaatgtgcatccttatatacctcaagtagacagttggacagatccgaacagatcttgtcgaatagagcaacctgttacacagcaagtccccacttgctccttcaccaccaacattaaggaagaatccaattgctgcatgtattctgataagcgcaacaaactcatttcggccgaggtcccttcgtaccagaggctggtccctgagtcttgtcccgttgagaaccctgaggttcccgtccctcgatattttagactgagtcagacctacgccaccgggaaaacccaagagtacaataatagccccgaaggcagctccactgtcatgctccagctcaaccctcgtggcgcggccaagccgcagctctccgctgcccagctgcagatggaaaagaagatgaacgagcccgtgagcggccaggagcccaccaaagtctcccaggtggagagccccgaggccaaaggcggccttcccgaagagaggagctgcctggctgaggtctccgtgtccagtcccgaagtgcaggagaaggaaagcaaagaggaaatcaagtctgatacaccaaccagcaattggctcactgcaaagagtggcagaaagaagaggtgcccttacactaagcaccaaacgctggaattagaaaaagagttcttgttcaatatgtacctcacccgcgagcgcccgccctagagatcagtaagagcgttaacctcaccgacaaggcaggtcaagattttggtttcaaaaccgccgaatgaaactcaagaagatgagccgagagaaccggatccgagaactgaccgccaacctcacgttttcttaggtctgaggccggtctgaggccggatcagaggccaggattggagagggggcaccgcgttccagggcccagtgctggaggactgggaaagggaaaacaaacactttcaccgctctttgtttgttgttttgttgtattttgttttcctgctagaatgtgactttggggtcattatgttcgtgctgcaagtgatctgtaatccctatgagtatatatatatatatatatatatatatataaaaacttagcacgtgtaatttattattttttcatcgtaatgcagggtaactattattgcgcattttcatttgggtcttaacttattggaactgtagagcatccatccatccatccatccagcaatgtgactttttcatgtctttcctaacacaaaaggtctatgtgtgtggttagtccatgaactcatggcattttgaatacatccagtactttaaaaatgacatatatattt

SEQ ID NO: 142097 - DNA, 2295 bp, Homo sapiens
gtccttaatccatcttgagctgattttttgtatagggctggacgttcgcttaggcaaggatttcatgaccaacaacctgaaaggaaatgcaataaaaacaaagataaatagctggaacctagttaaactaaagagcttttgcatggcaaaaaggaatagtcagcagagtaaacagacaacccacagaatgggaaagaatcttcacaatctatacatctgataaaggactaatatccagaatctacaatgaactcaaacaaattaatgagaaaaaacaaacaatcctatcacaaaatgggctaaggacacgagtagatgattctcaaaagaagatatacaaatggccaacaaacataggaaaaaacgctcaacatcacaaatgatcagggaaatgcaaatcaaaaccacaatgcgataccacctcactcctgcaagaatggccataataaaaaaattaaaaaaatagaagatgttggtgtgggtgtggtgaacagggaacacttctacactgctgacaacagaagaggtgatttactgtatacctgtaacacttggccacaactgaacacagaaacagtccagaatatcacagatccaggaaaaaggataaataggaactgttttgatgcgagcaagtggtggtctctggggctgtgtggacctacgccggcccaggagaaaccagcctcccgtaaacaccggcggcgagttgtagaaaagtccctccagggtcccagccctttgaaaaggaatcaaacctctatagccttgatggccaaacccaagcccaccctcccagcagcagccctgggctcttcaggagcctttggcttcccctccatccggttgtcaaaccgagcaggatatccgcagagattcgccaaccgtcttggcatgaaggtggaaacaacgggtcaccgccgccctgaatcagctcctgccaaagggctcattaaatccccctccagagcccccatcccaggactaatagattccttgatcagtgcctgcaggagtgacagtttttattccagcagcgccagcatgtacatgccaccacctagcgcagacatggggacctatggaatgcaaacctgtggactgctcccgtctctggccaaaagagaagtgaaccaccaaaatatgggtatgaatgtgcatccttatatacctcaagtagacagttggacagatccgaacagatcttgtcgaatagagcaacctgttacacagcaagtccccacttgctccttcaccaccaacattaaggaagaatccaattgctgcatgtattctgataagcgcaacaaactcatttcggccgaggtcccttcgtaccagaggctggtccctgagtcttgtcccgttgagaaccctgaggttcccgtccctggatattttagactgagtcagacctacgccaccgggaaaacccaagagtacaataatagccccgaaggcagctccactgtcatgctccagctcaaccctcgtggcgcggccaagccgcagctctccgctgcccagctgcagatggaaaagaagatgaacgagcccgtgagcggccaggagcccaccaaagtctcccaggtggagagccccgaggccaaaggcggccttcccgaagagaggagctgcctggctgaggtctccgtgtccagtcccgaagtgcaggagaaggaaagcaaaggtcggtatgagcagagttgccaccccagcggggcgcgcagcccgggaacccggcagagagggagtgccggggtgcccagcgccgagccggagcccgacttggcagaggaaaagcttgccggttttatttttcctgagctagacctgaacacaacaaaagagcgcaaaggagacctgcggctcataaacacgaccacagagcctcttttctcctgctcagatttgcagttccagttttgccttgagcccaatgatcatgttaaggtgatccagggcaccgtgttcgtgttcaagtgtatgcaccccgcatcctgcgagcttgggggtgaggaaatcaagtctgatacaccaaccagcaattggctcactgcaaagagtggcagaaagaagaggtgcccttacactaagcaccaaacgctggaattagaaaaagagttcttgttcaatatgtacctcacccgcgagcgccgcctagagatcagtaagagcgttaacctcaccgacaggcaggtcaagatttggtttcaaaaccgccgaatgaaactcaagaagatgagccgagagaaccggatccgagaactgaccgccaacctcacgttttcttag

SEQ ID NO: 142098 - DNA, 300 bp, Homo sapiens
tcatagcctttcttcttcttcttcttcttcttcttcttcttcttcttcttcttcttcttcttcttcttcttcttcttcttcttcctcttcttcttctttttcctcctcctcctcctcttcgtctctttctctttctccttctccttctcctccttctccttctccttctcctccttctcctccttctccttctccttcttcttccttcttccttcttcttcttcctcttcttcttctttcttcttcttcttctttcttcttcttcttcctttttttttttttttttttgagatggagcat

SEQ ID NO: 142099 - DNA, 241 bp, Homo sapiens
ccggtggagagccgacaccgtctggaaggatgagccctttttcttgcctcctttgcttttaccattgcccttccttcttatatctttccacattctagttctcctcctcctcctcctcctcctcttcttcttcttcttcttcttcttcttcttcttcttcttcttcttcttcttcttcttcttcttcttcttcttcttcttcttcttcttcttcttcttcttcttcttcttcttcttcctt

SEQ ID NO: 142100 - DNA, 165 bp, Homo sapiens
ttcttcttcttcttcttcttctacttcttcttcttcttcttcttcttcttcttcttcttcttcttcttcttcttcttcttcctcttcttcctcttcttcttcttttcttcttttcgtttccgtttttgaaacctgaaattctttgccgccgacattggctaccat

SEQ ID NO: 142101 - DNA, 417 bp, Homo sapiens
cttagttggcatttttgagaatattatataaatgaaattatataataaatcttcttcttcttcttcttcttcttcttcttcttcttcttcttcttcttcttcttcttcttcttcttcctcctcctcctcctcctcctcctcctcttcctcctcctcctcctcctcctcctcatgattgaaagctaatgctattgtttcctgaaagctcagctggggccgagggttgcagattggagggggctctctttccttccacatgggcctttccatggcctccttcagcttccttatggcatagggactacgttccaggagccagtgttccaagaggaccagaaagaagttgtataaccctttatgtacaagttttggaagtcttaaggagtcactttcttggcagttacagccctgccatat

SEQ ID NO: 142102 - DNA, 501 bp, Homo sapiens
tcttcttcttcttcttcttcttcttcttcttcttcttcttcttcttcttcttcttcttcttcttcgtcttcttttcttcttcttcttcttcttcttcttcttcttcttcttcttctccttcttcttctttttcttcttctttttttttttttttcaaaacctcctccttcacgaccctaccccgccccctgggctgtttgtcaaaagcctaacacggatctgtattccgccttagccttgcagcgtacctgccagtctcctgcgccctcttcgcattcagcggcaggcagctgcggcttggtgaattccgcgaattccgcgctggccccgggaccccctggtaactgaggttgcacgaattgagccgcaaccatagggcctaggcaccaaccctacttgggcatcttcttggtggagggtgctggacggtcttctgcaagtaaataagttattggttccagaaacacattggccagatctagtcatgtggctctgcttaat

SEQ ID NO: 142103 - DNA, 1215 bp, Homo sapiens
tcagctgcctagtgggttgtgccaaagaacaagaccacattttgtagtgaattcttggagcatttctctggcccaataacaacaacaacttcttcttcttcttcttcttcttcttcttcttcttcttcttcttcttcttcttcttctttcttcttcttcctcttcttcttcctcttcttcttcttcttcctcttcttcctcttcttcctcttcttccttcttcttccttcttcttccttcttctttcttcttctcattcttctccttcttctccttcttccccttccccttcttccccttcttccccttcttccccttcttcttcttcttcttcttcttcttcttcttcttcttcttcttcttcttcttcttcttcttcttcttcttcttcttcttcttcctccttctccttctccttctccttctccttctccttctccttctccttctccttcttcttcttcttcttcttcttcttcctctttgaggactaattgctctgtgattgtctttaccttggtcctggaccaactccaagaattcagtgactttacactggcttttcttagagcctcttggagacaacatcctaagatactgcagaccctgtgttttgtttttggttttgaaggccctctgagggccctcaaatggaccctgaggaaatggatacctgagcaggacaaggacctccaagaatggctccctcgcatccacagtactggccccttcgatgcaagtttcctctgctgccatgcaggcgaggggagcctctgacgctgtacctccctcccagctggggttccgactcacggctgaagacctggaccctaggaaccgtacttcccatgtgggcacagaaaggcagaacctcacctttaggtctccctcatcccctgtccagggttctgcagggccttcctcctccaggttgggttccacctccctgaaggtggccagctgcagcactgctgccccactcagggtgccctgaacgacaacagggaaggtcggctttcctggggcagaagactgagggggatatttcactggtatcttggtctcccagtagtggcggccagaggtgaaaccaggggagcccaggacagcacctgccaagttgaatctctcagcactgtttggccgattctgatggatcctcccacatcggacgctcctgaggtcttcagaaatgaggaggaggttgtgagccat

SEQ ID NO: 142104 - DNA, 729 bp, Homo sapiens
tcacacagcattgttgacactgccgtgttggctgagatatcgcagagctctgtgaaccagatggttctgtgccccgctcacaccctctgaaggacaggtaaagttgctgttaattagggggagagcagagagttgccagggaggctgcctgaatttccccagatgaagttgctttacagcgagggactgagaaaggggtctgcagctgatcctcctctcaatctcacaagtccgccttcctcttgctccgtttttgatgccggagttagcattaggggacatttccttcagtgctagctgtcgcaaagcatccactcccactttttggccctggcgttcccctgtactggggcatataaagtttgcaagtcctatgggcctctctttccagtgatggccaactaggccatcttttgattcatatgcagctagagtcaagagctccggggtactggttagttcataatgttgttctacctcccagcagactctgttgtcactttgtcccatgccaaatccaccaatctcagtaccattctttgatattccattcctaaccatgtctgtcttccatgggctcacaaaatcagcatgtgtgttgttctcttcttcttcttcttcttcttcttcttcttcttcttcttcttcttcttcttcttcttcttcttcttcttcttcttcttcttcttcttcttcttcttctcgatctactacaatccattcatccat

SEQ ID NO: 142105 - DNA, 1896 bp, Homo sapiens
tccacataggattccgtggcaagagtactattttgctgctttcatgtaggaaggtattgccccccttgcagtcaggccctcaaagcgcttgtacgtgtaattgatgaagacccagtctttgttcttgtagtagcaggagacaatgctggtggtgttacctgttggcttaagaatatcagattctggaaactcatcgaagtttgaggtatcatcaatgcttttgattagaaggtggagggatgttctctaatacctcaaaattagatccttggctttctcagagatgggaacttctggaggaaaagtcaaagtttctttccagttcatcaccttcttatatgtctcttgagaaagtcctctgaaaccatgcaacttaccgatgagcatctcatacatgatcaccccaagcgaccaccaatcacagagcttgttgtacccggtctgcatgaacacctcaggagcaatgtatgggattacaggtgtgagccaccgcacctgaccaagagaaacattttctgcattatttcagaagccacagatattacttactagctgacgtctatttcttttccaggtttctgcttaaggctaacgtaattgttaccacttactgaaatcactggggaggctgtggttcagattcctataaaattctgtcctatgtgcttttttcagtcctgtgcaaagatctggacgaggggaatgcagtggcacctggaagcttggagatgccagaaaccgcagagccctaaagggggtgtcacagcactggctcaggaagcccctaagtctgggctcctggaagggtagttcatgccaatgcccccccaataccttgctgtccaaaagaaggttgtctggtttgatgtctctgtggatgaatccaagttggtgaatagagtctatggctaatactgtttctgctatataaaactgagtctcctcttctgtcagagtgtcttaatgacctttcatcgtcaagtaattacctccaggcaggaactccatgattaggtagaggtttagcttatcctgaaaactatagaacattttcacaacccacaaactgtctgcctccactagaataaaagcactgctacaactgtgctttacctgctctttttcaagcatatctgctttacggagtattttcattgcatacacatgtcctacttgacaagtagctgtgatttttacctcaccaaatgctcctctgcctattacttttaaggactcaaaatcttccaatccaagtcttgttctcttcaaacgaagaaactctgtttccttccgaaggaaaacattgccaatattaattacctcctcatcttttaggccttcttctacaattttttcaaacaaaattctttacctcatttctcgttcttcatgttgagcgataaggttgctataaaaattctccagtgtcactttggtcattgtcaccctttcctttgtgtggttactcatggatgagcaaggacacagactttcctctaagcccttaccgactttttcctctggctgttgcttttccactctcttcttaagaattttccctgccttttcctgtgatgaagacggcggcagcaagcaactcaccagagcccagggagaggcagggctggggacggcggagagccgcagacgccccttcggccagtagtctcgacttgaaggctggcgaagccccggcggcggcagccaacgagccaaagacgggaggggacgcgtgagggactctgagacagggggcaacaggcggttacgactacaggactacaggcacgtgccaccatgcccagctaatcttttcttcttcttcttcttcctcttcttcttcttcttcttcttcttcttcttcttcttcttcttcttcttctcccttccccatgg

SEQ ID NO: 142106 - DNA, 477 bp, Homo sapiens
tcaggcaggtgctgtgattgttattccattaacaatgaggctttctgtggcctcaggcttcgtgttgtttattttcttctgtttactttttctattgtcttctctttggtgctgtctgttggtggaaccctgctgattctcagtgaagccaagcccacgtactttgccacttcctccgtgcagtctacccaactcttcttcttctccctcttcttcctcctcctcctcctcctcctcttcttcttcttcttcttcttcttcttcttcttcttcttcttcttcttcttcttcttcttcttcttctttgtgctggagggagaagaccctgggatttctgagcgaggcccgtggatgttgaagtcttcctgggtccccgactccatgctctcgcgccccagttactatgacgccctgcacaaccgcagctcggggcacgcccagcgccctgcaggacactcggcctccccggctcagcat

SEQ ID NO: 142107 - DNA, 453 bp, Homo sapiens
ctagttatatagaatagtagataaaggagccaattcttcttcttcttcttcttcttcttcttcttcttcttcttcttcttcttcttcttcttcttcttcttcttcttgttcttcttcttgttcttcttgttcttcttcttcttcttcttcttcttcttcttcttcttcttcttcttcttcttcttcttcttcttctccttctcctccttctccttctccttcttcttcctcttcctcttccttttcctcttcttcttcctcttcatcttctctctctcttggagcatacgtcttatattttatggtcacccattcatctccggtgctttgctgcctttgtaatctcatcattaacaatatatgagaagagtagttcttcagatttaggcataactgtgatttgttcttggctgctagcacactgggggtggattggcttttgttatgaatcat

SEQ ID NO: 142108 - DNA, 843 bp, Homo sapiens
ctagaagtccaagatcaaggtgtcaggagggccacgctttctctgaaatttgttggggagaatccttccttcctcttctagtttctgtgtttgccagccatccttggcattgcttggcttgaagatacacacttggtttgtagaaacatctgtgttttctctcttcttcttcttcttcttcttcttcttcttcttcttcttcttcttcttcttcttcttcttcttcttgtttttcctactgtctgtatcacagctgcctgccttgactaatctgacgcagacaaagtctggaaggaatagagttgacatccgaatagctgtaaatccgcagcggggcaggcagtctatgttagcatctaaaaggctgcagaggtagcggagggaaagctgaatgcggtgttcatggccacagtttcctttcattctataaagagtgtgcttgtcaagcaccatctggaagatgatatgcagccccttctccgtgacgaatgaagacacgcagaggcagattccagaacagcatctacatctttgttcattgatgtcagacacaaaattgagttgtttaaaaacttgctcgggaaggtccacggcttcatttttggtcagcgaaacgaagaacccaatggcagcaaccaactccagacacatctggtcagtcttgttctcccgagagtaggtctgttctaaacacttgacctgtgacagagcatccatgccacgcggctgctccatgaagtagacgccatcatcgtggtctctgcaggtcgtattgtcctgctccactttcctccgaggcttgggtgtgcacgcgctggagccctccctctctgggttggtcat

SEQ ID NO: 142109 - DNA, 1743 bp, Homo sapiens; identical to SEQ ID NO: 128696

SEQ ID NO: 142110 - DNA, 1561 bp, Homo sapiens
agctccagtgcgacgtgtccatggaggaggacagccggcaggagtggaccttcaccctgtatgactttgacaacaacggcaaggtcacccgagaggacatcaccagcttgctgcacaccatctatgaggtggcggactcctctgtcaaccactccccaacatccagcaagatgctgcgggtaaagctcaccgtggcccccgatggcagccagagcaagaggagcgtccttgtcaatcaggctgacctgcagagcgcaaggccccgagcagagaccaagcccactgaggacctgcggagctgggagaagaagcagcgagccccgctcaggttccagggtgacagccgcctggagcagtctggctgctaccaccattgcgtagatgagaacatcgagaggagaaaccactacttagatctcgccgggatagaaaactacacgtcccaatttgggcctgacttatgcccccccttattccctgttgtcacggactatgaagatccaaatgaacaccgaatccccttactaggcttattaagacaaataactcccccttcgaatcctgaaaacaactctgaccagtgtggcccggattgtcctctcttcaccagtggctccctcatcccatcccagctcagaaagccacacggacatccacaggtcagccgacgccttatttatagttccctactccaccctccctggaaacagccacctggaccaagggcagacactttacccaagctgagccgatcagatccttcctccttggaagttcggtttggggcctattcctgtaaagctgtgctgggactatccaaactggaccacaggcaagtgaggctactttattcctcgagtcaggatggcttcctctcctcctccaccaattattataatcatcgaacatatcctgggcttgtaaactggctgtttgtgttaacagagcccgagttgacaggggagctgggagacgatgacaggaaagggatgcacacaggtggcatcattagatggctgggacgccccagcagccaattgaagcccatctttcatgcagaagagagacgggtgccaccgccccctgaaaggctgctctgggatgcccctccagatctcgcaggagctcccaacaactccctggctgttaccgccttacctgaggggcaagaccgatgcaagggagagaagtggcagtggcaaggtgctgtgcccaagccctgtgcctgcgggtatgatacacggcaagaggccaagcaagtgcactcaccctctcgggtgagccttgccggtgttgtcaaagtcatacaagaaacccacaacccaaaacaagggcagcccatggccgtgattaagctctgcaccagtggcgaagggatcgagtgggagaccagaattccagctccgccctctgtgcggcctcaagggagttatgaacttctgagccttagacatgcttcctgagctgccaccaagctgcctcatggggctgtcctaaggattaatgtattaatccaatcccaggcacatcagtcattaataaaattaagaatacggtgaaa

SEQ ID NO: 142111 - DNA, 457 bp, Homo sapiens
gagtggtggaattcacttggacgctgcagaatggctcccgcaaagaagggtggcgagaagaaaaagggccgttctgccatcaacgaagtggtaacccgagaatacaccatcaacattcacaagcgcatccatggagtgggcttcaagaagcgtgcacctcgggcactcaaagagattcggaaatttgccatgaaggagatgggaactccagatgtgcgcattgacaccaggctcaacaaagctgtctgggccaaaggaataaggaatgtgccataccgaatccgtgtgcggctgtccagaaaacgtaatgaggatgaagattcaccaaataagctatatactttggttacctatgtacctgttaccactttcaaaagtaagttctccatcccataaagccatttaaattcattagaaaaatgtccttacctcttagaatgtgaattcatctgttaag

SEQ ID NO: 142112 - DNA, 605 bp, Homo sapiens
tttgcagttattgctgcactcctttaattccttatccagagcccaaaaaatgtagacaaaccctaaaaatgtagcagaagcatttccgcacactggtgtccagaatctagtttgtgcagaaatgtttccactagatttatagagtactcttcagaagaaagaggcgagggctcgtcatttggtcacccctttggacattttgcaactcttcaatgggtttccattgttggttgattgttataagcttttgaggtacagtagggtccacagtttcccaaggttctggatttttttttcgatcaaggatcacatcggttttccaaaagagaatacacagcgaaagatgaggctccacccgccgccacagtcatgaacaccaccaagggaatgagttccttccttttcatcaggagttggaaaaagctcatgatgacttcagcgaagaattgccaaatctagaaattaaaaatccaaagtattgatcgcctggtgggcgccaaaccgtccaccgcgctccgcaggccaactgcgggccggcgcgtccgcgtctctgcagatgggagactcacctggacgccgggcggtgcgcacggacgatggtaacg

SEQ ID NO: 142113 - DNA, 1072 bp, Homo sapiens
atgggctccggggcagccacagagggtgatgctggccttggaggcatgagggtggtgactcatagcggtaaaaaccctgtcttggctacctcaggaaatgagtggaatctgtggcttgacgttcctgtattcttgctgatgaaccactcacgatgtccacgtagtggctcctgccaggcgcttgtgaaagttggagaaaagaggtcgccttcccaccatgcccacagtgtgcctcggccccttgttcatggccctcggcagcagatgcctttcctttctctcatgcgcacaggccaggccagcccagcccaccaagccccctcccgagccccctcttggaggagcctcctctacacgggccctcgccaggaaggtgtgagcctcctcaggctgagcatggggcatgagaagaaaggactgggctctggagggctccagcatttaaggagcaggaggaggttggggagccagaggaagtggtcagagagggggttccacctcctactccccaaacctccaaactcctcacaagcacctaggggggccaagagcgaccggggtcggcagatttggcaattcttcgctgaagtcatcatgagctttttccaactcctgatgaaaaggaaggaatgctgggaggagaagagcagctgggatcgggatcagaggggcctagggcagctgtaccctagcacttttcccatgggcccgctcgctgaggctcgtccgctcctctctgctgggtcagcagaggagctccactcccccacctcctcagtacctgctggggtttgaggctgtgtcaggcttaggagcagcaaaggaagggccatggcagccaggcaaagcacctgcctctcggcattcactgaaaaagcctcaagggctgtggaggattcaaaggtggctggcgcacggtaatgctgatgctgccagtccaccaactccacctggagcaggactgtcctcgaaacctcagccctcaccccaaagtaaggaatgctcccagcttaaagtcaaaggggagaagaggaatgaaggaaaagatgcaggcaagaaatatctcacttaa

SEQ ID NO: 142114 - DNA, 381 bp, Homo sapiens
cacagctgccaggtgttaagatggcggtgcggggccgcgcccgcgctcccaggctctcctcccccagccttcctccggctggcagcacgactcgcgtagccgtgcgccgattgcctctcggcctgggcaatggtcccggctgccggtcgacgaccgccccgcgtcatgcggctcctcggctggtggcaagtattgctttgcagaggaaagtggtcgcttatggtcagaggagcagcctgctcaccctctccaggtgggggctgtgtacctgggtgaggaggagctcctgcatgacccgatgggccaggacagggcagcagaagaggccaatgcggtgctggggctggacacccaaggcgatcacatggtgatgctgtctgt

SEQ ID NO: 142115 - DNA, 486 bp, Homo sapiens
cttcacacccttccagcttttctcagaaggctctttaccagctgcaggtgttttcacaatggcttctgtctgattaaaaatgaagattttcagtgtttccagtgttcgatctgtatgattaaatctggccattggtttagctccttgaaataataaaatattaggaacagctacggtgccaaacctggtagaaaggaaaaaggtatgcattttatggggatctagctctattgtgctgtaaccatacttcacattcaactttttgacaggaggaacgatgatgaatgtcgggcatttgtgaagagagtcataatgagccgtttctttaagataattatgattagcactgtcacatcgaatgcgttttttatggccttgtggaccagttatgacataaggtaccgcttgttcagacttcttgaggtaagcagacaaaatgggtccattttcttctttttttaaaacatgctttatttctggaaacat

SEQ ID NO: 142116 - DNA, 1615 bp, Homo sapiens
agcggccgcccttttttttttttttttgcagtaaaaacaagaatagtgcatctattgaatatttttgcatttgcttattgcaatactagttaaaacaccagtttataattttttttatacattcagttgttcaacaaatgattcttttaatctgcctgaagtttcaagtcaacacgtcactggagaaaatgtatgaaactgtagcactaatttctgaaacgaagggattgaagttcctctttccaacttctttcagaccatcactactccacatgttcctggctcttgtcctgggaattagccaccggaatactctcaggttcggaagggtaggccatacataataaaactaattaaaaagaataagggaaaatacaaggcaaccagttccacactttttattcaaagtgctggggaaggaggggcctatttgggtcgggcttgaggttaccaccacattcttcttgggctttctattacctgtctggatttaaaaatggagggtttttcagtggtttccagtgttcgatctgtatgattaaatctgaccattggtttagctccttgaaaataataaaatattaggaacagctacggtgccaaacctggtagaaaggctgctgtgctgagatgcatccagtgccaaaaagtgaagagctggaaatgcccgggggcagagagttaaagtgaggggccaaactggcagaaaagcggccacccacggggtgtaaaacaggaactaagagtacaggtcactaccgtttggggttcagacaaatccataaggtcctgtgacaataatttaaaatttttcagagtgaaaatttcctaaaccctgtaatgtttctctccctcacagttcacctttggggatttccagactttcagtgttaattggagtcctctgtcggggcatgcgtcagattcccgccaacttctggctctgtgtaaatactcctcttctctgtcagggtaagtgtgctcacagcgccatcccagagagaaaaggctctctcggacgttgcacctttgagtcctccgctcctcacacgcaccacaggtgacgccgctaggctctgaactcactttgtcctcagcttcccccaggaatcacagacagcatcaccatgtgatcgccttgggtgtccagccccagcaccgcattggcctcttctgctgccctgtcctggcccatcgggtcatgcaggagctcctcctcacccaggtacacagcccccaccactggatccccagtgctcagcacagtgtttagcatatgatgagtgctcagtaagaatttgctagctgactgccctccacgccgcggacgggaagtcccagcacccacagcaatacttgccaccagccgaggagccgcatgacgcggggcggtcgtcgaccggcagccgggaccattgcccaggccgagaggcaatcggcgcacggctacgcgagtcgtgctgccagccggaggaaggctgggggaggagagcctgggagcgcgggcgcggccccgcgccgccatcttaacacctggcagctgtggcgggcgccatcttggagtcgggcggacggcctctatccgctggccgtcggcgctggactggagacctct

SEQ ID NO: 142117 - DNA, 437 bp, Homo sapiens
aggtaaacaaactgcaacttatatctgcaatttattttggtatagacaagagggatgccagtagcacactggtggcttcagaagaaattctcaacacctagctcgccagagagtctatgtatgggattgaacaatctgtaaactaaaggatcctaatcatgaaaataagtatgataaattataagtcactattggcactgttgtttatattagcctcctggatcatttttacagttttccagaactccacaaaggtttggtctgctctaaacttatccatctccctccattactggaacaactccacaaagtccttattccctaaaacaccactgatatcattaaagccactaacagagactgaactcagaataaaggaaatcatagagaaactagatcagcagatcccacccagacctttcacccacgtgaacacc

SEQ ID NO: 142118 - DNA, 2502 bp, Homo sapiens
atggttcaccaccgagtgaatggagcagacgaggaggaccacaggaggcaggaagctgacctgtcaggacagtatcaacaggatacttgttcttggttggatttagccaatagaagatccagaggggaggaggagaatgagagagttcattctcagatctatccagggtgtccttcgaatggctccccaaatccaaccaaagcctcttcttacgaagtcatcgacatctgtctctcaggccaggcttcttcaaaacaaaaggcgcttctccctcgccagtgctcaggctcagcaaaggctcaggcagagagagaaaaaatagaagagacatgccaagttggaatgaagcctcctgtccctggtggttatactttacaaggaaaatggataacaacattttgcaaccaggttcagttagacacaattaagataaatggctgtttgaaaggcaaactcatttacctcctgggagactctacactacgtcagtggatctactacttccccaaagttgtaaaaacactgaagttttttgatcttcatgaaactggaatctttaagaaacatttgcttctggatgcagaaagacacactcagattcaatggaaaaaacatagctatcccttcgtcactttccagctctactctctgatagatcatgattatatccctcgggaaattgaccggctatcaggtgacaaaaacacagccatcgtcatcacctttggccagcactttagaccatttcccattgacatttttattcgcagggccatcggtgttcaaaaggctattgaaagactgttcctaagaagcccagccactaaagcctcagttagcaaactcaaatgcttttgggaaccaacccggggaacccaaaagtatgaagccagtcaggtaaccggagcgttcccgctcaggccgaagaagggagcagctactccatcccagctggttattgtcaactcatctgatgctcataacaaatgtgatgaagaaagcgaggttcggataaaaagcaccttggggttgaagttggactgtaagaaagggactgctctcactaaagggaccaaggaagatgaggaggatggtgcaatgagtggagtagaccagctttgcctgctgtcctctgtggattcaagtggcagacctcagctgatgactgactggcatggggtaaaaggacagttctcttgcttcaagtgcggggaggaaaaggaactacagcagaagaggaagctaacaggcaagggctggaatgtatttttcatggttctggaggttgggaagaccaagatcaaggcgctggaagttttggcatctggtaagggcactgcttcttggtttatacaggactttcttgctgtgaactcatcacatggcaggtggggcaagaaggaggagtttctctttcaaaagtggaaagttgatccctggctcccagtgcgatgggaactggtgcagactggcactctcacccacttggtcccagaaggcagatcagacagcgtgacttgtgcctggatgcccttagggagcaagcaggtctataaggagcctgctggtttccctgacatgctccgcctgagaggctccagagtgaggatggcagtggtgacagttcactcccagctcagaaacctgtcacttggagatcagcattttaactaccccctgcccctcaagaaaaaaaaaaaaaaaaaaaagaaggacaccttaatttaccctgctgattggcttgagagctgtcagagtgacaacctgtctctggctgaaagggacctggtgttagttctcaggctggctttgtgtgcattatatggtctgcttgctcctggaaacggcaacactgagagcgctgaactgcaccctggtgacaaaactgaggctcagaggccaatggccttgttcaaggtcacacgcccactaaatgagagacccggagacctggcatcacacgtgagcagatttgccaagtctttcctgaaacctgcaatggagagtttagagtgtccccagtcccgtttggtaggagaggcaaggaagggacacagtgagctggtggagaagatagagaggggctgtgagtctacggttggggaagggaccaccaggaaaggaagcaagagggaccatttagacagtcagtgcaagctgggacaaaggagccagccttggggacagatgactcagagagagctgggagatggacttttccctccctccttcctggagctgcctccttccctccgcttcttgtgttctcccatgggcccttacctcagagaagccagcagcggccatgtgctcctgcattgcccacacttggcaggtgtgctaccttctggccttgggagaatattgtctgctgaagccaagagagaaccgtttggtatcccaagttccccacctggttccttaggttctgaaatctaccctttccctaaattagggtggccaaccatccccagtgatctcagaattgagagattcccctga

SEQ ID NO: 142119 - DNA, 1773 bp, Homo sapiens
atgcctcgccctgcttcagctcatgcacggtgtgctgcatccactgtcctgcacccactgtccggcactccccatgagatgaaccaagtacctcagttggaaattcagaaatcacccgtcttctgcatcactcatgctgggaactgtagactggagctgttcttattctgccatcttggctccaccccgctcgaatgtattgtctataatttaaatgcttttgagtttctttggtctgctctaaacttatccatctctgtccattactggaacaactccgcaaagtccttattccctaaaacatcactgataccattaaagccactaacagagactgaactcagaataaaggaaatcatagagaaactagatcagcagatcccacccagacctttcacccatgtgaacaccaccaccagtgccacacacagcacagccaccatcctcaaccctcgagatacatactgcaggggagaccagctggacatcctactggaggtgagggaccacttgggacagaggaagcaatatggtggggatttcctgagggccaggatgtcctccccagcactgacggcaggtgcttcaggaaaggtgatggacttcaacaatggcacctacctggtcagcttcactctgttctgggagggccaggtctccctgtctctgctgctcatccaccccagtgaaggggcgtcggctctctggagggcaaggaaccaaggctatgataaaattattttcaaaggcaaatttgttaatggcacctctcatgtcttcactgaatgtggcctgaccctaaactcaaatgctgaactctgtgaatatctggatgacagagaccaagaagccttctattgtatgaagcctcaacacatgccctgtgaggctctgacctacatgaccacccggaatagagaggtatcttatcttacagacaaggaaaacagccttttccacaggtccaaagtgggagttgaaatgatgaaggatcgtaaacacattgatgtcactaattgtaacaagagagaaaaaatagaagagacatgccaagttggaatgaagcctcctgtccctggtggttatactttacaaggaaaatggataacaacattttgcaaccaggttcagttagacacaattaagataaatggctgtttgaaaggcaaactcatttacctcctgggagactctacactacgtcagtggatctactacttccccaaagttgtaaaaacactgaagttttttgatcttcatgaaactggaatctttaagaaacatttgcttctggatgcagaaagacacactcagattcaatggaaaaaacatagctatcccttcgtcactttccagctctactctctgatagatcatgattatatccctcgggaaattgaccggctatcaggtgacaaaaacacagccatcgtcatcacctttggccagcactttagaccatttcccattgacatttttattcgcagggccatcggtgttcaaaaggctattgaaagactgttcctaagaagcccagccactaaagtgattattaagacagaaaacatcagggagatgcacatagagacagagaggtttggagacttccatggttatattcactatcttatcatgaaggatattttcaaagacctcaacgtgggcatcattgatgcctgggacatgaccattgcatatggcactgacactatccacccacctgatcatgtgattggaaatcagattaacatgttcttaaactacatttgctaa

SEQ ID NO: 142120 - DNA, 273 bp, Homo sapiens
agtcgacctgcaggcatgcaagcttggcactggccgtcgttttactacgtcgtgactgggaaaacctggcgttacccaacttaatcgccttgcagcacatccccctttcgccagctggcgtaatagcgaagaggcccgcaccgatcgcccttcccaacagttgcgcacctgattggcgaatggcgcctgatgcgaaacgctgggtgaaagtaaaagatgctgaagatcagttgggtgcacgagtgggttacatcgaactggatctcaacagcg

SEQ ID NO: 142121 - DNA, 2190 bp, Homo sapiens
ttaccaatgcttaatcagtgaggcacctatctcagcgatctgtctatttcgttcatccatagttgcctgactccccgtcgtgtagataactacgatacgggagggcttaccatctggccccagtgctgcaatgataccgcgagacccacgctcaccggctccagatttatcagcaataaaccagccagccggaagggccgagcgcagaagtggtcctgcaactttatccgcctccatccagtctattaattgttgccgggaagctagagtaagtagttcgccagttaatagtttgcgcaacgttgttgccattgctacaggcatcgtggtgtcacgctcgtcgtttggtatggcttcattcagctccggttcccaacgatcaaggcgagttacatgatcccccatgttgtgcaaaaaagcggttagctccttcggtcctccgatcgttgtcagaagtaagttggccgcagtgttatcactcatggttatggcagcactgcataattctcttactgtcatgccatccgtaagatgcttttctgtgactggtgagtactcaaccaagtcattctgagaatagtgtatgcggcgaccgagttgctcttgcccggcgtcaatacgggataataccgcgccacatagcagaactttaaaagtgctcatcattggaaaacgttcttcggggcgaaaactctcaaggatcttaccgctgttgagatccagttcgatgtaacccactcgtgcacccaactgatcttcagcatcttttactttcaccagcgtttgggggtgttctggtgtggagctgtcgtcatgcaggcttttgttggctttgggttggggttcgggagcggcgataccgtaaagcacgaggaagcggtcagcccattcgccgccaagctcttcagcaatatcacgggtagccaacgctatgtcctgatagcggtccgccacacccagccggccacagtcgatgaatccagaaaagcggccattttccaccatgatattcggcaagcaggcatcgccatgggtcacgacgagatcctcgccgtcgggcatgcgcgccttgagcctggcgaacagttcggctggcgcgagcccctgatgctcttcgtccagatcatcctgatcgacaagaccggcttccatccgagtacgtgctcgctcgatgcgatgtttcgcttggtggtcgaatgggcaggtagccggatcaagcgtatgcagccgccgcattgcatcagccatgatggatactttctcggcaggagcaaggtgagatgacaggagatcctgccccggcacttcgcccaatagcagccagtcccttcccgcttcagtgacaacgtcgagcacagctgcgcaaggaacgcccgtcgtggccagccacgatagccgcgctgcctcgtcctgcagttcattcagggcaccggacaggtcggtcttgacaaaaagaaccgggcgcccctgcgctgacagccggaacacggcggcatcagagcagccgattgtctgttgtgcccagtcatagccgaatagccagagggcgccccagctggcaattccggttcgcttgctgtccataaaaccgcccagtctagctatcgccatgtaagcccactgcaagctacctgctttctctttgcgcttgcgttttcccttgtccagatagcccagtagctgacattcatccggggtcagcaccgtttctgcggactggctttctacgtgttccgcttcctttagcagcccttgcgccctgagtgcttgcggcagcgtgaagctagcttggcttggagcccatctctccgcatcacctttggtaaaggttctaagctcaggtgagaacatccctgcctgaacatgagaaaaaacagggtactcatactcacttctaagtgacggctgcatactaaccgcttcatacatctcgtagatttctctggcgattgaagggctaaattcttcaacgctaactttgagaatttttgtaagcaatgcggcgttataagcatttaatgcattgatgccattaaataaagcaccaacgcctgactgccccatccccatcttgtctgcgacagattcctgggataagccaagttcatttttctttttttcataaattgctttaaggcgacgtgcgtcctcaagctgctcttgtgttaatggtttcttttttgtgctcat

SEQ ID NO: 142122 - DNA, 885 bp, Homo sapiens
gctcaaggcgcgcatgcccgacggcgaggatctcgtcgtgacccatgcgatgcctgcttgccgaatatcatggtggaaaatggccgcttttctggattcatcgactgtggccggctgggtgtggcggaccgctatcaggacatagcgttggctacccgtgatattgctgaagagcttggcggcgaatgggctgaccgcttcctcgttgggcttcggaatcgttttccgggacgccgctggatgatcctccagcgcggggatctcatgctggagttcttcgcccaccccgggctcgatcccctcgcgagttggttcagctgctgcctgaggctggacgacctcgcggagttctaccggcagtgcaaatccgtcggcatccaggaaaccagcagcggctatccgcgcatccatgcccccgaactgcaggagtggggaggcacgatggccgctttgattccaacctatggaactgatgaatgggagcagtggtggaatgcctttaatgaggaaaacctgttttgctcagaagaaatgccatctagtgatgatgaggctactgctgactctcaacattctactcctccaaaaaagaagagaaaggctggcggggttgccttactggttagcagaatgaatcaccgatacgcgagcgaacgtgaagcgactgctgctgcaaaacgtctgcgacctgagcaacaacatgaatggtcttcggtttccgtgtttcgtaaagtctggaaacgcggaagtcagcgctcttccgcttcctcgctcactgactcgctgcgctcggtcgttcggctgcggcgagcggtatcagctcactcaaaggcggtaatacggttatccacagaatcaggggataacgcaggaaagaacatgtga

SEQ ID NO: 142123 - DNA, 1188 bp, Homo sapiens
atgagtattcaacatttccgtgtcgcccttattcccttttttgcggcattttgccttcctgtttttgctcacccagaaacgctggtgaaagtaaaagatgctgaagatcagttgggtgcacgagtgggttacatcgaactggatctcaacagcggtaagatccttgagagttttcgccccgaagaacgttttccaatgatgagcacttttaaagttctgctatgtggcgcggtattatcccgtgttgacgccgggcaagagcaactcggtcgccgcatacactattctcagaatgacttggttgagtactcaccagtcacagaaaagcatcttacggatggcatgacagtaagagaattatgcagtgctgccataaccatgagtgataacactgcggccaacttacttctgacaacgatcggaggaccgaaggagctaaccgcttttttgcacaacatgggggatcatgtaactcgccttgatcgttgggaaccggagctgaatgaagccataccaaacgacgagcgtgacaccacgatgcctgtagcaatggcaacaacgttgcgcaaactattaactggcgaactacttactctagcttcccggcaacaattaatagactggatggaggcggataaagttgcaggaccacttctgcgctcggcccttccggctggctggtttattgctgataaatctggagccgaagtaaggttccttcacaaagatccggaccaaagcggccatcgtgcctccccactcctgcagttcgggggcatggatgcgcggatagccgctgctggtttcctggatgccgacggatttgcactgccggttgggcgttcgcttggtcggtcatttcgaaccccagagtcccgctcagaagaactcgtcaagaaggcgatagaaggcgatgcgctgcgaatcgggagcggcgataccgtaaagcacgaggaagcggtcagcccattcgccgccaagctcttcagcaatatcacgggtagccaacgctatgtcctgatagcggtccgcacacccagccggccacagtcgatgaatccagaaaagcggccattttccaccatgatattcggcaagcaggcatcgccatgggtcacgacgagatcctcgccgtcgggcatgcgcgccttgagcctggcgaacagttcggctggcgcgagcccctga

SEQ ID NO: 142124 - DNA, 3271 bp, Homo sapiens
atgactatcgtcgccgcacttatgactgtcttctttatcatgcaactcgtaggacaggtgccggcagcgctctgggtcattttcggcgaggaccgctttcgctggagcgcgacgatgatcggcctgtcgcttgcggtattcggaatcttgcacgccctcgctcaagccttcgtcactggtcccgccaccaaacgtttcggcgagaagcaggccattatcgccggcatggcggccgacgcgctgggctacgtcttgctggcgttcgcgacgcgaggctggatggccttccccattatgattcttctcgcttccggcggcatcgggatgcccgcgttgcaggccatgctgtccaggcagcctaacttcgatcattggaccgctgatcgtcacggcgatttatgccgcctcggcgagcacatggaacgggttggcatggattgtaggcgccgccctataccttgtctgcctccccgcgttgcgtcgcggtgcatggagccgggccacctcgacctgaatggaagccggcggcacctcgctaacggattcaccactccaagaattggagccaatcaattcttgcggagaactgtgaatgcgcaaaccaacccttggcagaacatatccatcgcgtccgccatctccagcagccgcacgcggcgcatctcgggcagcgttgggtcctgcagatccggctgtggaatgtgtgcttttgcaaaaagcttcacgctgccgcaagcactcagggcgcaagggctgctaaaggaagcggaacacgtagaaagccagtccgcagaaacggtgctgaccccggatgaatgtcagctactgggctatctggacaagggaaaacgcaagcgcaaagagaaagcaggttctccggccgcttgggtggagaggctattcggctatgactgggcacaacagacaatcggctgctctgatgccgccgtgttccggctgtcagcgcaggggcgcccggttctttttgtcaagaccgacctgtccggtgccctgaatgaactgcaggacgaggcagcgcggctatcgtggctggccacgacgggcgttccttgcgcagctgtgctcgacgttgtcactgaagcgggaagggactggctgctattgggcgaagtgccggggcaggatctcctgtcatctcaccttgctcctgccgagaaagtatccatcatggctgatgcaatgcggcggctgcatacgcttgatccggctacctgcccattcgaccaccaagcgaaacatcgcatcgagcgagcacgtactcggatggaagccggtcttgtcgatcaggatgatctggacgaagagcatcaggggctcgcgccagccgaactgttcgccaggctcaaggcgcgcatgcccgacggcgaggatctcgtcgtgacccatggcgatgcctgcttgccgaatatcatggtggaaaatggccgcttttctggattcatcgactgtggccggctgggtgtggcggaccgctatcaggacatagcgttggctacccgtgatattgctgaagagcttggcggcgaatgggctgaccgcttcctcgtgctttacggtatcgccgctcccgattcgcagcgcatcgccttctatcgccttcttgacgattcttctgagcgggactctggggttcgaaatgaccgaccaagcgacgccaacctgccatcacgagatttcgattccaccgccgccttctatgaaaggttgggcttcggaatcgttttccgggacgccggctggatgatcctccagcgcggggatctcatgctggagttcttcgcccaccccgggctcgatcccctcgcgagttggttcagctgctgcctgaggctggacgacctcgcggagttctaccggcagtgcaaatccgtcggcatccaggaaaccagcagcggctatccgcgcatccatgcccccgaactgcaggagtggggaggcacgatggccgctttgattccaacctatggaactgatgaatgggagcagtggtggaatgcctttaatgaggaaaacctgttttgctcagaagaaatgccatctagtgatgatgaggctactgctgactctcaacattctactcctccaaaaaagaagagaaaggtcgttcgctccaagctgggctgtgtgcacgaaccccccgttcagcccgaccgctgcgccttatccggtaactatcgtcttgaagtccaacccggtaagacacgacttatcgccactggcagcagccactgcagaactttaaaagtgctcatcattggaaaacgtttcttcggggcgaaaactctcaaggatcttaccgctgttgagatccagttcgatgtaacccactcgtgcacccaactgatcttcagcatcttttactttcaccagcgtttctgggcacttgtccggctgcccccccacatctcacagtgtgacgaagtcttccggttcttcgaggctcgacccgaggatgtcaaccctccaaaagagaggcaaatggaaggttgtggacagagccctggaacctctccacagcagcctcccttcactctgcaggtagttactgagtgccagctgtatgccagcccaggcctgggtacagagcagccaccccaaaaaggctgggggaatggaattgggttggccgagctgaaggaaggcctacagagccctttggagcctctggcggaaggggccatccccagacatagccggagggagctgtccaaaaagcctgtgtttcctactgtgcttagggtgactgcctggggtttcctggtgcccttctcctggggaggcctgggctccaacctcccactgagggagccactggttggtgctgcaggaaccagaggaaagagcctggcagccgcagggaagctgagtttctgtaacgagtgtggagacaggactgtgattcactcaaggcctgaggtcggcgccaacaaaggttatcaggaaggcctgcagggaggaggccaggctcatgtgtcccttgttccagaagagccagatcaggatagtgcccatgtccccagtgactgctgggctctgaaggtcacccccaagtcagctgtctggcagcccagccggcctcttgagcagttcccagtggctgtaggccccgcagacaggcatcctgggcccagcagccaatgtcagctggcagacagaaggtggctcttcctggcttcacctctcactctgggaactctgaacggcaggatggcaatctccattccccagcgaggcctgctgcccgctgctg

SEQ ID NO: 142125 - DNA, 2559 bp, Homo sapiens
  misc_feature (1)...(2559): n = a,t,c or g
tcactcaaaggcggtaatacggttatccacagaatcaggggataacgcaggaaagaacatgtgagcaaaaggccagcaaaaggccaggaaccgtaaaaaggccgcgttgctggcgtttttccataggctccgccccccggctccagatttatcagcaataaaccagccagccggaagggccgagcgcagaagtggtcctgcaactttatccgcctccatccagtctattaattgttgccgggaaggctcgtcgtttggtatggcttcattcagctccggttcccaacgatcaaggcgagttacatgatcccccatgttgtgcaaaaaagcggttagctccttcggtcctccgatcgttgtcagaagtaagttggccgcagtgttatcactcatggttatggcagcactgcataattctcttactgtcatgccatccgtaagatgcttttctgtgactggtgagtactcaaccaagtcattctgagaatagtgtatgcggcgaccgagttgctcttgcccggcgtcaacacgggataataccgcgccacatagcagaactttaaaagtgctcatcattggaaaacgttcttcggggcgaaaactctcaaggatcttaccgctgttgagatccagttcgatgtaacccactcgtgcacccaactgatcttcagcatcttttactttcaccagcgtttctcctctttgaaactttctctggctaacacagccaaatataatactttttcctttgaacttattaatgctacaaaaatattgacacttagtatgatttactgtatttacttcacatgttgtcttatctctgtaactagtttttcttcttttacaatgatagacttttgcattgggaccaatgaatctggtgtgaaaaaccctgctgtagtagtgaaagagcatcaggagatactgactgtaccaggcagccaagtcacctagaagtctttctgaagcatggccgggccttacccctggagtctctgatgcaggtctgaggcccaggaacttgcatttctcattggttcccagctgatgctgatactgttggtccagcatgacacagaaccactgatgcagaggtggcagtgggtgtgcggtttgtgccgagctggcgcctggtgctgtgcacacagtggccgccgagcgggcaggggcccaggaggcggcagctggagctggtcctccacaattaggagggctgattgcctgggccacacacctgcagcatagtgctgctgtaccgctgctgtcccaacgcatgtgccacacttgctgtctgtcccctaggaagcttgtaattggctgcagggcagccaagtcactcagctcctctccctgtgggaagtggctgtgtgctgcgttaatccgccagccctctgtcaaggggcttccttcctgtggggtgcccctcccgctgtcactctcccgcatccaaatgtgctcttcagaagccacttcctcctgggaactgaacccagactttggggaagctgccaccagtccatagtgagagtcaggcttcctcagagtgtggtatcgacggcactgctgccagataacaccaccggggaaacattccatcatgatggccgtgcggacataggaagccagttcatccatcgctttcttgtctgctgccatttgcttgttctgcgctggctcatcacgctggataccaaggctgatgttgtagatattggtcaccggctgaggtgtttcgattgccgctgcgtggatagcaccatttgcgatagnggcgtccttgatgaatgacactccattgcgaataagttcgaaggagacggtgtcacgaatgcgctggtccagctcgtcgattgccttttgtgcagcagaggtatcaatctcaacgccaagcgtcatcgaagcgcaatattgctgctcaccaaaacgcgtattgaccaggtgttcaacggcaaatttctgcccttctgatgtcagaaaggtaaagtgattttctttctggtattcagttgctgtgtgtctggtttcagcaaaaccaagctcgcgcaattcggtgtcntctttatcatgcaactcgtaggacaggtgccggcagcgctctgggtcattttcggcgaggcaccgtttcgctggagcgcgacgatgatcggcctgtcgcttgcggtattcgaaatcttgcacgccctcgctcaagccttcgtcaatggcgatagctagactgggcggttttatggacagcaagcgaaccggaattgccagctggggcgccctctggtaaggttgggaagccctgcaaagtaaactggatggctttcttgccgccaaggatctgatggcgcaggggatcaagatctgatcaagagacaggatgaggatcgtttcgcatgattgaacaagatggattgcacgcaggttctccggccgcttgggtggagaggctattcggctatgactgggcacaacagacaatcggctgctctgatgccgccgtgttccggctgtcagcaggggcgcccggttctttttgtcaagaccgacctgtccggtgccctgaatgaa

SEQ ID NO: 142126 - DNA, 2931 bp, Homo sapiens
tcactcaaaggcggtaatacggttatccacagaatcaggggataacgcaggaaagaacatgtgagcaaaaggccagcaaaaggccaggaaccgtaaaaaggccgcgttgctggcgtttttccataggctccgccccccggctccagatttatcagcaataaaccagccagccggaagggccgagcgcagaagtggtcctgcaactttatccgcctccatccagtctattaattgttgccgggaagctagagtaagtagttcgccagttaatagtttgcgcaacgttgttgccattgctgcaggcatcgtggtgtcacgctcgtcgtttggtatggcttcattcagctccggttcccaacgatcaaggcgagttacatgatcccccatgttgtgcaaaaaagcggttagctccttcggtcctccgatcgttgtcagaagtaagttggccgcagtgttatcactcatggttatggcagcactgcataattctcttactgtcatgccatccgtaagatgcttttctgtgactggtgagtactcaaccaagtcattctgagaatagtgtatgcggcgaccgagttgctcttgcccggcgtcaacacgggataataccgcgccacatagcagaactttaaaagtgctcatcattggaaaacgttcttcggggcgaaaactctcaaggatcttaccgctgttgagatccagttcgatgtaacccactcgtgcacccaactgatcttcagcatcttttactttcaccagcgtttcacagaagtaaggttccttcacaaagatccggaccaaagcggccatcgtgcctccccactcctgcagttcgggggcatggatgcgcggatagccgctgctggtttcctggatgccgacggatttgcactgccggtagaactccgcgaggtcgtccagcctcaggcagcagctgaaccaactcgcgaggggatcgagcccggggtgggcgaagaactccagcatgagatccccgcgctggaggatcatccagccggcgtcccggaaaacgattccgaagcccaacctttcatagaaggcggcggtggaatcgaaatctcgtgatggcaggttgggcgtcgcttggtcggtcatttcgaaccccagagtcccgctcagaagaacgtaaagcacgaggaagcggtcagcccattcgccgccaagctcttcagcaatatcacgggtagccaacgctatgtcctgatagcggtccgccacacccagccggccacagtcgatgaatccagaaaagcggccattttccaccatgatattcggcaagcaggcatcgccatgggtcacgacgagatcctcgccgtcgggcatgcgcgccttgagcctggcgaacagttcggctggcgcgagcccctgatgctcttcgtccagatcatcctgatcgacaagaccggcttccatccgagtacgtgctcgctcgatgcgatgtttcgcttggtggtcgaatgggcaggtagccggatcaagcgtatgcagccgccgcattgcatcagccatgatggatactttctcggcaggagcaaggtgagatgacaggagatcctgccccggcacttcgcccaatagcagccagtcccttcccgcttcagtgacaacgtcgagcacagctgcgcaaggaacgcccgtcgtggccagccacgatagccgcgctgcctcgtcctgcagttcattcagggcaccggacaggtcggtcttgacaaaaagaaccgggcgcccctgcgctgacagccggaacacggcggcatcagagcagccgattgtctgttgtgcccagtcatagccgaatagcctctccacccaagcggccggagaacctgctttctctttgcgcttgcgttttcccttgtccagatagcccagtagctgacattcatccggggtcagcaccgtttctgcggactggctttctacgtgttccgcttcctttagcagcccttgcgccctgagtgcttgcggcagcgtgaagctttttgcaaaagcaatccatgccaacccgttccatgtgctcgccgaggcggcataaatcgccgtgacgatcagcggtccaatgatcgaagttaggctggtaagagccgcgagcgatccttgaagctgtccctgatggtcgtcatctacctgcctggacagcatggcctgcaacgcgggcatcccgatgccgccggaagcgagaagaatcataatggggaaggccatccagcctcgcgtcgcgaacgccagcaagacgtagcccagcgcgtcggccgccatgccggcgataatggcctgcttctcgccgaaacgtttggtggcgggaccagtgacgaaggcttgagcgagggcgtgcaagattccgaataccgcaagcgacaggccgatcatcgtcgcgctccagcgaaagcggtcctcgccgaaaatgacccagagcgctgccggcacctgtcctacgagttgcatgataaagaagacagtcataagtgcggcgacgatagtcatgccccgcgcccaccggaaggagctgactgggttgaaggctctcaagggcatcggtcgacgctctcccttatgcgactcctgcattaggaagcagcccagtagtaggttgaggccgttgagcaccgccgccgcaaggaatggtgcatgcaaggagatggcgcccaacagtcccccggccacggggcctgccaccatacccacgccgaaacaagcgctcatgagcccgaagtggcgagcccgatcttccccatcggtgatgtcggcgatataggcgccagcaaccgcacctgtggcgccggtgatgccggccacgatgcgtccggcgtagaggatcttggcagtcacagcatgcgcatatccatgcttcgaccatgcgctcacaaagtaggtgaatgcgcaatgtagtacccacatcgtcat

SEQ ID NO: 142127 - DNA, 1011 bp, Homo sapiens
ttcttctgagcgggactctggggttcgaaatgaccgaccaagcgacgcccaacctgccatcacgagatttcgattccaccgccgccttctatgaaaggttgggcttcggaatcgttttccgggacgccggctggatgatcctccagcgcggggatctcatgctggagttcttcgcccaccccgggctcgatcccctcgcgagttggttcagctgctgcctgaggctggacgacctcgcggagttctaccggcagtgcaaatccgtcggcatccaggaaaccagcagcggctatccgcgcatccatgcccccgaactgcaggagtggggaggcacgatggccgctttggtccggatctttgtgaaggaaccttacttctgtgaaacgctggtgaaagtaaaagatgctgaagatcagttgggtgcacgagtgggttacatcgaactggatctcaacagcggtaagatccttgagagttttcgccccgaagaacgttttccaatgatgagcacttttaaagttctgctatgtggcgcggtattatcccgtgttgacgccgggcaagagcaactcggtcgccgcatacactattctcagaatgacttggttgagtactcaccagtcacagaaaagcatcttacggatggcatgacagtaagagaattatgcagtgctgccataaccatgagtgataacactgcggccaacttacttctgacaacgatcggaggaccgaaggagctaaccgcttttttgcacaacatgggggatcatgtaactcgccttgatcgttgggaaccggagctgaatgaagccataccaaacgacgagcgtgacaccacgatgcctgcagcaatggcaacaacgttgcgcaaactattaactggcgaactacttactctagcttcccggcaacaattaatagactggatggaggcggataaagttgcaggaccacttctgcgctcggcccttccggctggctggtttattgctgataaatctggagccg

SEQ ID NO: 142128 - DNA, 939 bp, Homo sapiens
tcatccgtttataatgttgcccggaagcagataagtagtcgccagtaatagttgcgcacgttttccattgatacagcatcgtgtgtcacgctgtcgtttgtatggctcattcagttccgtttcccaacgatcaaggcgagttacatgatcccccatgttgtgcaaaaaagcggttagctccttcgttcctccgatcgttgtcagaagtaagttggccgcagtgttatcactcatggttatggcagcactgcataattctcttactgtcatgccatccgtaagatgcttttctgtgactggtgagtactcaaccaagtcattctgagaatagtgtatgcggcgaccgagttgctcttgcccggcgtcaatacgggataataccgcgccacatagcagaactttaaaagtgctcatcattggaaaactttcttcggggcgaaaactctcaaggatcttaccgctgttgagatccagttcgatgtaacccactcgtgcacccaactgatcttcagcatcttttactttcaccagcgtttctgggtgagcaaaaacaggaaggcaaaatgccgcaaaaaagggaataagggcgacacggaaatgttgaatactcatactcttcggcccgctaacgcggagatacgccccgacttcgggtaaaccctcgtcgggaccactccgaccgcgcacagaagctctctcatggctgaaagcgggtatggtctggcagggctggggatgggtaaggtgaaatctatcaatcagtaccggcttacgccgggcttcggcggttttactcctgaagccttcttctctcaactcgtcaaagtcattctctgtccagctttgttccattgctggcaaggacctgcgttcctttggaggagaagacgtgtgctggtttttagaattttcagcttttctgctctggtttctccccat

SEQ ID NO: 142129 - DNA, 704 bp, Homo sapiens
aagaaaaactagttacagagataagacaacatgtgaagtaaatacagtaaatcatactaagtgtcaatatttttgtagcattaataagttcaaaggaaaaagtattatatttggctgtgttagccagagaaagtttcaaagaggagaaacgctggtgaaagtaaaagatgctgaagatcagttgggtgcacgagtgggttacatcgaactggatctcaacagcggtaagatccttgagagttttcgccccgaagaacgttttccaatgatgagcacttttaaagttctgctatgtggcgcggtattatcccgtgttgacgccgggcaagagcaactcggtcgccgcatacactattctcagaatgacttggttgagtactcaccagtcacagaaaagcatcttacggatggcatgacagtaagagaattatgcagtgctgccataaccatgagtgataacactgcggccaacttacttctgacaacgatcggaggaccgaaggagctaaccgcttttttgcacaacatgggggatcatgtaactcgccttgatcgttgggaaccggagctgaatgaagccataccaaacgacgagccttcccggcaacaattaatagactggatggaggcggataaagttgcaggaccacttctgcgctcggcccttccggctggctggtttattgctgataaatctggagccg

SEQ ID NO: 142130 - DNA, 2229 bp, Homo sapiens
atgcgactttttggttacgcacgggtatcaaccagccagcaatctctcgatattcaggttcgggcactcaaagacgcaggcgtgaaagcaaatcgcatctttactgacaaggcatcgggcagttcaagcgatcggaaagggctggacttgctgaggatgaaggtggaggaaggtgacgtcatcttggtgaagaaacttgaccgccttgggcgcgatactgctgacatgatccagttaataaaagagtttgacgcccaaggtgtatccattcggtttattgatgacggaatcagtaccgatggggagatgggtaaaatggttgtcactattctatctgcagtggcccaggcagaacgacagagaatactagagcgtaccaatgaaggtcgccaagaggcaatggcaaaaggagttgtttttgcagaaaatgataaaaagatgttgagtaatgctttcattgaaactgctgactttaggactctaattgaaactgatgacaggaccattgttgttggtagacgagggacagaaacattgttgaatgaacatttgaaaaaatggaattctgcacaaggtgacattttaagaaagtgtaggcttgtcgcaaaggagtatttagatgaaaataacccagaagaatcaattggtgatcttcaattcaatttgaatatctcagaaatagaaaataatatagtatcacttcttgaacgctcagacaggaaagttgtcatattaatggataagctagatgaggcgtatgaaccggataatataggaattggaatcattgcaggtctagcatatgcatctattgaattaaatcaaaaagcaaaatgcattcgtccaataatttttttaagggataatatatttaggtcgctatcaaaggaagatcctgattactcgagaaatatagagggtcaagtcataaggttgcattgggactgggcacaactcctaatgctgtcagctaaaagaatgaaagtagcatttaagctagatattgagaaagatcaacgagtttgggatagatgcacagcggatgatcttaaagggaggaatggttttaagcgatgtttgcaatttaccctttaccggcccagggatttactatcattgttgaatgaagcttttttttccgcattcagagagaatagagaaactatcataaacactgacctagaatatgcagccaagtcaatttccatggccagacttgaagatctctggaaagagtatcagaagatctttccttcaatacaggttataactagtgcatttcgtagcattgaacctgaattaacagtttatacgtgcttaaaaaaaatagaagcatctttcgaattaatcgaagaaaatggagatcctaaaataacgtctgaaatacagttgttaaaggcaagtggaattctccaaagtttgtatagtgtaggatttgttggtattcgtgataaaaacacctcatcctattcattttgccatgacgggcgaactccagataaaggttttgaaagtaatgagaaattattaattcatccatgttactggcttggtttgaatctaaatcgtaatgcacttgctccagaggaagcagaggagataaatgacgaatatgatattaatattatttcagataattcagccattagaaataaaacaataggtcaaataactactcatctagatcagataccgataggaaatgaaggtgccactgaatttgaacaatggtgtttagacgcactaagaatagtatttgcatcccacctaacagacatcaagtcccatccaaatggtaacgcagttcagagacgagatattataggcaccaatggtggcaaatctgatttttggaaacgagtattggaggactataaaacaagacaagttgtttttgatgctaaaaattttgaagaattaggtccatctgagtatagacaattacaatcatatttaacaggtccgtatggaaagctcggttttataattaatagagatgagagtgaggtattgaaatcaggaaaagatttagattggacaaaggaaatgtatcaatcccataattcattaataataaagttacctgcgaaatatatatctaaactgctgcagaaattaagaaatcctgaaaaacatgacgctatagatagacagatggggaaacttttaactttatatgaaacatcatatatggctattaaaagcacccaaaagaaaagaagaaaataa

SEQ ID NO: 142131 - DNA, 231 bp, Homo sapiens
gagccagcccacgtcaatgactcgcggtaagtccggccctcctgggaccaccatccgatcgggaattcgtatgcgaccagcttcgaggcctcgcagtatcagcgtactctgctgggataacacgcccctagatctatcagagacgtcggggcgaaaactctcaaggatcttcccgctgttgagatccagttcgatgtaacccactcgtgcccccaactgatcttcaggcat

SEQ ID NO: 142132 - DNA, 547 bp, Homo sapiens
atgagtattcaacatttccgtgtcgcccttattcccttttttgcggcattttgccttcctgtttttgctcacccagaaacgctggtgaaagtaaaagatgctgaagatcagttgggtgcacgagtgggttacatcgaactggatctcaacagcggtaagatccttgagagttttcgccccgaagaacgtttttcaatgatgagcacttttaaagttctgctatgtggcgcggtattatcccgtattgacgccgggcaagagcaactcggtcgccgcatacactattctcagaatgacttggttgagtactcaccagtcacagaaaagcatattacggatggcatgacagaaaggcttgagcgaagcttttctgataatacagcatcactgcagacccgtagctctagcgtttatcaaccagggtcctggtgcaccagaagggcaccaaaaaattgtgtgaatgcaggggccaagtgcagcagtgatgggaactgcagacctggcatggttctgtccggggctgcggttacaagtcaccacaaaccag

SEQ ID NO: 142133 - DNA, 789 bp, Homo sapiens
atgcgggtaacagtgaatgagcaggacagtggctgtgacgcaactgtgtatgcgagcgagaggaagggcgcagaggaaacctatttgttcttagatgacaccgtgactctcatgagggcactgactgagtggctgcatgcctttggcagctgcgtgaccttgaaaccactgttgctgcgattgccccggatatgccagaggaacctgatgtccctgctgatggccgttcggccatcgctgccggaaagtgggctcctctctgtgctgcagattgcccagcaggacctagcccctgacccagatgcctggctccgtgccctgggggaattgctgcgaagggatttgggggctccagaccctgaagaagaggagaacagggactcccagcagcctgggaaacgcagaaaggactcagaggaagaggctgccagtcctgaggggaagagggtccccaaaagattacggtgttgggaagaggaagaagatcatgagaaggagagacccgaacataagtcactggaatccctggcagatggaggaagtgcatctcctattaaggaccagcctgtcatggcagttaagactggcgaggacggttcgaatctggatgatgctaaaggtctggctgagagtttggagttgcccaaagctatccagtgtatgcgcgaccgagttgctctttgcccggcgtcaatacgggataataccgcgccacatagcagaactttaaaagtgctcatcattgaaaacgtcttcgggcgaaaactctcaagatcttaccgctgttga

SEQ ID NO: 142134 - DNA, 411 bp, Homo sapiens
aaacgctggtgaaagtaaaagatgctgaagatcagttgggtgcacgagtgggttacatcgaactggatctcaacagcggtaagatccttgagagttttcgccccgaagaacgttttccaatgatgagcacttttaaagttctgctatgtggcgcggtattatcccgtattgacgccgggcaagagcaactcggtcgccgcatacactattctcagaatgacttggttgagtactcaccagtcacagaaaagcatcttacggatggcatgacaagcctctgggccctaatacaaagcaagcacactctaaagaagccagaagaatgcaagcagcgaagtcgccgctccccacaggcaagagagtaccggcagacagcggcgcgagacaggggcagaacgatgaggcgccgga

SEQ ID NO: 142135 - DNA, 1788 bp, Homo sapiens
atgcgactttttggttacgcacgggtatcaaccagccagcaatctctcgatattcaggttcgggcactcaaagacgcaggcgtgaaagcaaatcgcatctttactgacaaggcatcgggcagttcaagcgatcggaaagggctggacttgctgaggatgaaggtggaggaaggtgacgtcatcttggtgaagaaacttgaccgccttgggcgcgatactgctgacatgatccagttaataaaagagtttgacgcccaaggtgtatccattcggtttattgatgacggaatcagtaccgatggggagatgggtaaaatggttgtcactattctatctgcagtggcccaggcagaacgacagagaatactagagcgtaccaatgaaggtcgccaagaggcaatggcaaaaggagttgtttttgcagaaaatgataaaaagatgttgagtaatgctttcattgaaactgctgactttaggactctaattgaaactgatgacaggaccattgttgttggtagacgagggacagctaaaagaatgaaaggagcatttaagctagatattgagaaagatcaacgagtttgggatagatgcacagcggatgatcttaaagggaggaatggttttaagcgatgtttgcaatttaccctttaccggcccagggatttactatcattgttgaatgaagcttttttttccgcattcagagagaatagagaaactatcataaacactgacctagaatatgcagccaagtcaatttccatggccagacttgaagatctctggaaagagtatcagaagatctttccttcaatacaggttataactagtgcatttcgtagcagtgaacctgaattaacagtttatacgtgcttaaaaaaaatagaagcatctttcgaattaatcgaagaaaatggagatcctaaaataacgtctgaaatacagttgttaaaggcaagtggaattctccaaagtttgtatagtgtaggatttgttggtattcgtgataaaaacacctcatcctattcattttgccatgacgggcgaactccagataaaggttttgaaagtaatgagaaattattaattcatccatgttactggcttggtttgaatctaaatcgtaatgcacttgctccagaggaagcagaggagataaatgacgaatatgatattaatattatttcagataattcagccattagaaataaaacaataggtcaaataactactcatctagatcagataccgataggaaatgaaggtgccactgaatttgaacaatggtgtttagacgcactaagaatagtatttgcatcccacctaacagacatcaagtcccatccaaatggtaacgcagttcagagacgagatattataggcaccaatggtggcaaatctgatttttggaaacgagtattggaggactataaaacaagacaagttgtttttgatgctaaaaattttgaagaattaggtccatctgagtatagacaattacaatcatatttaacaggtccgtatggaaagctcggttttataattaatagagatgagagtgaggtattgaaatcaggaaaagatttagattggacaaaggaaatgtatcaatcccataattcattaataataaagttacctgcgaaatatatatctaaactgctgcagaaattaagaaatcctgaaaaacatgacgctatagatagacagatggggaaacttttaactttatatgaaacatcatatatggctattaaaagcacccaaaagaaaagaagaaaataa

SEQ ID NO: 142136 - DNA, 816 bp, Homo sapiens
tcactcaaaggcggtaatacggttatccacagaatcaggggataacgcaggaaagaacatgtgagcaaaaggccagcaaaaggccaggaaccgtaaaaaggccgcgttgctggcgtttttccataggctccgccccccggctccagatttatcagcaataaaccagccagccggaagggccgagcgcagaagtggtcctgcaactttatccgcctccatccagtctattaattgttgccgggaagtgtcatgccataccgtaagatgcttttctgtgactggtgagtactcaaccaagtcattctgagaatagtgtatgcggcgaccgagttgctcttgcccggcgtcaacacgggataataccgcgccacatagcagaactttaaaagtgctcatcattggaaaacgttcttcggggcgaaaactctcaaggatcttaccgctgttgagatccagttcgatgtaacccactcgtgcacccaactgatcttcagcatcttttactttcaccagcgtttcaagcagctggacgccccgcgtgaggccgtagacgtccaccagggcccagagcgggtcggccgtgcggaccccgctgaagaacagcataacagccgagtcgttgatgcggtggaagacacggcccttcttgtccacccagaatgcgatgatgttgccctgtctgtaaaatgggcccagaacttctttgcctgcttgaaggtaggggctggccccagtgctctctggaggctcttccccattagagagcttggtgactgtgactgtgatggtttctattccccagtgaatttgttccat

SEQ ID NO: 142137 - DNA, 468 bp, Homo sapiens
ggcaggcctcgggacctgcagcccgccatgcctgagcctcccaccccctccatgggctcctgtgctgcccgagcctccccaacgagcgccaccccctgctccacggcacccagtcccatccaccactcaagggctgaggagtgcgggcacacagcactgggactggcaggcagctccacctgcagccccggaaccttccgcaaactattaactggcgaactacttactctagcttcccggcaacacttaatagactggatggaggcggataaagttgcaggaccacttctgcgctcggcccttccggctggctggtttattgctgataaatctggagccgctgcgatcttttcagctgccatcttcccagtcgccatcttctccatcgccatcttcccagtgaccatcttcccagtcagcagtatccacttcttttcctacaccatcccctcctcaggacaattctag

SEQ ID NO: 142138 - DNA, 2169 bp, Homo sapiens
tcactcaaaggcggtaatacggttatccacagaatcaggggataacgcaggaaagaacatgtgagcaaaaggccagcaaaaggccaggaaccgtaaaaaggccgcgttgctggcgtttttccataggctccgccccccggctccagatttatcagcaataaaccagccagccggaagggccgagcgcagaagtggtcctgcaactttatccgcctccatccagtctattaattgttgccgggaagcgctgttgagatccagttcgatgtaacccactcgtgcacccaactgatcttcagcatcttttactttcaccagcgtttccgttatcaccgccagctccgtgccaagcacgtctgccagacccacagagatcctttctgtttctggtggagggagggagggtggccggtgtgtttggtgtggaggggctgctattggggtctgaggcacccagggagtgtctggacccacagcagggcccctgcccaggtggtcatcctgacccctgctgctgatcaggaagactttcatcatccacacgggtttaaaggggccccagggaccggagggtcgagctgcgcacaggtgtggggacggccaccctctgcccactgcctggcccacagccttctgtggctccttgaggcctggggcactgtgcttgtgggggcagctgggggcatccaggagcagaggacttgccaaactctgggactgacgtccagctgtcagccagaggaccccagaagagagtgggaaacaggcgggagagttcaggaccaagacggtgtggtttgtggcctggacctctgagagctgcatctccctggccagcctcttccgctccagagggctcaggtactggtggtgctggaagacgccctccaaggtgcggacctgctccatggtgaaggctgtgcggacacggggggcccgcaaggtatttggctccttactcaaccctgcaggctctttaaagacagctgtgctccaggtgacccggaatgggcttgagcctagacgctgagcaggcaccggctgtgcggccatggtcctctccggcgcaggcagatttgaggacccggcggcctccttgatgctgacggcctgagggggctcccgggcgccgatgtctggcccgggccagggaggctccccagggagaagtcggcaggcctgggggtgtgggtcggccctgagcagctgctctgggagagccagtccacggagccaaagctggagagctgggcggggtaggaactccgcgtcggcggcgggactggtgcgtccccgccaagccaggctgtccccactgtggccagggcgcgggcagagccgccggtgactgtggcgcccaaacctcacggggacgccctgagcacgggcccccgggacggtcatagccacgcgcggccgctgctcccacgaacctgagtcccgagctgtctgcgtctccgcgtccccgggtcgcctgcgcgtcggcgtggggcgcggggaccgacgtgaccgggtgggaggcagccatgccgagggtaggacggtgtcttccgcgcactggcttggggtccgcacggcgtctccggcggccggagttaggcggaggcgcaggtccggcccccgaagccatgcggggtttcggcgcagacgcggggtccacggagcagccccgactcccggccaggtcctgaccgcggctgcctcagcgcccacgccgcccgcggaaatcagaaagaccggcgggcctcgccccacggttacgcccgccccagccagccgagcctcccgggctggggtcacaggagaggggtcgcggaacggaccgtgccgccgctgaccctggtcttcctcggaccagcccggagtccagctagtccccgaaacgcgctccccccgagtccagggcctgaggacagacaccgggcccagcgcgtgctgccggccccgtcgcgactcgcccgagcctcctccgagcactctgggaccactggcacgggtccctgaggaccctcgctcggcggccgcgctgcccagaatgaagcccacggccagggacactgtctggtcgaaggcgccgcgcactgctccacgtgctggttcaaagtcacactggtcgcgcaacgggcccatgatgttcgcgatgtcgcccaggtgccccacggtctgcat

SEQ ID NO: 142139 - DNA, 2159 bp, Homo sapiens
ttgttcgccaggctcaaggcgcgcatgccgacggcgaggatctcgtcgtgacccatggcgatgcctgcttgccgaatatcatggtggaaaatggccgcttttctggattcatcgactgtggccggctgggtgtggcggaccgctatcaggacatagcgttggctacccgtgatattgctgaagagcttggcggcgaatgggctgaccgcttcctcgtgctttacggtatcgccgctcccgattcgcagcgcatcgccttctatcgccttcttgacgagttcttctgagcgggactcgccgccttctatgaaaggttgggcttcggaatcgttttccgggacgccggctggatgatcctccagcgcggggatctcatgctggagttcttcgcccaccccgggctcgatcccctcgcgagttggttcagctgctgcctgaggctggacgacctcgcggagttctaccggcagtgcaaatccgtcggcatccaggaaaccagcagcggctatccgcgcatccatgcccccgaactgcaggagtggggaggcacgatggccgctttggtccggatctttgtgaaggaaccttacttcggctccagatttatcagcaataaaccagccagccggaagggccgagcgcagaagtggtcctgcaactttatccgcctccatccagtctattaattgttgccgggaagctagagtaagtagttcgccagttaatagtttgccgaacgttgttgccattgctgcaggcatcgtggtgtcacgctcgtcgtttggtatggcttcattcagtgtcatgccatccgtaagatgcttttctgtgactggtgagtactcaaccaagtcattctgagaatagtgtatgcggcgaccgagttgctcttgcccggcgtcaacacgggataataccgcgccacatagcagaactttaaaagtgctcatcattggaaaacgttcttcggggcgaaaactctcaaggatcttaccgctgttgagatccagttcgatgtaacccactcgtgcacccaactgatcttcagcatcttttactttcaccagcgtttctcttacatctttgaggttcctgaatccttttagggtaatggccaccgcttgtgacccaaatgcttctgctaaggtgaaaagggcaatgcatgcggcctcatcatagagctcccagatggctgctccctcgctagatgatgttagacttctttccttgggaaggtttgagaactccatgtgttcagagacctgatttggcttttgctctgagacacaaaagagcagttcacatcttcctggttgacaagcagatcccacccccgaaccatccttccccaccaagtcccaagctgcatcagtgcaggtgccatgaaggacggggaaggctggcccagggagctcgtcacgtggcaaatagtatcgacggcactgctgccagataacaccaccggggaaacattccatcatgatggccgtgcggacataggaagccagttcatccatcgctttcttgtctgctgccatttgctttgtgacatccagcgccgcacattcagcagcgtttttcagcgcgttttcgatcaacgtttcaatgttggtatcaacaccaggtttaactttgaacttatcggcactgacggttaccttgttctgcgctggctcatcacgctggataccaaggctgatgttgtagatattggtcaccggctgaggtgtttcgattgccgctgcgtggatagcaccatttgcgatagcggcgtccttgatgaatgacactccattgcgaataagttcgaaggagacggtgtcacgaatgcgctggtccagctcgtcgattgccttttgtgcagcagaggtatcaatctcaacgccaagcgtcatcgaagcgcaatattgctgctcaccaaaacgcgtattgaccaggtgttcaacggcaaatttctgcccttctgatgtcagaaaggtaaagtgattttctttctggtattcagttgctgtgtgtctggtttcagcaaaaccaagctcgcgcaattcggctgtgccagatttagaaggcagatcaccagacagcaacgcgccacggaaaaacagcgcatacagaacatccgtcgccgcgccggacaacgtgataattttatgacccat

SEQ ID NO: 142140 - DNA, 1611 bp, Homo sapiens; identical to SEQ ID NO: 130179

SEQ ID NO: 142141 - DNA, 851 bp, Homo sapiens
atgaacatgaacatcaaaaaaattgtaaaacaagccacagttctgacttttacgactgcacttctggcaggaggagcgactcaagccttcgcgaaagaaaataaccaaaaagcatacaaagaaacgtacggcgtctctcatattacacgccatgatatgctgcagatccctaaacagcagcaaaacgaaaaataccaagtgcctcaattcgatcaatcaacgattaatcatattgtgtcggccaaagacttgatgtgtgtgacagctggcgctgcactacgctgtaggaatagtagactgatacaacagttatccggcgccaagcggttcggggctgaaacgggggggttcggtgcaccacaagccccagtttggaagcgaaccgaccctacaccgaaacttaagatacctacaaggcgtgagcctatgagaaaggcgcccacgcttcccgaaagggaggaaaggcggacagggtatcgggtaaacggcagggtcggaaacaggagagcgcagaagggagcttccagggggaaacgcctggggggcggagcctatggaaaaacgccagcaacgcggcctttttacggttcctggccttttgctggccttttgctcacatgttctttcctgcgttatcccctgattctgtggataaccgtattaccgcctttgagtgagctgataccgctcgccgcagccgaacgaccgagcgcagcgactgcaaatggtgtggtattagcaactgagaaaaaacagaaatccattctgtatgatgagcgaagtgtacacaaagtagaaccaattaccaagcatataggtttggtgtacagtggcatgggccccgattacag

SEQ ID NO: 142142 - DNA, 2790 bp, Homo sapiens
tcagttcggtgtaggtcgttcgctccaagctgggctgtgtgcacgaaccccccgttcagcccgaccgctgcgccttatccggtaactatcgtcttgagtccaacccggtaagacacgacttatcgccacatctggccccagtgctgcaatgataccgcgagacccacgctcaccggctccagatttatcagcaataaaccagccagccggaagggccgagcgcagaagtggtcctgcaactttatccgcctccatccagtctattaattgttgccgggaagctagagtaagtagttcgccagttaatagtttgcgcaacgttgttgccattgctacaggcatcgtggtgtcacgctcgtcgtttggtatggcttcattcagctccggttcccaacgatcaaggcgagttacatgatcccccatgttgtgcaaaaaagcggttagctccttcggtcctccgatcgttgtcagaagtaagttggccgcagtgttatcactcatggttatggcagcactgcataattctcttactgtcatgccatccgtaagatgcttttctgtgactggtgagtactcaaccaagtcattctgagaatagtgtatgcggcgaccgagttgctcttgcccggcgtcaatacgggataataccgcgccacatagcagaactttaaaagtgctcatcattggaaaacgttcttcggggcgaaaactctcaaggatcttaccgctgttgagatccagttcgatgtaacccactcgtgcacccaactgatcttcagcatcttttactttcaccagcgtttcgcacagatgcgtaaggagaaaataccgcatcaggcgccattcaccattcaggctgggcttctgttgtgaagagcgatcagtgagggcctcttcgctattcgccagctggcgaaagggggatgtgcttctgaagcctacttctgtcagttcatcaaactcattctccatccagttttgtttccttgctggcgaggcattgtgatcctttggaagagaagaggcactctggtttttggaattttcagcctttttgtgctggtttctctccatcttcgtggatttgatgttggtgacctttggatggggtctctgagtggacgtcctttttgttgatgttgatactattcctttctgtttgttagttttccttctaatagtcaggcccctctgctgcaggtctgctggagtttgctggaggtccactccaggccccttttgcctgggtatctccagtagaggctacagaacaagatgccctgcccagagaggagaaatctggagacgcagtctggctgcagtggctttgcggagctgcggtgggcgtctccaagttcgaacttgctggcagctttgtttacaccgtgagggtaaaaccgcctactcacacctcagtaatggcagatgcccctcccctcaccaagctcgagtgtcccaggtcaacttcagactgctgtgctggcactgagaatttcaagccagtggatgttagcttgctggactctgtgggggtgggatcggctgagcaagacaacttggctccctggcttcagccctctttccaggggagtgaacagttctgtctcactggcgttccaggagctgctgggttttgtggagaggatgttatcatcgttcctgatttaggggaaaatgctaagaaaataagtgattttcaaaaccttgccatgattccatcagtaatggagtttgcactggtactgggaacctccagggcagtagaagaagccgtgggaggaactttcacatttggcgaggcaagtacaattttgttagggctttttgaaactgcatttgaaaacttgcttagcggttttgtgattcatgaaacgctggtgaaagtaaaagatgctgaagatcagttgggtgcacgagtgggttacatcgaactggatctcaacagcggtaagatccttgagagttttcgccccgaagaacgttttccaatgatgagcacttttaaagttctgctatgtggcgcggtattatcccgtgttgacgccgggcaagagcaactcggtcgccgcatacactattctcagaatgacttggttgagtactcaccagtcacagaaaagcatcttacggatggcatgacagtaagagaattatgcagtgctgccataaccatgagtgataacactgcggccaacttacttctgacaacgatcggaggaccgaaggagctaaccgcttttttgcacaacatgggggatcatgtaactcgccttgatcgttgggaaccggagctgaatgaagccataccaaacgacgagcgtgacaccacgatgcctgcagcaatggcaacaacgttgcgcaaactattaactggcgaactacttactctagcttcccggcaacaattaatagactggatggaggcggataaagttgcaggaccacttctgcgctcggcccttccggctggctggtttattgctgataaatctggagccggtgagcgtgggtctcgcggtatcattgcagcactggggccagatggtaagccctcccgtatcgtagttatctacacgacggggagtcaggcaactatggatgaacgaaatagacagatcgctgagataggtgcctcactgattaagcattggctgcgcaactgttgggaagggcgatcggtgcgggcctcttcgctattacgccagctggcgaaagggggatgtgctgcaaggcgattaagttgggtaacgccagggttttcccagtcacgacgttgtaaaacgacggcca

SEQ ID NO: 142143 - DNA, 1071 bp, Homo sapiens
tcagttcggtgtaggtcgttcgctccaagctgggctgtgtgcacgaaccccccgttcagcccgaccgctgcgccttatccggtaactatcgtcttgactccaacccggtaagacacgacttatcgccacatttggccccagtgctgcaatgataccgcgagaaccaagcttaacggctccagatttatcagcaattaaccagccatccggaagggccgagcgcagaagtggtcctgcaactttatccgcctccatccagtctattaattgttgccgggaagctagagtaagtagttcgccagttaataatttgcgcccaaatgttgccattgctacaggcatcggggtgtcgcgcttgttcttgaagcattccagctttggactgggccgttcttttacaacgttgttaatggggaaaaacctgtcgttacccaactttattagcctggcaaacatttctcttttctccaattgggttaatttctttagctcggtactctgggtgaggatggagatgatgatgatgatgacgatggtgatgatgatatatagtttttgccgggatcctctagagtcgacctgcatgcatgcaagcttggcactggccgtcgttttacaacgtcgtgactgggaaaaccctggcgttacccaacttaatcgccttgcaacacatccccctttcgcccagctggcgtaatagcgaagaggcccgcaccgatcgcccttcccaacagttgcgcagcctgaatggcgaatggcgcctgatgcggtattttctccttacgcatctgtgcgaaacgctggtgaaagtgaaagatgctgtagataagttgggtgcacgagtgggttacctccgaactggatctcaacagcggtaagatccttgagagttttcgccccgaagaaacgttttccaatgatgagcacttttaaagttctgcagtggctgctgccagtggcgataagtcgtgtcttaccgggttggacttcaagacgatagttaccggataaggcgcagcggtcgggctgaacggggggttcgtgcacacagcccagcttggagcgaacgac

SEQ ID NO: 142144 - DNA, 1310 bp, Homo sapiens
atgcggtctcgccgttgcctgggactgaccccgccccgccccgtcctgctccgggcagccccgcggacagctgcacgggtggcctcgtggtccatggcctccggctgggccggggaaagccgtttcgcggagcacgcccggcggggccagccgggggtgagggtcaggggccatcccctgggcagccctcaggttgcaggaccctctggatctgtttccggcttgcacggtgggcctttccagcagctccggaatgctcccgatgagctcagcttcctggatgaggaggcgcccctgagccccagaccccggaacctgccaagggtcccaggaggcccggaggctgcaggccttggctccaacttccagccgcgcgtgtcctacgtgccgcccaccctgtgtgtgtggagtccctttgtgtgcactgtgcgcggcctcggtctccgctgcccactgctggctctcatgctgctgctatgccaacggttcgaaggtgatggtggccggcgtcatggttctggagccacttgtccagcagaaacgctggtgaaagtaaaagatgctgaagatcagttgggtgcacgagtgggttacatcgaactggatctcaacagcggtaagatccttgagagttttcgccccgaagaacgttttccaatgatgagcacttttaaagttctgctatgtggcgcggtattatcccgtgttgacgccgggcaagagcaactcggtcgccgcatacactattctcagaatgacttggttgagtactcaccagtcacagaaaagcatcttacggatggcatgacagtaagagaattatgcagtgctgccataaccatgagtgataacactgcggccaacttacttctgacaacgatcggaggaccgaaggagctaaccgcttttttgcacaacatgggggatcatgtaactcgccttgatcgttgggaaccggagctgaatgaagccataccaaacgacgagcgtgacaccacgatgcctgtcagcaatggcaacaacgttgcgcaaactattaactggcgaactacttactctagcttcccggcaacaattaatagactggatggaggcggataaagttgcaggaccacttctgcgctcggcccttccggctggctggtttattgctgataaatctggagccgtggctgctgccagtggcgataagtcgtgtcttaccgggttggactcaagacgatagttaccggataaggcgcagcggtcgggctgaacggggggttcgtgcacacagcccagcttggagcgaacgacctacaccgaactga

SEQ ID NO: 142145 - DNA, 972 bp, Homo sapiens
atgtcccgcccaagatcagggtcacgcaagcagtccgaggccagcaagggagacagcggcctctgccacggcactgactccacgtcagagcagggactgctagaccgggctgcggaggggctggcaggtgacagagtcagctccgtgagggaaacgctggtgaaagtaaaagatgctgaagatcagttgggtgcacgagtgggttacatcgaactggatctcaacagcggtaagatccttgagagttttcgccccgaagaacgttttccaatgatgagcacttttaaagttctgctatgtggcgcggtattatcccgtgttgacgccgggcaagagcaactcggtcgccgcatacactattctcagaatgacttggttgagtactcaccagtcacagaaaagcatcttacggatggcatgacagtaagagaattatgcagtgctgccataaccatgagtgataacactgcggccaacttacttctgacaacgatcggaggaccgaaggagctaaccgcttttttgcacaacatgggggatcatgtaactcgccttgatcgttgggaaccggagctgaatgaagccataccaaacgacgagcgtgacaccacgatgcctgcagcaatggcaacaacgttgcgcaaactattaactggcgaactacttactctagcttcccggcaacaattaatagactggatggaggcggataaagttgcaggaccacttctgcgctcggcccttccggctggctggtttattgctgataaatctggagccgtcctgtcgggtttcgccacctctgacttgagcgtcgatttttgtgatgctcgtcagggggcggagcctatggaaaaacgccagcaacgcgcctttttacggttcctggccttttgctggccttttgctcacatgttctttcctgcgttatcccctgattctgtggataaccgtattaccgcctttgagtga

SEQ ID NO: 142146 - DNA, 3109 bp, Homo sapiens
atgcgactttttggttacgcacgggtatcaaccagccagcaatctctcgatattcaggttcgggcactcaaagacgcaggcgtgaaagcaaatcgcatctttactgacaaggcatcgggcagttcaagcgatcggaaagggctggacttgctgaggatgaaggtggaggaaggtgacgtcatcttggtgaagaaacttgaccgccttgggcgcgatactgctgacatgatccagttaataaaagagtttgacgcccaaggtgtatccattcggtttattgatgacggaatcagtaccgatggggagatgggtaaaatggttgtcactattctatctgcagtggcccaggcagaacgacagagaatactagagcgtaccaatgaaggtcgccaagaggcaatggcaaaaggagttgtttttgcagaaaatgataaaaagatgttgagtaatgctttcattgaaactgctgactttaggactctaattgaaactgatgacaggaccattgttgttggtagacgagggacaggatcatttaatttagcaagggcagcaacaagactattatggcgatacgctatgctaatggagatagcatcatatatatcatctcattacaaattgtcatctcaaatatcatcagaaacattgttgaatgaacatttgaaaaaatggaattctgcacaaggtgacattttaagaaagtgtaggcttgtcgcaaaggagtatttagatgaaaataacccagaagaatcaattggtgatcttcaattcaatttgaatatctcagaaatagaaaataatatagtatcacttcttgaacgctcagacaggaaagttgtcatattaatggataagctagatgaggcgtatgaaccggataatataggaattggaactcattgcaggtctagcatatgcatctattgaattaaatcaaaaagcaaaatgcattcgtccaataatttttttaagggataatatatttaggtcgctatcaaaggaagatcctgattactcgagaaatatagagggtcaagtcataaggttgcattgggactgggcacaactcctaatgctgtcagctaaaagaatgaaagtagcatttaagctagatattgagaaagatcaacgagtttgggatagatgcacagcggatgatccttaaaagggagggaatggttttaagcgatgtttgcaatttaccctttaccggcccagggatttactatcattgttgaatgaagcttttttttccgcattcagagagaatagagaaactatcataaacactgacctagaatatgcagccaagtcaatttccatggccagacttgaagatctctggaaagagtatcagaagatctttccttcaatacaggttataactagtgcatttcgtagcattgaacctgaattaacagtttatacgtgcttaaaaaaaatagaagcatctttcgaattaatcgaagaaaatggagatcctaaaataacgtctgaaatacagttgttaaaggcaagtggaattctccaaagtttgtatagtgtaggatttgttggtattcgtgataaaaacacctcatcctattcattttgccatgacgggcgaactccagataaaggttttgaaagtaatgagaaattattaattcatccatgttactggcttggtttgaatctaaatcgtaatgcacttgctccagaggaagcagaggagataaatgacgaatatgatattaatattatttcagataattcagccattagaaataaaacaataggtcaaataactactcatctagatcagataccgataggaaatgaaggtgccactgaatttgaacaatggtgtttagacgcactaagaatagtatttgcatcccacctaacagacatcaagtcccatccaaatggtaacgcagttcagagacgagatattataggcaccaatggtggcaaatctgatttttggaaacgagtattggaggactataaaacaagacaagttgtttttgatgctaaaaattttgaagaattaggtccatctgagtatagacaattacaatcatatttaacaggtccgtatggaaagctcggttttataattaatagagatgagagtgaggtcgttcgctccaagctgggctgtgtgcacgaaccccccgttcagcccgaccgctgcgccttatccggtaactatcgtcttgagtccaacccggtaagacacgacttatcgccactgcagcagccactggtaacaggattagcagagcgagataactacgatacgggagggcttaccatctggccccagtgctgcaatgataccgcgagacccacgctcaccggctccagatttatcagcaataaaccagccagccggaagggccgagcgcagaagtggtcctgcaactttatccgcctccatccagtctattaattgttgccgggaagctagagtaagtagttcgccagttaatagtttgcgcaacgttgttgccattgctgcaggcatcgtggtgtcacgctcgtcgtttggtatggcttcattcagctccggttcccaacgatcaaggcgagttacatgatcccccatgttgtgcaaaaaagcggttagctccttcggtcctccgatcgttgtcagaagtaagttggccgcagtgttatcactcatggttatggcagcactgcataattctcttactgtcatgccatccgtaagatgcttttctgtgactggtgagtactcaaccaagtcattctgagaatagtgtatgcggcgaccgagttgctcttgcccggcgtcaacacgggataataccgcgccacatagcagaactttaaaagtgctcatcattggaaaacgttcttcggggcgaaaactctcaaggatcttaccgctgttgagatccagttcgatgtaacccactcgtgcacccaactgatcttcagcatcttttactttcaccagcgttttattcagcagccgttctgcctcagatctctccatgggtgcagacagaaatctttccttgctggtaccatgctgttccaaaccttttctccgtgtctcacacctctctggaggatgacaatacgacaggtgagg

SEQ ID NO: 142147 - DNA, 1840 bp, Homo sapiens
attccaacctatggaactgatgaatgggagcagtggtggaatgcctttaatgaggaaaacctgttttgctcagaagaaatgccatctagtgatgatgaggctactgctgactctcaacattctactcctccaaaaaagaagagaaaggctggcggggttgccttactggttagcagaatgaatcaccgatacgcgagcgaacgtgaagcgactgctgctgcaaaacgtctgcgacctgagcaacaacatgaatggtcttcggtttccgtgtttcgtaaagtctggaaacgcggaagtcagcgctcttccgcttcctcgctcactgactcgctgcgctcggtcgttcggctgcggcgagcggtatcagctcactcaaaggcggtaatacggttatccacagaatcaggggataacgcaggaaagaacatgtgagcaaaaggccagcaaaaggccaggaaccgtaaaaaggccgcgttgctggcgtttttccataggctccgccccctgagagatgatagcatgaactgctgttgaatcttgtcaaacgccttttctgcgtctggtgagataatcatgcagctcatatctttggctccgatgatatgccggattacacatactgatttgcgtatgtagaaccacccttgcatcccaaggatgaagcccatttgatcatggtggataaactttttcatgtgctgctgcaattcgtttgccagcattttattgaggatttgtgcctctcgatccttcttggacctggattctgttgtgccctgtgccctcctgataggtcttcgctccatgtcttcatcctgcgttgcatatggacgcctttttccatcgtcttcctcgcttttactacggccgtgttctgactccacgggtagctctcctcgcctctctgtgttcttgtagaggcgacagacaagctgtgaccgtcttcgggagctgcatgtgtcataagttttcaccgtcatcaccgaaacgcgcgagacgaaagggcctcgtgatacgcctatttttatagaaacgctggtgaaagtaaaagatgctgaagatcagttgggtgcacgagtgggttacatcgaactggatctcaacagcggtaagatccttgagagttttcgccccgaagaacgttttccaatgatgagcacttttaaagttctgctatgtggcgcggtattatcccgtattgacgccgggcaagagcaactcggtcgccgcatacactattctcagaatgacttggttgagtactcaccagtcacagaaaagcatcttacggatggcatgacagtaagagaattatgcagtgctgccataaccatgagtgataacactgcggccaacttacttctgacaacgatcggaggaccgaaggagctaaccgcttttttgcacaacatgggggatcatggtatctcgctttgatcgttgggaaccggagctgaatgaagccataccaaacgacgagcgtgacaccacgatgcctgtagcaatggcaacaacgttgcgcaaactattaactggcgaactacttactctagcttcccggcaacaattaatagactggatggaggcggataaagttgcaggaccacttctgcgctcggcccttccggctggctggtttattgctgataaatctggagccggtgagcgtgggtctcgcggtatcattgcagcactggggccagatgattgtggctgcccctgtggagttaggaattgcctcggcatcagccttcgaacaaggggctccacgctgtcattttgcacctggcctcacaaatgatgtagctgatcctgagcagaagattgaggaaggtggaaa

SEQ ID NO: 142148 - DNA, 4811 bp, Homo sapiens
atgagattgaccccgcgcgcgctgtgcagcgccgcccaggccgcctggcgggagaacttccccctgtgcggtcgcgacgtggcgcgctggttcccgggccacatggccaaggggctgaagaagatgcagagcagcctgaagctggtggactgtatcatcgagaaaattatgcaacacttagaaggagaaggcctaaaaaatgtcatttttaccaactgtgtaaaggatgaaaatgtcaagcagatcatcccgatggtcactgaactgattgggagaagccaccgctaccaccgaaaagagaacctggagtactgtatcatggtcattggggtccccaacgtgggcaagtcctccctcatcaactccctccggaggcagcacctcaggaaagtggactcacagtacttggccttttgtgactggctgatgtcaccgatcgtgatgtcctcaagggaaagcaccagggtgggtggcgagcctgggatcaccagagctgtgatgtccaaaattcaggtctctgagcggcccctgatgttcctgttggacactcctggcgtgctggctcctcggattgaaagtgtggagacaggcctgaagctggccctgtgtggaacggtgctggaccacctggtcggggaggagaccatggctgactacctgctgtacaccctcaacaaacaccagcgctttgggaagagtatgagtattcaacatttccgtgtcgcccttattcccttttttgcggcattttgccttcctgtttttgctcacccagaaacgctggtgaaagtaaaagatgctgaagatcagttgggtgcacgagtgggttacatcgaactggatctcaacagcggtaagatccttgagagttttcgccccgaagaacgttttccaatgatgagcacttttaaagttctgctatgtggcgcggtattatcccgtgttgacgccgggcaagagcaactcggtcgccgcatacactattctcagaatgacttggttgagtactcaccagtcacagaaaagcatcttacggatggcatgacagtaagagaattatgcagtgctgccataaccatgagtgataacactgcggccaacttacttctgacaacgatcggaggaccgaaggagctaaccgcttttttgcacaacatgggggatcatgtaactcgccttgatcgttgggaaccggagctgaatgaagccataccaaacgacgagcgtgacaccacgatgcctgcagcaatggcaacaacgttgcgcaaactattaactggcgaactacttactctagcttcccggcaacaattaatagactggatggaggcggataaagtctcacatccaggtcatgctgatataagaggtgggttcacagtcttgggcagctctgcccttgtggctttgcaagaaatacaaaaaactgtcagagactattatgaacacttctatgcatgcgagctagacaacatagtagaaatggaaaaattcctggaaacatacaaccacacaagattgaaccgagaagagattgaatccctgaacagaccaataacaagttccaaaattgaatcattaataaaaaccctacaaactagaaataacccaggaccagatgaatttacagccaaattctaccagatgcaaaaggaggagctgagaataaaatacctaggaatccaacttacaagggatgtgaaggacctcttcaaggagaactacaaaccactgctcaacaaaataaaagaggacacatacaaatggaaaaacattccatgctcatggataggaagtatcaatatcgtgaaaatggccatactgcccaaggctaagcgtggaagcaaaacccttttgctcccaagcaaggagaggaagccgtgtgggcagaagttggctgccacttggggaagagcagaaaactctcacacgctggggtggaggctgcctgaagacagtgtggccaccacagacctggggccaccacagaccagccctcacgcggccagccctcacactgctgtcagatccggggccaccacagtccggcccttaatcagtcagacccggggacaccgcaggccagccctcacgcagccagtcctcatgccatcatacctggggccaccgcaggccagccctcagtcagacccggggccacctcaggccagtcttcagtcagtcagaccaggggacactgcaggccagtcctcacacgggtggtacaccaggcagccgcaccttcttcaccgcttcctgatgccaccggccacctgccagccccgtgtcactcttctaaggagtcaaggaaaaataaaaagatatggcattggtcctgaatggaattcagtttacagaagcccacagtccacacggaagccacagtgcacacggaagcccacagtccacatggaagcccacagtccagaccacgcagaaacccacagtccacacagaaacccacagtccagtccacacggaagcccacagtccagaccacacagaaacccacagtccacacagaaacccacagtccacacggaagcccacagtccacacggaagcccacagtccacacggaagcccatagtccagtccacacagaagcccacagtccacacggaagctcacagtccagaccacacagaaacccagagtccacacggaagcccacagtccacacagaagcccagagtccacacagaagcccacagtccagtccacacggaagcccacagtccacacgtaagcccacagtccacacagaagcccacagtccagtccacacggaagcccacagtccacacggaagcccacagtccacacggaagcccagagtccacacggaagcccacagtccagtccacatggaagcccagagtccacacggaagcccacagtccacacggaagcccacagtccacatggaagcccacagtccagtccacacggaagcccagagtccacacggaagcccacagtacacacggaagcccacagtccacacggaagtccacagtcaagatcaaccttccaagaacatgtataggacacttacttctcttggaggagctcgatccaaaatacgggggcagaggcacagctctgactgacagctcccttgctgtgggaccaccacctggtcgtttggatattgggaggaggctggagcgccaagaggccatgcggctgccccacaatcacatccctgtcaggtcccggagctggattcagacccggaacgtgtgtgtgcgcgccatcacggcaggaagtttagcaaaagccccaggacgttcttttagggacgtggcagctgaaaatgcacaggagacagcatcctgggtcgcgtttgtcgtccgcgcgaacagctgttcagagtcagacagacacaagccgggcatccgacggctccaaccactgcagctggggcttgtggcctgggacagtcctcggtggccctctgagggcgatacagtggcaaggcagtcggcggcgtgctcctgcccacgctgggctctgggcttcctggaaccacaggacatgaggcctctttcatgcacgcaaagcctggtgtgcaaggagctcacacccaatgcacgtccagccaaaacgctggtgaaagtaaaagatgctgaagatcagttgggtgcacgagtgggttacatcgaactggatctcaacagcggtaagatccttgagagttttcgccccgaagaacgttttccaatgatgagcacttttaaagttctgctatgtggcgcggtattatcccgtattgacgccgggcaaaagcaactcggtcgccgcatacactattctcagaatgacttggttgagtactcaccagtcacagaaaagcatcttacggatggcatgacagtaagagaattatgcagtgctgccataaccatgagtgataacactgcggccaacttacttctgacaacgatcggaggaccgaaggagctaaccgcttttttgcacaacatgggggatcatgtaactcgccttgatcgttgggaaccggagctgaatgaagccataccaaacgacgagcgtgacaccacgatgcctgcagcaatggcaacaacgttgcgcaaactattaactggcgaactacttactctagcttcccggcaacaattaatagactggatggaggcggataaagttgcaggaccacttctgcgctcggcccttccggctggctggtttattgctgataaatctggagccgaagtaaggttccttcacaaagatccggaccaaagcggccatcgtgcctccccactcctgcagttcgggggcatggatgcgcggatagccgctgctggtttcctggatgccgacggatttgcactgccggtagaactccgcgaggtcgtccagcctcaggcagcagctgaaccaactcgcgaggggatcgagcccggggtgggcgaagaactccagcatgagatccccgcgctggaggatcatccagccggcgtcccggaaaacgattccgaagcccaacctttcatagaaggcggcggttgggcgtcgcttggtcggtcatttcgaaccccagagtcccgctcagaagaactcgtcaagaaggcgatagaaggcgatgcgctgcgaatcgggagcggcgataccgtaaagcacgaggaagcggtcagcccattcgccgccaagctcttcagcaatatcacgggtagccaacgctatgtcctgatagcggtccgcacacccagccggccacagtcgatgaatccagaaaagcggccattttccaccatgatattcggcaagcaggcatcgcatgg

SEQ ID NO: 142149 - DNA, 1485 bp, Homo sapiens
atagggcgaattcgagctcggtacccggggatcctctagagtcgacctgcaggcatgcaagcttgagtattctatagtgtcacctaaatagcttggcgtaatcatggtcatagctgtttcctgtgtgaaattgttatccgctcacaattccacacaacatacgagccggaagcataaagtgtaaagcctggggtgcctaatgagtgagctaactcacattaattgcgttgcgctcactgcccgctttccagtcgggaaacctgtcgtgccagctgcattaatgaatcggccaacgcgcggggagaggcggtttgcgtattgggcgctcttccgcttcctcgctcactgactcgctgcgctcggtcggttcggctgcggcgagcgggtatcagcttcactcaaaggcgggtaatacggttatccacagaatcaggggataacgcaggaaaggacatgtgaagcaaaaggccagcaaaaggccaggaaccgtaaaaaggccgcgttgctggcgtttttccataggctccgccccccggctccagatttatcagcaataaaccagccagccggaagggccgagcgcagaagtggtcctgcaactttatccgcctccatccagtctattaattgttgccgggaagctagagtaagtagttcgccagttaatagtttgcgcaacgttgttgccattgctacaggcatcgtggtgtcacgctcgtcgtttggtatggcttcattcagctccggttcccaacgatcaaggcgagttacatgatcccccatgttgtgcaaaaaagcggttagctccttcggtcctccgatcgttgtcagaagtaagttggccgcagtgttatcactcatggttatggcagcactgcataattctcttactgtcatgccatccgtaagatgcttttctgtgactggtgagtactcaaccaagtcattctgagaatagtgtatgcggcgaccgagttgctcttgcccggcgtcaatacgggataataccgcgccacatagcagaactttaaaagtgctcatcattggaaaacgttcttcggggcgaaaactctcaaggatcttaccgctgttgagatccagttcgatgtaacccactcgtgcacccaactgatcttcagcatcttttactttcaccagcgtttgcataagtcggtgtatgtcagccgtgatggtgatggcagtgctgaccattgcatgcagatttcttaaaatgacagtgtctgttggccacatatgcagtctgaactttgctttgcagacatccacgacagcgatggcagttccagcagcagccaccagagcctcaagagcacagccaaatgggcggcatccctggagaatctgctggaagacccagaaggcgtgaaaagatttagggtttgtctttttcattgttaatcgggatggatgcagtgtgtgcagaagttcagatgcacacaggggagaaataggccagttcaacat

SEQ ID NO: 142150 - DNA, 1504 bp, Homo sapiens
  misc_feature (1)...(1504): n = a,t,c or g
gccacgttcgccggctttccccgtcaagctctaaatcgggggctccctttagggttccgatttagtgctttacggcacctcgaccccaaaaaacttgattagggtgatggttcacgtagtgggccatcgccctgatagacggtttttcgccctttgacgttggagtccacgttcttaatagtggactcttgttccaaactgggaacaacactcaaccctatctcggtctattcttttgatttataagggattttgccgatttcggcctattggttaaaaaatgagctgatttaacaaaaatttaacgcgaattttaacaaaatattaacgcttacaatttaggtggcacttttcggggaaatgtgcgcggaacccctatttgtttatttttctaaatacattcaaatatgtatccgctcatgagacaataaccctgataaaatgcttcaataatattgaaaaaaggaagagtatgagtattcaacatttccgtgtcgcccttattccctttttttgcggcatttttgccttcctgttttttgctcacccagaaacgctggtgaaagtaaaaagatgctgaagatcagttggggtgcacgagtgggttacatcgaactgggatctcaacagcggtaagatccttgagagtttttcgccccgaagaacggttttccaatgatgagcacttttaaagttctgctatgtggcgcggtattatcccgtattgacgcccggccaagagcaactcggtccgccgcatacactattctcaaaaatgacttggtggagtactcaccagtcacagaaaagcatctttacggatgggcatgacagtaagagaattattgcagtgctgccataaccatgagtgataacactgcgggccaacttacttctgacaaccgatcggaggaccgaaggagcttaacccgcttttttgcacaacatnggggggatcatgtaacttcgccttgatccgttgggaaccggagctgaatgaagccataccaaacgacgagcgttgacaccacgatgcctgtagcaatggcaacaacgttgcgcaaactattaactggcgaactacttactctagcttcccggcaacaattaatagactggatggaggcggataaagttgcaggaccacttctgcgctcggcccttccggctggctggtttattgctgataaatctggagccggtgagcgtgggtctcgcggtatcattgcagcactggggccagatgtggctgctgccagtggcgataagtcgtgtcttaccgggttggactcaagacgatagttaccggataaggcgcagcggtcgggctgaacgggggccgaacgaccgagcgcagcgagtcagtgagcgaggaagcggaagagcgctgacttccgcgtttccagactttacgaaacacggaaaccgaagaccattcatgttgttgctcaggtcgcagcgttttgcagcagcagtcgcttcacgttcgctcgcgtatcggtga

SEQ ID NO: 142151 - DNA, 2536 bp, Homo sapiens
ggattataaaaacttcctctttaatcaaggcctttaacatgaacagatttcttgaataaaatggaaagtttccagtacactgaaacataaatccgcaagtcaccacacatacaacacccggcaggaaaaaacaaaaacagcaagtttacatgatccctgttaccagccatgttcctcaaattcggaggcttccctccatctgcccaagtgtgttctggatacagagcacatcgtggcttctggggtcacacctcaccttaggcctgtgggcccccacagagcacctccatctggcctgggcctatggtgggtggtgggctctaaccaaggaagccaaagcgtttcccagcaccattcaaaacagtgtaattgaaacatcttttaaaatatccaaaagtgaagaaaacaagaaggccaacataaataaatgttatccagaaagatgtttaggaagtaagggacaagctgtgtaaaggccttgaaggctgaaaaagtagcattgcccagctttcatttctttgggtttcttgggttagtgggcgcccggaacagcaagatgtgaggttctggttcatgggatcatataaatggacccatccctgactctgctgaacgccaagattcctccattcagattcagacatcagatgggttttaggggaccagcttggctatggtccttgggcagcatgacatgtcgatactcaaactcctcgtcatcgtatttgtccgaatacttttggacttcttggatcagcatcctttttcatttactcctctaattcagagatcactggaattttctgtaagctatgtttttacagaagttggtgaaggcgttacatttgaacgattcattgtccaatgtatgaatcttattaagatgattgtcaaaaattatgcttataagccatccaaaaattttgaagctaaaagaatgaaagtagcatttaagctagatattgagaaagatcaacgagtttgggatagatgcacagcggatgatcttaaagggaggaatggttttaagcgatgtttgcaatttaccctttaccggcccagggatttactatcattgttgaatgaagcttttttttccgcattcagagagaatagagaaactatcataaacactgacctagaatatgcagccaagtcaatttccatggccagacttgaagatctctggaaagagtatcagaagatctttccttcaatacaggttataactagtgcatttcgtagcattgaacctgaattaacagtttatacgtgcttaaaaaaaatagaagcatctttcgaattaatcgaagaaaatggagatcctaaaataacgtctgaaatacagttgttaaaggcaagtggaattctccaaagtttgtatagtgtaggatttgttggtattcgtgataaaaacacctcatcctattcattttgccatgacgggcgaactccagataaaggttttgaaagtaatgagaaattattaattcatccatgttactggcttggtttgaatctaaatcgtaatgcacttgctccagaggaagcagaggagataaatgacgaatatgatattaatattatttcagataattcagccattagaaataaaacaataggtcaaataactactcatctagatcagataccgataggaaatgaaggtgccactgaatttgaacaatggtgtttagacgcactaagaatagtatttgcatcccacctaacagacatcaagtcccatccaaatggtaacgcagttcagagacgagatattataggcaccaatggtggcaaatctgatttttggaaacgagtattggaggactataaaacaagacaagttgtttttgatgctaaaaattttgaagaattaggtccatctgagtatagacaattacaatcatatttaacagaaacgctggtgaaagtaaaagatgctgaagatcagttgggtgcacgagtggtttacatcgaactggatctcaacagcggtaagatccttgagagttttcgccccgaagaacgttttccaatgatgagcacttttaaagttctgctatgtggcgcggtattatcccgtattgacgccgggcaagagcaactcggtcgccgcatacactattctcagaatgacttggttgagtactcaccagtcacagaaaagcatcttacggatggcatgacactgaatgaagccataccaaacgacgagcgtgacaccacgatgcctgcagcaatggcaacaacgttgcgcaaactattaactggcgaactacttactctagcttcccggcaacaattaatagactggatggaggcggataaagttgcaggaccacttctgcgctcggcccttccggctggctggtttattgctgataaatctggagccggggggcggagcctatggaaaaacgccagcaacgcggcctttttacggttcctggccttttgctggccttttgctcacatgttctttcctgcgttatcccctgattctgtggataaccgtattaccgcctttgagtga

SEQ ID NO: 142152 - DNA, 634 bp, Homo sapiens
ctatccagagagcaaaatctcctcctttgccttgctctttgctgggtctctgacaacatggtcatcttcagcatgggtatttgtcagtaagaattggaaaacactgttgtctctggaccacaggacaactgatagagccttccataagtatttgaagatgtgacattttatgaggtgaccactctcttttcttgccaccttctcctccttctcctcctcctcctcctcctcctcctcctccttcttctttcttcttcttattttttgagatggagtctcactctttgctatagcatggggcacagtcattgcccatagtaagtgttgcttatggatagagggccatgcacagcaggcagcctggaaaacaagcccttgccaagcctgcatgtcaaagctcctcttagctcctcttgtgcagttgtaggcattggcctggctgggactttcacacttaaatttcatcccttcaaatgatccactctccacctgcctccctccacctgtggcaatccttttctccttgtctttcttccttgcaggctccttcttcagcccctctgtggttacagccatcactgtttggtcctttgataactacctttgccctgtgaactgtcttcttctgctgtat

SEQ ID NO: 142153 - DNA, 625 bp, Homo sapiens
tcacggatgcaaagaacagacatccactaaaaccagctcaaacacccagaacatttgttggtttgtggtacaggaaagaatgagttctgtggcttcaggtacggctatatccaggagctcaacaaatatagccagagctatctctctgactcttacttgtacatcttggtgcatattgtcctcagtctgcagaccgttcttttgaacaactggggaaagtggcctgggcccctgcaggtcgaacctttgggtgccctccctgatctctctcctaactgtgctccccgccctgcccgactgcatccttcgccacagggccgtggtagcctgcatggctgtgtgctcgtgccgcaatgggctgagcacgtagatctgatgtgacaccatagcctgaagatgaacagcacctgacccttgctcccagggaggacaatgtgcagcgaggctgtgcaataaagtcgggagtgtggtgagctgtaaaggaagcccgcaggcctaggccacgggcccgagggcaggggcacgccatgcagaaggactctgacccggccccacagctggccagataagagagacgccttgagtcgaggggccggaggctctgaggctcccccctggtatggag

SEQ ID NO: 142154 - DNA, 518 bp, Homo sapiens
tcctcagcttggattggcatcccaacaatgttttgctggcagcaggatcatgtgacttcaaatgcagagtgttttctgcttacattaaagaagtggatgaaaagccagccagcatgccctggggcaccaagatgccttttgggcagctgatgtcagagtttggtggcagtggcaccggtggctgggtccacgggaacagtgtcgtggctgctggccatgactgctacccaatgctctttaattatgatgaccgcggctgcctgaccttcgtctccaagttagacattccaaaacagagcatccaacgcaacatgtctgccatagaacacttccgcaacatggacaagagggccacgattgaggaccacaacatggccttggagaggctgcaccagaatagcatcactcacgtctctatttatgaggtagacaagcaaggttgtcgcaaattttgcactactggcattgatggagccatgacaatttgggatttcaagaccctcgagtcttccatccag

SEQ ID NO: 142155 - DNA, 3018 bp, Homo sapiens
atgcacaacgtagcatggaatgccttgttctggtgtaaccacgatcagccgcgcattgtttctcgctttggtgatgaaggtgaataccgcgtgcctgcggcaaaaatgctggcgatggtgctgcatggcatgcagggaacgccgtatatctaccagggcgaagagattggcatgaccaacccgcatttcacgcgcattactgactatcgcgacgtagagagcctcaatatgtttgccgagctgcgcaacgatgggcgtgatgccgacgagttattggcaatcctcgccagtaaatcccgtgacaacagtcgcacgcccatgcaatggagcaacggcgataatgccgggtttacggctggcgaaccgtggattggcctgggcgataactatcaacaaatcaacgtagaagccgcgctggccgatgattcctcggtgttttacacctaccaaaagttaatcgcactgcgtaagcaggaagccatcctgacatggggcaattaccaggatctgctgccaaacagccctgtattgtggtgctatcgccgtgaatggaaggggcaaaccttgctggtcattgccaaccttagccccttacctgatgatttactgcaacgcctgcaagagcatttcaccgttcaccaggtggcaaacctcagcccacaaaccgtcgaacaaaatgcagcaatttttgccgaagctgaaggtttactgggttcaaacgagaatgtaaatgccgcattgctggaaaaaatgccgaaactgcgtgccacatcaacgatctccgtcggctatgacaattttgatgtcgatgcgcttaccgcccgaaaaattctgctgatgcacacgccaaccgtattaacagaaaccgtcgccgatacgctgatggcgctggtgttgtctaccgctcgtcgggttgtggaggtagcagaacgggtaaaagcaggcgaatggaccgcgagcataggcccggactggtacggcactgacgttcaccataaaacactgggcattgtcgggatgggacggatcggcatggcgctggcacaacgtgcgcactttggcttcaacatgcccatcctctataacgcgcgccgccaccataaagaagcagaagaacgcttcaacgcccgctactgcgatttggatactctgttacaagagtcagatttcgtttgcctgatcctgccgttaactgatgagacgcatcatctgtttggcgcagaacaattcgcggaccgagtcttggtctgtctccaggctggaacacgcgtgtgtcgttgtgcgctttttttgggtgaaaggagtaagaaaatggcgacaggaaagtcctgctctcgctggtttgcgcctcttgcggcgttattaatggtagttagcctgagtgggtgttttgataaagaaggcgatcagcgtaaagcgtttatcgacttcctgcagaatacagtgatgcgtagcggtgaacgtctaccaaccctgactgccgatcagaaaaaacagtttggtccttttgtctctgattacgcgattctgtatggttattctcagcaggtgaatcaggcgatggattccggtctgcgcccggttgtagacagcgttaacgcaattcgcgtaccgcaggattacgttacgcaaagcggtccgctgcgtgaaatgaacggttcgctgggtgtgctggcgcaacaactgcaaaatgcgaagttgcaggccgatgctgcgcactctgcgctaaaacagagcgatgatttgaaaccggtctttgatcaggcattcaccaaagtgtcttatcgcatgggcaccatcgagtggatgtccacccgccacgaagaagtggcggcctttgccgctggcgctgaagcacaacttagcggagaactggcggtctgcgccggatcgtgcggccccggcaacctgcacttaatcaacggcctgttcgattgccaccgcaatcacgttccggtactggcgattgccgctcatattccctccagcgaaattggcagcggctatttccaggaaacccacccacaagagctattccgcgaatgtagtcactattgcgagctggtttccagcccggagcagatcccacaagtactggcgattgccatgcgcaaagcggtgcttaaccgtggcgtttcggttgtcgtgttaccaggcgacgtggcgttaaaacctgcgccagaaggggcaaccatgcactggtatcatgcgccacaaccagtcgtgacgccggaagaagaagagttacgcaaactggcgcaactgctgcgttattccagcaatatcgccctgatgtgtggcagcggctgcgcgggggcgcataaagagttagttgagtttgccgggaaaattaaagcgcctattgttcatgccctgcgcggtaaagaacatgtcgaatacgataatccgtatgatgttggaatgaccgggttaatcggcttctcggatcgtacccagattgccctcagtgtcaataatcacgaagtgcacatctataagaagaatgggcgccagtgtgtgaaagctcacgaactcaaggagcacaatggacacatcacagatattgactgggctcccaagcatgaccacatcgtcacttgtggggcagaccacaatgcctatgtctggagtcagaaagatggtgtctggaagccaacactgatgatcctgagaattaatcgcacagctactttcgtgaagtggtccgcgcccatttatcgagtgacccaaaaggctgccagttttgagtgggatccagaacaggagaaggctctgcgacaggtccaggctgctgtgcaagctgctctgccacttgggccatatgatccagcagatctaatggtgcttgaggtgtcagtggcaggcagggatgctgtgagaagcctttggcaggcccccataggtgaatcacagcggaggcctctaggattttggagcaaggccctgccatcttcttcagataactactctcctttagagagacaagtgctgtttggagcctttggcaggctcccatag

SEQ ID NO: 142156 - DNA, 507 bp, Homo sapiens
  misc_feature (1)...(507): n = a,t,c or g
ggatgacttatgtgcattggcatttaaagttctccatgacaagcagcgaggaccactggtttttatgcgcatttactcaggcactataaaaccccagttggccattcataatattaatggaaactgcacggagagaataagtcgtctgcttttgccgtttgctgaccaacatgtagaaatcccttcattgactgctggtaacattgctttgactgttgggcttaaacatactgccactggagacaccattgtctcatccaagtccagtgcattagctgcagctcgtagagccgaacgggagggagaaaagaagcacagacaaaacaatgaaggcagagagacttttattggctgggagtgggagattccaggaacctgttttcttctgtaccataggaacccccatcactgtctaaggcagccagatttgggaacatgcgtttgaaatgtctttcagcgtgaggatccccgttttgaaagtgagggttaggttccnggattttggga

SEQ ID NO: 142157 - DNA, 1187 bp, Homo sapiens
gaaacaactgaagcaaggaatgccttaattgaacaagttgcagatttggatgatgaatctgctgacttggttttagaagaattttgtgagaattttgatctgttaccagctgaaaagctacagactgcaatacatagagtgacactagctcagacagcagtgcctgtgctttgtggaagtgccctgaaaaacaaagggatacagcccttgttagatgctgttactatgtacttaccttcacctgaagagcgtaactatgaatttctgcagtggtataaggatgacttatgtgcattggcatttaaagttctccatgacaagcagcgaggaccactggtttttatgcgcatttactcaggcactataaaaccccagttggccattcataaatattaaatggaaactgcacggatcgtacccagattgccctcagtgtcaataatcacgaagtgcacatctataagaagaatgggcgccagtgtgtgaaagctcacgaactcaaggagcacaatggacacatcacagatattgactgggctcccaagcatgaccacatcgtcacttgtggggcagaccacaatgcctatgtctggagtcagaaagatggtgtctggaagccaacactgatgatcctgagaattaatcgcacagctacttttgtgaagtggtccgccctagagaacaaatttgctgtgggaagtgaagcacgactcatttcagtttgttactttgagtctgaaaatgactggtgggtgagcaagcacattaaaaagctgattcgctccacagtcctcagcttggattggcatcccaacaatgttttgctggcagcaggatcatgtgacttcaaacacagagtgttttcttcctacattaaagaagtggatgaaaagctggccagcatgccctgggacagcaagatgctttttgggcagctgatgtcagagtctggtggcggtggcactggtggctgggtccacgggttagacattccaaaacagagcatccaacgcaacatgtctgccatggaatgcttctgcaacacggacaagagggccacgactgagggctccaacatggctttgaagatgctgcgccagaatagcatcactcaagtctctatttatgaggtggatgagaaagattgtcgcaaatattgcactactggcatcgatggagagccatga

SEQ ID NO: 142158 - DNA, 1624 bp, Homo sapiens
cggacgcgtggggttcgcgtcgactgcccagagtccgcgaatcctccgctccgagcccgtccggactcccccgatcccagctttctctcctttgaaaacactaagaataatgtcactgcatcagtttttactagagccaatcacctgtcatgcctggaacagggatcgtactcgaccagtctgtcttgattactatagcttggtggtaagttttgaaatcaagaagtagattgccctcagtcccaataatcacgaagtgcacatctataagaagaacgggagccagtgggtgaaagctcatgaactcaaggagcacaacggacacatcacaggtattgactgggctcccaagagcgaccgcattgtcacttgtggggcagaccgcaatgcctatgtctggagtcagaaagatggtgtttggaagccaaccctggtgatcctgagaattaatcgcgcagctacttttgtgaagtggtcccccctagagaacaaatttgctgtgggaagtggagcacgactcatttctgtttgttactttgagtctgaaaatgactggtgggtgagcaagcacattaaaaagccgattcgctccacagtcctcagcttggattggcatcccaacaacgttttgctggcagcaggatcatgtgacttcaaatgcagagtgttttctgcctacattaaagaagtggatgaaaagaaagccagcacgccctggggcagcaagatgccttttgggcagctgatgtcagagtttggtgggcagtggcactggtgggctgggtccacggggtaagcttctctgccagtggggagccgcctgggctggggttcagccacggacagcaccgtgtctgtttgctggatgccttcaaaaagttttgcaggtctcgactctgaagacagagttcctgccgctcctaagtgtgtcatttgtctcagagaacagcgtcgtggctgctggccatgactgctgcccaatgctctttaactactatgaccgcggctgcctgaccttcgtctccaagttagatattccaaaacagagcatccaacgcaacatgtctgccatggaacgcttccgcaacatggacaagagagccacaactgaggaccgcaacacggccttggagacgctgcaccagaatagcatcactcaagtctctatttatgaggtggacaagcaagattgtcgcaaattttgcactactggcatcgatggagccatgacaatttgggatttcaagaccctcgagtcttccatccagggcctccggataatgtgaagctgagtgagcctccgccatccagcatgacaaacttgtggccgaccgcagctgtgccgtggcacgatggcgaggaagccagccccaaggaaacactgaaaacacatatcacgccaatgccgtgtggttttgtttgaatataaaattggtgaaagtgttggtttttttaaggcagtaatttttttgtttgtttttttgcgatttcattccattcttgaccaaagcttctctttaagtagtttattatggaaaattgtcacactaacttaaaagacagggtgagggagatatgtaaattgtccactagaaaattaaataaaagaactgaatgtggaaaa

SEQ ID NO: 142159 - DNA, 767 bp, Homo sapiens
gtgagcttatttaagcttttaatcacctggatgcaggcaggctgagcccaaaaagagagtcagcaaagggagataggggtggggccattttataagatttgggtaggtaaaggaaaattacagtcaaagggggattgttccctggcgggcaggagtgggggtcacaaggtgctcagtgggggtgattttgagccagaatgagccaggaaaaggactttcacaaggtaatgtcatcacttaaggcaaggaccggccattttcacttcttttgcggtggaatgtcatcagttaaggcaaggaccggccattttcacttcttttgcggtggaatgtcatcagttaaggcaaggaccagccattgacacttcctttgtggtggaatgtcatcagttaaggcggggcaggacattttcacttcttttgtgattcttcagttacttcaggccatctgggcatatacctcgcgtcaggtgctcccctagaattcctggctgcagggagtcctgtgggaagacggagaacaccaccgcaggctttccacacaggagtctggatttgtctgtgaaattcaggagctcattttggcaggctgtataggaagcgtggtgctggcatctgcttctggtgaggttctcagggagcttacaatccaggcagaaggtgaaggggaagcaggcacatcagtggcaagagagggagcaaggtggaggaagtgctgcactcttttaaacaatcagatctcgcatgaactgaaaactcagtcttca

SEQ ID NO: 142160 - DNA, 918 bp, Homo sapiens
atggcagggaccaacacggagctcctgaatttcacagacaaatccagacccctgtgtggaaagcctgcggtggtgttctccgtcttcccacaggactccctgcagccaggaattctaggggagcacctgacgcgagtggttgactcaaagcctttgtcaattaaatctgtactaactaaatacaagcattgccagcttggaggagctgcaaaactctcttcggctgctggtgccggccgccccctggcctgctctttcactgagtatcagtgtctgagtacctgtctcatccgtcatgcagctgaggctcaattaagggacctaatgcaaactgttgtatcccaaaacccatggttccctgaagaaggcatgctagacgtaaagctctggaacaagtggggagaaatcttaaacattgcatgcaagggcaaggtcccagtatcatctttaatgctatgggccttagttagggcagccctggctccattatacacagaagagcctaaaaaggagaaggaggaagaaccatcacctgctttaccacctcctcttccctcagccccgatatcaccaggccaaaataaaaaaggggaaacggaggttttgcctaagccccctcctccagtagataggaaaaaggacaggggatatgctacagcgaagagaccctgtcttaagcaagcagcattaaaaggggagctctttgcctgcccagtaatgcaagatcaacaaggcaatcagatgtataaacccatttcttttaacgcttatttaaaaatacgaaaaaacattaaagaccagagctgcgcgaccatgcgagcggtgggcagaaggaaaggctcagcagcagggaggcttgcagacctggagccaacagatgctcccaggaactcgacctgcatagtagcaacgcaatga

SEQ ID NO: 142161 - DNA, 642 bp, Homo sapiens
tcaggcagaaggaagttggatgagcttgcggaacacccggggggccagtcggccccgctcccgcatccatcgcggaggcgcggcccctttaaggctcccggaaacggtcccacaggaccggaagtgaccctctttatttcccttcctcacgtggtgcaggcaggaagtgacgcgcctggcccgggagctgcggtcgcagagtgccgacggagccggagtcgcggacgccgcggggtctccgggacaggtgaccttcatcagggggtggccaggaggggcccagactgtgaatcctgtgctctgcccgtgaccgccccccgccccatcaatcccattgcataggtttagagagagcacgtgtgaccactggcattcatttggggggtgggagattttggctgaagccgccccagccttagtccccagggccaagcgctggggggaagacggggatttagggatgggtctcaatctcggaagagggaggagtctgggagtggggccggctggcccagcctgtaagatactgtatatgcgctgctgtagataccggaatgaattttctgtacatgtttggttaattttttttgtacatgatttttgtatgtttccttttcaataaaatcagattggaacagtgaa

SEQ ID NO: 142162 - DNA, 426 bp, Homo sapiens
tcaagttgccatagctgcgagtctggggagagcacagtcggttgagtcgctgcgtttggtcagttgcaccttctgggtcactggtagccgcgggagccgggtggggcccagcatttctccatggatgacacagtgcatagactcatattcagaagcaccctctttgacttgagtagtgaaaccagcaagccgttcagtcatggcagctgcttcgtctgtgcacataccaacacaaaatgaccaatgtggttttccaatagtaaaggacttcttagctttagcaatgtggttagccactgagaatgatgctcgcagtacagatgcatttgatgaagtggtggccttcaataattgcttctgttctttgtgttcatgtttttttcttttgaaaaactccagaggcttgtcttttaatgcagtgtgcat

SEQ ID NO: 142163 - DNA, 1207 bp, Homo sapiens
ttttccaaggaagcatttttattcactttctaactggagtttgcctcctacaaaggaggctggtcctttaacaaaaaaaaaaaatagagcagggcgagagggcgcggccaagggatcaggcttttatccgggaaagttacccgaaggccagctatatggcatcctgggatttgcagttccttttcgggactctctcccttggtaattccttgatcatgaggccgagatggactacaactcccagagggccaagcggcggcagcggggtcctgtactctcgctgtggctgggcggctagttcaagttgccatagctgcgagtctggggagagcacagtcggttgagtcgctgcgtttggtcagttgcaccttctgggtcactggtagccgcgggagccgggtggggcctaggcgatgatccggcattaaggagctgggatcatcctccgtctcagggggtttggggaaagggtaggggcatccaacgatcatcggcttgactaggccctttgccctgaacctcatgaagaaatgataggaggcagacatatgcgcctaaaaagagcgctgagctcagagaggagcatctcggagttctgggggtgtgctttgatttgtgtacatcaatggcagaatcatgcagcgaatcagatcacttacgctgtcgtgaccgattgagtccatgggctggcagatcaacgcacaggggaactcgtagtcttcctacagtagaagttaccgagaaggtcaacactataacaagtactttacaggataccagtcggaacctgcgacaagtggaccagatgcttggacgataccgagaatacagtaatggacaggcgggtgcgatagaacatgactatggggatccacagggtattaaacgaatgagatcaagaactggtgtccggtttgttcaagagactgatgatatgactcagcttcatggttttcatcagtctcttcgagacctcagcagtgaacaaattcgccttggagatgatttcaacagggagctttccagaaggagccggtcagatgccgaaacaaaaagggctttggaagaattgactgaaaaacttaatgaagcccagaaacaagaagtgttttttgtgaagagccttggaaaggtgaagatacaatgcctgtcttctgctgaagtagacaacgtctttccaattaatgtgtggcaatgtggtatctaa

SEQ ID NO: 142164 - DNA, 490 bp, Homo sapiens
actggaggacatcagacagcggtatgaacaacaggtgctggagaagtgttttgaagtgttaaatgggaagataaccacaggagatagcgcctgcttccagccttgcttcatctatcagcttgctaatcacagctgtgtttccagccttctgctctccctgtatcatgagcttcgggagcttcagcaggcagtagtcctggctgttgatggttggctggagaggaaaaggaataaagaagcagtgtatgctggcaggccctggtaccatctctaacagcggttatcacagcaacattaaacttttaaataaggagaacttccatgcgtaaactgaactgttgattgacagatttcatggatgtagcaaacatctaatctgggagccacatggccatccccaaatgacacattctatttctgttcttgacacactgcctgctttttacaatttttttgtgcctatttctattaaagtgttcagaaagtaaaa

SEQ ID NO: 142165 - DNA, 543 bp, Homo sapiens
agcaggcagatgccgctctggaagagtttaagcggtaggtggaactgaactcagagaaagtctatgctgaaatgaaagagcagatggaaaaagtggaggcagatctaactagatccaaatctcttcgtgagaaacaatcaaaggagtttttatggcaactggaggacatcagacagcggtatgaacaacagatagtagagctgaagctggagcatgaacaggagaagacgcacctattacagcagcataacgcagagaaggatagcctagtccgagaccatgaacgggaaattgaaaacctggaaaaacagcttcgcgctgccaatatggagcacgaaaatcaaattcaggagttcaagaaacgagatgcacaggttattgccgacatggaggcccaggttcacaagttgagagaagaattgatcaatgtgaactcacagcggaaacagcagctggtagagcttggtcttcttcgtgaagaggaaaagcaaagggctacaagggaacatgagattgtcgtcaataaactgaaggctgaatcag

SEQ ID NO: 142166 - DNA, 792 bp, Homo sapiens
atggtaccagttactccagaggttgagccatgtgatgcacctgttccccctttgccttctgccatgattatggaaaaagtggaggcagatctaactagatccaaatctcttcgtgagaaacaatcaaaggagtttttatggcaactggaggacatcagacagcggtatgaacaacaggtgctggagaagtgttttgaagtgttaaatgggaagataaccacaggagatagcgcctgcttccagccttgcttcatctatcagcttgctaatcacagctgtgtttccagccttctgctctccctgtatcatgagcttcgggagcttcagcaggcagtagtcctggctgttgatggttggctggagaggaaaaggaataaagaagcagtgtatgctggcaggccctgccagagaatatggagaaccactctccctactttctctagctataacccgtttttacaccagggctatgtagaatataaagtttgtaatttgattaccttcaagattattttgatagtagagctgaagctggagcatgaacaggagaagacgcacctattacagcagcataacgcagagaaggatagcctagtccgagaccatgaacgggaaattgaaaacctggaaaaacagcttcgcgctgccaatatggagcacgaaaatcaaattcaggagttcaagaaacgagatgcacagccacccagctgcggtttgaataaattgatgtggaaccaaaggcgggactttaaagggaaaaggtttgatggacttggactccgaaccagatga

SEQ ID NO: 142167 - DNA, 912 bp, Homo sapiens
cgctaccccggtctcgcgtccgcccgtaaactccggccgtgtacgcgtcttctccagggatctccacagctcccgctggcccctgcacactatgctagagctcctcggacccctgctcctctcggctcgtcccaattctcaagtctcctccactctgtccgcgtctcatctctccggtccccactcaactagccatctcctgtccgcccttcatctctactcctcaccctcctctccacactcctcccgccctctcctctcgcgctcgtctacttctcctcgtctcctttccgctctcggctccacccctttacacctcttcgcccattctgctccgtccttcatgcatttacggtctgggtgggctactggtcccgtttatcggtatcaaagtcattgatttactgctgaccgtttgcggtctggtgtgaggtttaccatgagtggattacgtccggcattatcaacatttatctttctgttattgattactggcggcgtttacccgctgctgaccaccgtactggggcaatggtggtttccctggcaggccaatggttcgttgattcgtgaaggtgatacggtgcgcggttcggcattaatcgggcagaattttaccggcaacggctattttcatggtcgcccgtcggcaacggcagaaatgccctataatccacaggcttctggcgggagcaatctggcggtcagtaaccctgagctggataaactaatagccgcacgcgttgctgcattacgggccgctaacccggatgccagcgcgagcgttccggttgaactggtgacggcatcggcaagcgggctggacaataatatcaccccgcaagcggcggcctggcaaatcccacgcgtggcgaaagcgcgtaatctcagcgttgaacagctcacgcaact

SEQ ID NO: 142168 - DNA, 717 bp, Homo sapiens
tctgcgcttaacacctgtttatggcgaatcaacttccggggggcgtcgttaccgtcagcctcgcgggtatttcccttatcgtcttgttacttcaggagtctcgcaaaaaatgaccgaatcagtagcccgtttgcgcggcgaaccagttaaccctgggatatggcaaatataccgttgcggaaaatctgactgtagaaatacctgatggtcacttcacggcaattatcgggccaaatggctgcggtaaatccacgttactgcgtaccttaagccgcctgatgacgcttgctcatgggcatgtctggctggatggcgagcacattcaacattacgccagtaaagaggttgcacgccggattggtctgttggcgcaaaatgctaccacgccgggcgatatcaccgtgcaggagctggtggcgcgtggacgttatccgcatcaaccgctgtttacccgctggcgcaaagaggatgaagaagcggtatcgaaagcaatgcaggccacgggaataactctatgtggcagatcaaagcgtggataccctttctggcggacaacgccagcgagcgtggatcgcgatggtgctggcccaggaaacggcaattatgctgctcgacgaacccacgacctggctggatatcagtcatcagattgatttgctggagttgttaagcgaactgaaccgcgaaaaaggatataccctggcggcggtgctgcac

SEQ ID NO: 142169 - DNA, 876 bp, Homo sapiens
  misc_feature (1)...(876): n = a,t,c or g
tttttggaaattaaattgaatttttaaatttttttagcccaaaagggggttttcccaaaatggttttttccaattttggggccaggggggtttttcccctggtttgggtcccccgggattttttttaccagggttttaaattttccccttaaaaaattttttacccttttggttaaaaaaattccttgggnnnnnnnnnnnnnnnnnnnnnnnnnnnnnnnnncagctgttgtaaaagaggctgagttcttgatttgattctcagcttggttactgttgagtgtacagcagtgctactgatttgtgtacattgattttgtatcctgagacttcactgaattcatttatcagatctaggagctttccagaggagtctttaagggtttctttgacaaagacagctacattccctatgctgatggtatcgccttcgttcagccaacgatctggcgtcagcggcggaactggcgcaacattacggcgtgccggttttcggcccggaaaaagaagatgagttctggctgcaaggcttgcctgcgcaaagtcgtatgtttggtctggaaagttgagttgaagtgaacttagaaaattcaatgcctttgtctttggcttctttttctgattattttccttcacgcgtttcaggaaactatcttggctcttagagtgcttaatgtgttcaataagcgcattaattctcttggcaagaatcttgcctttaacttgtttgtttacaataaggccaacagcatgccaggtaacattgtagactcttccagttttgccatgataacacttgtggggcattcctttttgagcagtacccattcccttgatgtctacaatatcacctttcttatagatttgcatatacat

SEQ ID NO: 142170 - DNA, 1467 bp, Homo sapiens; identical to SEQ ID NO: 138950

SEQ ID NO: 142171 - DNA, 873 bp, Homo sapiens
ctcgttttgcaaaaccagtatatccaggacaaactctacaaactgagatgtggaaggaaggaaacagaattcattttcaaaccaagggtccaagaaactgaggacatggtcatttcaaatgcatatgtggatcttgcaccaacatctggtacttcagctaagacaccctctgagggcgggaagcttcagagtacctttgtatttgaggaaataggacgccgcctaaaggatattgggcctgaggtggtgaagaaagtaaatgctgtatttgagtggcatataaccaaaggcggaaatattggggctaagtggactattgacctgaaaagtggttctggaaaagtgtaccaaggccctgcaaaaggtgctgctgatacaacaatcatactttcagatgaagattttcatgggaggtggtccggggcaagcttgaccctcagaaggcattctttagtggcaggctgaaggccagagggaacatcatgctgagccagaaacttcagatgattcttaaagactacgccaagctctgaagggcacactacactattaataaaaatggaatcattaaatactctcttcacccaaatatgcttgattattctgcaaaagtgattagaactaagatgcaggggaaattgcttaacattttcagatatcagataactgcagattttcattttctactaatttttcatgtatcattatttttacaaggaactatatataagctagcacataattatccttctgttcttagatctgtatcttcataataaaaaaattttgcccaagtcctgtttccttagaatttgtgatagcattgataagttgaaaggaaaattaaatcaataaaggcctttgataccttta

SEQ ID NO: 142172 - DNA, 439 bp, Homo sapiens; identical to SEQ ID NO: 132756
  misc_feature (1)...(439): n = a,t,c or g

SEQ ID NO: 142173 - DNA, 462 bp, Homo sapiens
cctacctgcacccaggtgaaataaacagctttattgctcacacaaagcctgtttggtggtctcttcacacggacgcgcatgaaatttggtgccatgactcggatcgggggacctcccttgggagatcaatcccctgtcctcctgctctttgctctgtgagaaacatccgcctacgacctcaggtcctcagaccgaccagcccaagaaacatctcaccaatttcaaatccggagcttgctacatgtgccggaaatctggccactgggcagaggaatgcccgcagcctgggattcctcctaagccgcgtcccatctgtgtgggaccccactgaaaatcggactgttcaactcacctggcagccactcccagagcccctggaactccggcccaaggctctctgactgactccttcccagatcttctcggcttagcggctgaagactgacactgcccgatcgcctc

SEQ ID NO: 142174 - DNA, 460 bp, Homo sapiens
  misc_feature (1)...(460): n = a,t,c or g
ctcagcccacctgcacccaggaccccactgaaaatcggactgttcaactcacctggcagccactcccagagcccctggaactctggcccaaggctctctgactgactccttcccagatcttctcggcttagcggctgaagactgatactgcccgatcgcctcagaagccccctagaccatcacggatgccgagcttcaggtaactctcacaatggaaggcaggaacgtcaggcctctgagcccaagccaagccatcgcatcccctgtgacttgcacatatacacccagatggcctgaagtaactgaagaatcacaaaagaagtgaaaaggccctgccccgccttaactgatgacattccaccattgtgatttgttcctgccccaccttaactgagtgattaaccctgtgaatttccttctcctggctcagaagctnccccactgcaccttgtgacccccg

SEQ ID NO: 142175 - DNA, 381 bp, Homo sapiens; identical to SEQ ID NO: 119823

SEQ ID NO: 142176 - DNA, 751 bp, Homo sapiens; identical to SEQ ID NO: 124292

SEQ ID NO: 142177 - DNA, 453 bp, Homo sapiens; identical to SEQ ID NO: 114501
  misc_feature (1)...(453): n = a,t,c or g

SEQ ID NO: 142178 - DNA, 487 bp, Homo sapiens; identical to SEQ ID NO: 116078

SEQ ID NO: 142179 - DNA, 357 bp, Homo sapiens; identical to SEQ ID NO: 114504

SEQ ID NO: 142180 - DNA, 705 bp, Homo sapiens; identical to SEQ ID NO: 136970

SEQ ID NO: 142181 - DNA, 462 bp, Homo sapiens; identical to SEQ ID NO: 137647

SEQ ID NO: 142182 - DNA, 1773 bp, Homo sapiens
tcaggataattgtttcagcatcgcaaccgcatcagactccggcatcgcaaactgcacccggtgccgggcagccacatccagcgcaaaaaccttcgtgtagacttccgttgaactgatggacttatgtcccatcaggctttgcagaactttcagcggtataccggcatacagcatgtgcatcgcataggaatggcggaacgtatgtggtgtgaccggaacagagaacgtcacaccgtcagcagcagcggcggcaaccgcctccccaatccaggtcctgaccgttctgtccgtcacttcccagatccgcgctttctctgtccttcctgtgcgacggttacgccgctccatgagcttatcgcgaataaatacctgtgacggaagatcacttcgcagaataaataaatcctggtgtccctgttgataccgggaagccctgggccaacttttggcgaaaatgagacgttgatcggcacgtaagaggttccaactttcaccataatgaaataagatcactctactcaagccagcatcttctgctatcagtgccctggcagccactcccagagcccctggaactctggcccaaggctctctgactgactccttcccagattttctcagcttagcagctgaagactgacgctgccggatcgcctcggaagcccctagatctgatgatttaataagagggtatttttccttttgctcagcacgtctcctttctgctgccatgcgtagagggatgtgtttgctttcccttctgtcattactgtaagtttcctgaggcttctccaaccagatataacgatttttatcttcacaggattcatctaaagcatttccatttggattatacgctatgcagttctttgtattaaaagtttcaaatgatggaaatctgccatgagaaattatgttccaagagcgaagtagagaaggcacgatgtgtactttttcagaaagaacagcgttgaattgttgaagctgagcgggccctccacactgggtggcattggtggttttgttggtatgcagaacctccattctccatgcttttttgctgcattctgtgcagctgagctctgacaactgtatcacacagtcttcctcaccctctggcttctgtctgttttcaaccattggaaagcattggtaggagaagagaagctctacctttggaatatcaaatatctggcctagtgtcttttcaatgacaaaaacaagagtaagattatccacttcaataagcaaaaagcagtaatttaatttgatgtgatttttaagaaaatctttgtttcctctgaggaactggtatgttgtctctccagaattcaggagaaatgtgtaattgaccagaccagaggtccccaagccccaggccacagaccggtactgtggcctgttaggaaccctgtagctgccagtggggtggttgccctccacttgcaagggcaaagggccagtgtgacagcctccacctgcacttagtgggtcccaagcttttgtccagcgtccaagaagaatgaggtcacacttgacaactgaagaatggtaagagtggagaattttattgagcgatgaaaacagttctagagtctccactggagcactgcctagtcgagctctgagaagagggccaccattctccaaaccccagaatggtgatccattgacagtttgcaacatgtgcttgggaaagctgcagccactaagcacagccaggagtggggctgtaccctgcaaagccacaggggcagagattcccaaggccat

SEQ ID NO: 142183 - DNA, 366 bp, Homo sapiens; identical to SEQ ID NO: 124300

SEQ ID NO: 142184 - DNA, 632 bp, Homo sapiens
atgagaacacatggacccaaggacgggaacatcacacatcagggcctgttggaggacacatgtgacatttggtgccaaagacccgggacaggaggactccttcaggagactggccccctgtccttgccctcattctgtgaggagatccacctacaacatcaggtcctcagaccaagcagcccaaggaatatctcaccaatttcaaatctggctgctccttgcaaggccacagcaagtccctcagcctctgctcccccaccctataatccttctatcacttccactcctcacacccggtctggcttacagtttcgttccgcgactagccctcccccacctgcccgacaatttcctcttaaagaggaggctggagctaaaagcacagtcaagggatcttgcttcaagtgccagaaatctggccactgggccaaggaatgcctgcatcccgggattcctcctaagccgtgtcccatctgtgtggaaccccactggaaatcggatggtccaacttgcctggcagccactcccagagcccctggaattctggcccaaggctctctgactgactcctttccagatcttcttggcttagtggctgaagactgatgctgcccgatcgcctcggaagcccc

SEQ ID NO: 142185 - DNA, 733 bp, Homo sapiens
atggtctccactctgctaaagatcaattctgagaaggaagagttcacaatgtaccctaagataattcataaactgaagatggaagaagaactgtctgagtccccccaggatgtcataacaaaggtgatggaagccctagatgcagcaggcagcctgctctgtgggagagactcagcccccctgcacccaggtgaaataaacagctttattgctcacacaaagcctgtttggtggtctcttcacacggactcacatgaaatttggtgccgtgactcggatcgggggacctcccttgggggatcaatcccctgtcctcctgctctttgctccgtgaaaaagatccacttacgatctcagggcctcagacccaccagcccaaggaacatctcaccaattttaaatcaggaccccactgaaaatcggactgttcaactgcacctggcagccactcccagagcccctggaactctggcccaaggcgctctgactgactccttcccagatcttctcagcttagcagctgaagactgacactgcccgatcacctcggaagcctgtttaagttgcgtttccgagttgacgtgcacatcacagatttcacagtgaaatgttttattttggaggcctgtgtttcctttattaacaggtcctttgcctttcactcctgccctaggaaaggctttgatagtgccacttccattccgggcttctaacatggttttgtgcttagtac

SEQ ID NO: 142186 - DNA, 1593 bp, Homo sapiens; identical to SEQ ID NO: 124303

SEQ ID NO: 142187 - DNA, 642 bp, Homo sapiens
ttcggactcagcccaccatgcacccaggtgaaataaacagctttactgctctcacacaaagcctgtttggtggtctcttcacacggacgcgcatgaaatttggtgctgtgactcggattgggggacctcccattgggagatcaatcccctgtcctcctgttctttgctccatgagaaagatccacctacgacctcaggtcctcagaccgaccagcccaagaaacgtctcaccaatttcaaatccgccactcccagagcccctggaactctggcccaaggctctctgactgactccttcccagatcttctcggcttagcggctgaagactgacaccggccgatcgcctcggttgaagccccctagaccatcacggatgccgagcttcgggtaactctcacagtggaaggttcccacggcgcccctaatcccgctygaagcagccctgagaaacatcgcccattctctctccatatcaccccccaaaaatttttgccaccccaacacttcaacactattttgttttatttttcttattaatataagacggcaggaatgtcaggcctctgagcccaagccaagccatcgcatcccctgtgacttgcacgtatatgcccagatggcctgaagtaactgaagaatca

SEQ ID NO: 142188 - DNA, 582 bp, Homo sapiens
atggctggaaagatcaaggctaggcatctgcatctgactgctcctcttcaggtcgctccccgccaagctaaatcaggctccgattcttccttggcctctgctcctccaccctataatccttctatcacctcccctgtgcacacctggttcagcttacagtttcattctgagactagccctcccccacctgcccaacaatttcctcttagagcggtggctggaactgaaggcatagtcaggatgaatgggaaagagtttttgctgcagcccaatctcacgctgataactgcctgcttcaagagccatccctccaggaaggcattagagcagttctctatagatcccaatgactataggcagttcccaggatcttgctttaagtgccagaaatctggccactgggccaaggaatgcctgcagcccaggattcctcctaagctgtgccccatctgtgtgggacttcactggaaatcggactgtccaactcaccaggcagccactcccagagcccctggaactctggcccaaggctctctgactgactccttcccagatcttcttggcttagtgactgaagactga

SEQ ID NO: 142189 - DNA, 436 bp, Homo sapiens
ccaggagtaagaggagcccagggtggtccctctatccccaggcagtgtgaagagtctgctattggtcctaaatttgcttggatcatctcttcctttcactggaagcaaggcatgttcaacatggaggctccttcttcccttttctttgtcaacatgtgtgcagtaaagaagcagacaacctggggccggccagacagaggattcatctggcagccactcccagaggccctggaactctggcccaaggctctctgactgactccttcccagatcttctcggcttagcggctgaagactgacactgcccgatcgcctcggaagcccccagaccatcacggacgccgagcttcgggtaactctcacagtggaaggttcccacgccgaccctaatcccgcttgaagcagccctgagaaacatcgcccattctctgtccat

SEQ ID NO: 142190 - DNA, 909 bp, Homo sapiens
tcaggatctaaaggtgcctgcattatagatggcggcacccacagggcagatgtggacagcaaccatgccacaccatgaggcagaagcatcagcaggtgcagcaggagctgctgcagggcactcaagcaggttccagacaactggcccagtgaccctttgctgtgtgccacctagggacttggtgccctgtgtcccagctgctccagccacagctaaaggaccaaggtatagcttgggttgtggcctcacggggtgcaagccccaagccttggcagcttctgtgtggtgttgagctttgtgtttattagtcattttatattgtttcttgttccttttccttatgtttgaggggctgatcaagttactatttttcctgccgcagcgttcctcacatggggcaccaactgtggtagcactcctctcacaggagcaccagctgtgggggtgtctgtcccttgcagacccttgacctggtgatggatgaataatgtacactgacacacagatattctgttttgccagtccagctgagagtgtctgtccacgctgcttacagactccttgctgagtgttgtaaacagttgctaccacggccccaatcagttgacctctgtaactcttggtcccagaatttaagatgctcagagtccttatgtcctcagtgatgggtggcagaggaaatggtaatggtttttcttggtcctcggcttgggtgcactgattacccctggcagccactcccagagcccctggaactctggcccaaggctctctgtctgactccttcccagatcttctcggcttagcggctgaagactgacactgcccgatcgccttggaagcccccttcttaccacattttagacttctcctttggttatctcttataccatcttttctggacctcat

SEQ ID NO: 142191 - DNA, 783 bp, Homo sapiens
atggaattttgtatttcattaggccggaaaataactttttcaaacatttttccctacaacggggccaattggaaggttttcttaaaaaagtcccaaccattattgaatgcactggttgagcaggatgatgccgaacgcttgttccgccgcttccgagcggcaggggatttaccgtatggcgcttttggtgaaattttctgggaaacacagtgccaggagatgcagcagcttgccgacagagtcattgcctgtcgccagccggggcagagtatggaaattgatctcgcctgcaacggtgtgcagataactggctggttgccgcagctttgggatgctgaagggatcagcttcagtgtcttcagctttgggatgctgaagggatcagcttcagtgtcttcagctttgggatgctggagcttgctacacatgctggaaatctgccactgggccaaggaatgcccacagcacggtattcctcctaagccacgtcccatctgtgtgggaccccaccgaaaatcggactgttcatctcacctggcagccactcccagagcccctggaactctggcccaaggctctctgactgaatccttcccagatcttctcggcttagcagctgaagactgacactgcccgatcgcctcagaagcctcttagtctgggtagacactttcactagatgggtagaggcctttcctacagggtctgacaaggccaccacggtcatttcttcccttctgtcagacataattccttggtttggccttcccacctctatacagt

SEQ ID NO: 142192 - DNA, 817 bp, Homo sapiens
tcagcttgcagggaggtgtggagggagaggtgccagcaggaaccagggctgtgcgccgcgcttgcgggccagctggagttccgggtaggcgtgggcttggcgggccccacactcggagcaaccggctggccctgccggcctgggcagtgagtggcttagcacccgggccagtggctgcagagggtgtactgggtcccccagcagtgccagcccactggcgctgtgctcgatttctcgcccggccttagctgccttcccgtggggcacggctcgggacctgcagcctgtcatgcctgagcctcccacccactccatgggctcctgtgcggcccgagcctcccccatgagcgccgccccctgctccacggcgcccagtcccatcgaccagccaagggctgaggagtgcgtgcacacggcgtgggactggcaggcagctccacctgcagcccccatgcaggatccagtgggtgaagccagctgggctcctgagtctggcagccactcccagagcccctggaactctggcccaaggctctctgagtgactccttcccagatgttcttggcttagcggctgaagaccgatgctgcccgatcgccttggaagccccctcaatgcgttctccaaatgcatgaattacaaccaggaaaaaaagaaggttttgatatcctgaactctttgctggtttaacatgtatgtttctgtcacatgtttcaggtgggacagggacagtacccgtgtaacgcagaagaggagcaccaggatggagaaactctagcctcaccgactgtttaggttgtgagagcacacggggcat

SEQ ID NO: 142193 - DNA, 1652 bp, Homo sapiens
ggggcttccgaggcgatcaggcagcatcagtcttcagccactaagccaagaagatctgggaaggagtcagtcagagagcctcgggccagagttccaggggctctggcagtggctgtcagactttcaaacttaacaccagtggtttgtcagtggctttcaagccttcagcgacagactgaaggctgcattgtcagcttccctacttttgaggtttggggactcagactggcttcctagctcttcagcttgcaaatgtcttatgctgggacttcactttgtgattgtaggtaacatctgtgctacactcaaggagaaatactcctcaatgctccatttagatgtgaccatgaagaaaaatggggagaaaagaacaaggctccaaaaaagaaagaagggaatgcctccacatccggcttatgaggacctaaacatagctgccatcactctccctgccaatgttgtccttcatcagccaagtggcttcagaacttcagggcagctggaccccgtttggtggtctcttgacacggacgcgcatgaaatttggtgccaagacccgggacttggatcaggggacttcccttgggagatcactcccctgtcctcctactctttgctccatgagaaagatccacctacgacctcaggtcctcagaccgaccagcccaagaaacatctcaccaatttcaaatccaagacaaaggagacaggttttatccatggacccaaaactccggcaccggtcacggactgggaaggcagccttcccttggtgtttaatcattgcagggacacctctctgattattcacccatgtttcaagggtgtcagaccacgcagggatgcctgccttggtccttcacccttagcggcaagtcccgcttttctggagaaggggcaagatttaattaacctcgccttcaaggtgtacaataatagaaaaaagttgcaattccttgcctccactgtgagacaaaccgcagccacatctccagcacacaagaacttccaaatgcctgaaccgcagcggccaggcgttcctccagaacctcctcccacaggagcttgctacatgtgccggaaatctggccactgggccaagcgaatgcccgcagcccgggattcctcctaagccgcgtcccatctgtgtaggaccccaccgaaaatcggactgttcaacttacctggcagccactcccagagcccctggaactctggcccaaggctctctgactgactccttcccagatcttctgggcttagcagcttgaagactgacactgcacgatcgcctcggaagccccctagaccattcacggacgccgagcttcgggtaactttcacagtggaaggtaagcccgtccccttcttaatcaatacagaggctactcactccacattaccctcttttcaagggcctctttcccttgcctccataactgttgtgggtattgatggccaggcttctaaacctcttaaaactccccaactctggtgccaacttagacaatactcttttaagcactcctttttagttatccccacctgcccagttcccttattagcctgagacactttaactaaattatctgcttccctgactattcctggactacagctatatctcactgccgcccttcttccctcgtgcc

SEQ ID NO: 142194 - DNA, 1212 bp, Homo sapiens
atgcacgggcgggcggtcgggagccatggagcgcggccctggggcccgggggcgcgggccggggtggccttcccacggcacgacatggagacctgtggttgcgaggctccctggggcggcttggaccgcgatggggctgggccctggcctcctaatggggctgccgtctggggctctcacccctgcccgcgactcggagcacccccacccctcccctgcccggccaggccgggcggcgttgttggcgggggccccggtggaggcccggcccgggaggcgcctgccatgaacgggctgtcgctgagtgagctctgctgccttttctgctacccgccctgccccggccgcatcgctgccaagctcgccttcctgccgccggaggccacctactccctggtgcctgagcccgggcctggtggggccggggcctggtggggccggggccgcccccttggggaccctgcgggcctcctcgggcgctggaagctgcacctgacggagctcgccgacttccagtacagccagcgcgagctggacaccatcgaggtcttccccactaagagcgcccacggcaaccgcgtctcctgcatgtatgttcgctgcgtgcctggtgccaggtacacggtcttcttctcgcacggcaacgcggtggacctgggccagatgagcagcttctatactgggctgaactcccgcctccactgcaacatcatctacgactactccggctacggtgccagcgcgggcaggccttccgagtggaacctctatgccgacatcgacgccgcctggcaggccctgcgcaccaggtacggcatcagcccggacagcatcatcctgtacgggcagagcatcggcacggtgcccaccgtggacctggcctcgcgctacgagtgtgccgcggtggtgctgcactcgccgctcacctcgggcatgcgcgtcgccttccccgacaccaagacctactgcttcgacgccttccctaacatcgagaaggtgtccaagatcacgtcgcccgtgctcatcatccacggcatggaggacgaggtgatcgacttctcacacgggctggcgctctacgagcgctgccccaaggcggtggagccgctgtgggtggagggcgccgggcacaacgacatcgagctctacagccagtacctggagcgcctgcgtcgcttcatctcccaggagctgcccagccagcgcgcctag

SEQ ID NO: 142195 - DNA, 766 bp, Homo sapiens
tctgcctctgaccctccttctcgctgctccctttgcccatctgctcctcccacctggccatgaccaaagcccgtgctggcaccctggcccagctctgagtcctgggaccctcggtcctctctcctgggccatggccaactcaggcctccagctcctgggctacttcttggccctgggtggctgggtgggcatcattgctagcacagccctgccacagtggaagcagtcttcctacgcaggcgacgccatcatcactgccgtgggcctctatgaagggctctggatgtcctgcgcctcccagagcactgggcaagtgcagtgcaagctctacgactcgctgctcgccctggacggtcacatccaatcagcgcgggccctgatggtggtggccgtgctcctgggcttcgtggccatggtcctcagcgtagttggcatgaagtgtacgcgggtgggagacagcaaccccattgccaagggccgtgttgccatcgccgggggagccctcttcatcctggcaggcctctgcactttgactgctgtctcgtggtatgccaccctggtgacccaggagttcttcaacccaagcacacctgtcaatgccaggtatgaatttggcccagccctgttcgtgggctgggcctcagctggcctggccgtgctgggcggctccttcctctgctgcacatgcccggagccagagagacccaacagcagcccacagccctatcggcctggaccctctgctgctgcccgagagtacgtctga

SEQ ID NO: 142196 - DNA, 806 bp, Homo sapiens
cactcactcactcacacacctcccccagctcaccgcctccccactccagcatggccgcctccaccatgtccatctgctccagcgcctgcactgactcttggcgggtagacgactgcccagagagctgctgcgagccctgctgctgtgccccagcccccagcttgaccctggtctgcaccccagtgagctgtgtgtccagcccctgctgccagacggcctgtgagcccagcgcctgccaatcaggctacaccagctcctgcacacccccatgctaccagcagtctagctgccagccggagtgctgcacctcctccccctgccagcaggcctgctgtgtgcctgtctgctgtgtgcccgtctgctgcgtgcccgtctgtaacaagcctgtgtgcttcgtgcctacctgctccgagtcttccccttcatgctgccagcagtctagctgccagccaacttgctgcacctcctccccatgccagcaggcctgctgtgtgcctgtctgctctaagtccgtctgctatgtgcctgtgtgctctggggcttccacttcatgctgccagcagtctagctgccagcctgcttgctgcaccgcctcctgctgcagaccctcctcctccgtgtccctcctctgccaccctgtgtgcaagtccacctgctgcgtgcccgtcccctcctgcggtgcctctgcctcctcctgccagcccagctgctgccgcacggcctcctgtgtttccctcctctgccgccccgtgtgctcccgccctgcctgctacagcctctgctctggccagaagtccagctgctga

SEQ ID NO: 142197 - DNA, 861 bp, Homo sapiens
atggtttggctctttaagatgctgcttctggcccgcaaagaagacattgcacatgcatgtttccgaggacacatacatggatgcataagagctatgaagatgaatcataggctgatagacattcgaatttggagggagcattttgactatgcaatgccagtaccaagtgaaattgtttctaagagcaactggcagaccaagagattctctcctgtgcctggctcggtgggacccatgcccacggagccttactcactgctagcgcagcagtctgagatcaacctgcgacgctgcagcctggattgcagctcctcgccagcaacagaacaaagcgggatggagaatgactttgacgagttgacagaagtaggcttcagaaggtcagtaataacaaacttctctgagctaaaggagcatgttctaacccattgcaaggaagctaaaaaccttgaaaaaaggtacaaggaggagctgtcaccattccttctgaaactattccaatcaatagaaaaagagggaatcctccctaactcattttatgaggccagcgtcatcctgataccaaagcctggcagacatacaacaaaaaaagagaattttagacaaatatccctgatgaacatcgatgcaaaaatcctcaataaaatgctggcaaagcgaatagagcagcacatcaaaaagcttatccaccatgatcaagtgggcttcatccgcagcattgttaaagaaaataattttcaacccagaatttcatatccagccaaactaaacttcataagtgaaggagaaataaaatcctttacagacaagcaaatgctgagagatttgtcaccaccaggccttccttacaagagcccctga

SEQ ID NO: 142198 - DNA, 1602 bp, Homo sapiens
atgtgtatgggctttggctacacagaaaccctgaaaactgtggcagtcgcagtaactgtgggaaaacttacattgcccatagttgccaggcccccagtccaggctgccccaatccgaacttctgtagatgggtcttgggcatcacgaaagggcagacaaaggaaccagagtacagaggtattaataattcagctcaaatctctcagctggaatgtggaaaagccaacattcactcacagctcttggtttgacccaaagctgcctgcaattccctactatgtgatctacaaatacaaagactgcagacagcataacattctcctgtttgagaaatatagcagcagcctgggccttcttacacgttgcagacatatgcagcatgaaaggagaacagctttcataaccaacaacaagtgttccaaaatacacaccttggagcagctgcctcctatagttacaggaagtggctggttgggccttctagaagctgcccacgattcttggctcattgctgcctttatctgtaaagccagcaatggtggtcaccaacatcaaagaccaaaggtacataaaaccgcaaagatagggagaaaccagagcagaaaacctgaaaattctaaaaaccggagcacctcttctcttccaaatgatcgcagctcctcgccagcagcagaacaaagctggacggagaatgactttgatgagttgacagaagtaggcttcagaaggtcggtaataacaaacttctctgagctaaatgagcatgttctaacccatcacaaggaagctacaaacattgaaaaaagtccctgctattggcagaacctggagttagcagtagacaaatctgttcttcacagtcctggctctatgcaggtgagggtagagggtggcttggagccaggagatgatggccagagggagaacagccccgaatggaccagagttgatggtggagatggaaggtctgaagagcgaaaggaaagatcagggtcatcagatgccagggctggagccccagaggagggacactctgaaagctggaatcctgcagcagcagatggcctaaatgtgaagcctataactatgcgacttctggaaacagtattggagaaaatgttcgtgaccttgggtcaagtcaaggtttctgatgatgcacatccaacaaaatttcagtactaccaggaagctctgtctatggccttgtgccctgcccatcagcttcctcatgagcttgaatgtggggtttccagctgttctaaaatgagagccagtgaaggaaggggctcaggggatcgtggcaaagagaacagcacacaggatcccctagaccatcttccatctgatacgactagtcccccacctaataccctcaacccatctcctcaggcccagcctaagtctcactctccaaaagggctccaagctcttaattcgccaggtggcttttgccgggctagcaacatcaaggatccaccgcaacatgttgtcagtgccgtcccgcccatagtgcgcccccacggcaggcaaagcccatgctcctgcccccgggctggtccagggtcccggcaccatatcgacgggccgcagcctatgccctga

SEQ ID NO: 142199 - DNA, 715 bp, Homo sapiens
ttaagaaagtttatgaatttgtgttgtgctgcattcaatgcctttctgggccacaggttgaacaagcttgctgtaagatgttgctaaatctccccaagtatgtttcataaagcactgacctatagagctaatctctcccattgccatgtattgctgtgctctccgctcctgcagcgtccccaccggccctgccaccaccttctgctcatttgataaaagctgccgctgtggagtctgcctacccagcacctcagaatcctcatctaagaaactgaaagctaaccagacgcccattgccatggattgctgtgcctctcgcagctgcagtgtccccaccgggcctgccaccaccatctgctcctctgacaaatcctgccgctgtggagtctgcctgcccagcacctgcccacacacagtttggttactggagcccacctgctgtgacaactgtcccccaccctgccacattcctcagccctgtgtgcccacctgcttcctgctcaactcctgccagccaactccaggcctggagaccctcaacctcaccaccttcactcagccctgctgtgagccctgcctcccaagaggctgctaatggatggctactttgctcagtgcctgagattgaaaaagtcaacatagaagctttagcattcacctatctcagtacctacaactaatgtactctgctttagaaattggaacaaggatggag

SEQ ID NO: 142200 - DNA, 576 bp, Homo sapiens
atggacttttatcatgttggccaggctggtctcgaactcctggtctcaagtgatctgccagcctcagtctcccagggtgctggcattacaggcttcaaagagacagctttcctgtacgcggtgtcctctgccgccctcacccacaccctggcccgggcctgcagcgctgggcgcatggagcgctgcacctgtgatgactctccggggctggagagccggcaggcctggcagtggggcgtgtgcggtgacaacctcaagtacagcaccaagtttctgagcaacttcctggggtccaagagaggaaacaaggacctgcgggcacgggcagacgcccacaatacccacgtgggcatcaagagatgtggccgccatctggctgccaatgaaagaaccatattgaagcctgccatgctgggagcaggggaagacaggccacatccccagggtcagcacctgcaccttccggagactcagtgcctcccaggggcctccgtgcctcactctggccctaacctgaaagtcccattcacctccaacagaaagctcacctgggactgccctcataccccactctga

SEQ ID NO: 142201 - DNA, 764 bp, Homo sapiens
gactcttcagggacacagcagtcactgcgctgcagggacagtccccaagtgccaaggcacagcctaaaggggcctgttcccaccatggcatccgtgacaagaaccaggagccagaatgcaggtttctgggacttgtcagctcccttctgagtgccctgttgaggattcctagaagtccagacacctcacccccctaacctggatggaccacgcagagccaataggaatacttttctgtggacgtgccatgttggaatcccagatctccctgccctgccagcccctgccagcttcctggggacccaactgaccctgaagaaagcctctgatgggcctagaacagagaaggtgacccaggaccttgcccagcctttctggacaactggaagacagttacgcttcgtcctccacctctccctccaacaaaaggatcttagcaagtgttggagaggtgctgaagtcgtattaggaccaaccagactttttctttgaggatactcagaaggagtgaaggagaatggaacagggggtgtgaataaatgagctttctccatgtgtgattcaaagtggtttaacccatgcctcaccttctagaacacccgtggccctctctagccatgagaagtgtcaccactagccatcaaaatgctcccaaaagtccaacctttgaccaaactacatttcagattttcatttcagattttcttaaattctggagaaaaaagaaaataaagtaaaagaataaataaaaaaaaaaaaaaaaa

SEQ ID NO: 142202 - DNA, 405 bp, Homo sapiens
cttccccaccaattgatataggtttatgcctgcagtaaatgggatagttataaagctaatgcttcataccaatgcaactagtgcatgaagtgggttaggccagctttcctgtaactgaatatgggtatcagccagactggctatgtccccagcactagcccaggctcagggtcaagtacacacagctgtgcatcctctgaagcgctggagggagagaaagaagttccatctggggaagcgggtggagctgaggcaggggaccaccttggggagggtgggttggcccaagcgccgtctctcccagggatcagcaggctgctttccagctgggttagctcattccccacctcatcttgcagaagctccaggttcaggcttctgcacagctttgttcttgtggttgag

SEQ ID NO: 142203 - DNA, 1561 bp, Homo sapiens
ccccctggaagtacaatcacccttaaaggatgaggatggtgaagagtttggagaaggagcagcatttaggaaagagtgtatacccgcttctcgcattcaactaactgcactgtgttcagcagtacagtacaaggtagggcttccaggtacttgtatcctgattgatgctgtcactctcactggaaaacaattggaaggtaagaaccatggcttccacctctctggattccagtaccctacaccaaatctggcttattataggtgctcaacagaatttgtagttccctttaaagatgatgcttggaataacccacttccagcaagagtggacagcagcaagaagactttgtttcatccttcagctgagtcgcggggcttcctttggaggaagaagaagcggaaatgtcatgctctggacccacctggtaaagagaggttgaccgtggcagtgagtactcggggcacctggggccagctgacccttgtgcttcagacacaggtgttgggctcggtgggaagggattttgccgatttcggaaccaccatcaaacaggattttcgcctgctggggcaaaccagcgtggaccgcttgctgcaactctctcagggccaggcggtgaagggcaatcagctgttgcccgtctcactggtgaaaagaaaaaccaccctggcgcccaatacgcaaaccgcctctccccgcgcgttggccgattcattaatgcagctggcacgacaggtttcccgactggaaagcgggcaaccccagcagagcaccccacgagaagtgtgggagattaagggggcccatggttccaagctggatgaggggccagctcctctcggactcctcctcagtgtcctcgtaggggaaatgggaatgctaataatggcctacttcacagaactgtggtggggatcctctagagtcaaccgcgaggtagggcttccaggtacttgtatcctgattgatgctgtcactctcactggaaaacaattggaaggtaagaaccatggcttccacctctctggattccagtaccctacaccaaatctggcttattataggtgctcaacagggctttccagcttcaagtcaaatgctacagaccgtgactctcccacgttcctgaggggacaacagaagacccacaagctaatgggtgtgcccctggaggaggtcactagatcaacagaaagagaggaacttcagaagagaaagaatctgctgcgaccgctcgagtaccaagaacgcttgagcagcagctcagcagcaccaggcagactctggcttggctcctcgtcctttgtttctgaccagctgcggccaatgcctacaggcttgagacctagttccagaaggcggccagcacctggaactgtggagcctccatcagtaaagcccaggatcaccagcacccagatttcccagggctaccaaagtctagggccactgtctccaatagtcattagcaggaccagggaatcctctggcattgcagcccccagcgctcccttctccgaagccctgttgcgtcagggcgtccccacgcccccaccttaa

SEQ ID NO: 142204 - DNA, 1771 bp, Homo sapiens
atgaatgtggacatcttccagtgtgattcagaagagaccctgaagaaagcctctgatgggcctagaacagagaaggtgacccaggaccttgcccagcctttctggacaactggaagacagttacgcttcgtcctccacctctccctccaacggtctctggccaaccaagatgccctgaccacacagactgtatgctgggcgaagggtgtgggccatccgtggggcctgcaggagaacaagtggaatctgcagcatgggacatctctgcctagagcctgtgcaaacaatggcactgtcctcatcattgagggggtcacgcacaaggcattccccagaggcctggcccttccagggcccaagcccagcctgagcctgcctgtgcgtgggaagagggtgatcggagcccagggtgcattcaagaacctgtcaagcctgaccgggcgggaagtcctgacgcccttcccaggattgggcactgcggcagccccggcacagggcggggcccacctgaagcagtgtgacctgctgaagctgtcccggcggcagaagcagctctgccggagggagcccggcctggctgagaccctgagggatgctgcgcacctcggcctgcttgagtgccagtttcagttccggcatgagcgctggaactgtagcctggagggcaggatgggcctgctcaagagaggcttcaaagagacagctttcctgtacgcggtgtcctctgccgccctcacccacaccctggcccgggcctgcagcgctgggcgcatggagcgctgcacctgtgatgactctccggggctggagagccggcaggcctggcagtggggcgtgtgcggtgacaacctcaagtacagcaccaagtttctgagcaacttcctggggtccaagagaggaaacaaggacctgcgggcacgggcagacgcccacaatacccacgtgggcatcaaggctgtgaagagtggcctcaggaccacgtgtaagtgccatggcgtatcaggctcctgtgccgtgcgcacctgctggaagcagctctccccgttccgtgagacgggccaggtgctgaaactgcgctatgactcggctgtcaaggtgtccagtgccaccaatgaggccttgggccgcctagagctgtgggcccctgccaggcagggcagcctcaccaaaggcctggccccaaggtctggggacctggtgtacatggaggactcacccagcttctgccggcccagcaagtactcacctggcacagcagatggggagaaagcacaggtggtagaagccatccgttcagagaaaggagagctttctgtgcttgagtggacccgagtgagatctgtgccctggagccctgtgtccttgatttggcttttcaaatatgcctccgctgaggcctcattcttgtctcgagagctgggttatgcacactcacccagccgtgctcaaaactaccaccagtgcagcctgatgacagaggcccagggtttggtaaatgaagttgctgctctgccagtgctgacaacagccacagtagttgttttgcgcaggcttcatacagaatccctggctgcctcaaccacaagaacaaagctgtgcagaagcctgaacctggagcttctgcaagatgaggtagggcttccaggtacttgtatcctgattgatgctgtcactctcactggaaaacaattggaaggtaagaaccatggcttccacctctctggattccagtaccctacaccaaatctggcttattataggtgctcaacag

SEQ ID NO: 142205 - DNA, 698 bp, Homo sapiens
acgcacgaccccctgcctcttcttccagaagccaatgggcacagaagcaccaattctcccacaataggttcacctgctattgtttcccccacccaggacagtcggcccaatatgtcaagactctctgatcactagatcccctgcatctccactgaacaaccaaggcatccctactccagcacaactcacaaaatccaatgcgcctgtccacattgatgtgggcggccacatgtacaccagcagcctggccaccctcaccaaataccctgaatccagaatcggaagactttttgatggtacagagcccattgttttggacagtctcaaacagcactatttcattgacagagatggacagatgttcagatatatcttgaattttctacgaacatccaaactcctcattcctgatgatttcaaggactacactttgttatatgaagaggcaaaatattttcagcttcagcccatgttgttggagatggaaagatggaagcaggacagagaaactggtcgattttcaaggccctgtgagtgcctcgtcgtgcgtgtggccccagacctcggagaaaggatcacgctaagcggtgacaaatccttgatagaagaagtatttccagagatcggcgacgtgatgtgtaactctgtcaatgcaggctggaatcacgactcgacgcacgtcatcaggtttccactaa

SEQ ID NO: 142206 - DNA, 1263 bp, Homo sapiens
atgtccaagcaagactgtgaatgcacatgctttctgaagctcaacatctactgtgaatggggtggtgactgggcctttacgaacagctctgagctcaagcgcagcaagcagatggtgcactgggcacaggagaggcagccccgtgtccctgcagtgttctcgcagtctttgccttataaaactcatgcattcaatgaagagcggctgcaagaaatcggaagactttttgatggtacagagcccattgttttggacagtctcaaacagcactatttcattgacagagatggacagatgttcagatatatcttgaattttctacgaacatccaaactcctcattcctgatgatttcaagccttttatctttaacatcatctttggcctgcacagagctgccggtgtggcagtcacggtccaggctggaagaggaggtctgggtttcacctggtccctggacaccacgcagggggcggatgcagggcagaacccggcagaggagcagctgcctgcgccctctccccaccccacctctcctgtttccgccctggcgcacaggccacgtgtcaggccacatcttctcacagctcagaaacgtggtcatggagatcaggaggataaatacattcattctccacctcagcgtgggatgggaatctgtgatttgactggaggacccacagctgccatatccatagaccaagagcctgaggagccgcctccagcactctttcttcacctctggttgtccttctccactcctcctctggccacacgcacagttcacacatacatcaccctttatccaatggagtcagagatttccctggatgtagctcaggtggaaaacctgcttggaaaggaaaagagaaggctgttcgtactccgtgggagggtagtttttgagtcttccatggagtcttctacacattccagtggaaatggcagtgccagccccctgaccccagttgggagggaccctgggatcattgactgggcctcaccatctggagaagagattctggaaaagttgtctctggacagtttgccagaaacactcctcctggacctaggtgacatctggcattcactgggatctttgtcctcagaagatatagaccaattctcttctggctgttgggctgtccagttcttagttacattcgtcctatttggaccaatagtgcctgcagctgaactgccagacctggtattagcacaggagatttgtttcttggaatattttggagaggatagtggttga

SEQ ID NO: 142207 - DNA, 534 bp, Homo sapiens
ttaaagccggatttcgcttagtcccgtgaaagcgaaggagcaccagcgcttcctgattccgcacagttctctcggcagagacggcccgtcctctccaagaaccggaagccggacagcgtcaggacgttttattcttctcacctgggattcagagaggcagcggccaaggacagggcccccgccgaggccaccgggcagcgtccaggtctcggcctttgggaggggagcagcgggggaggggcacggggaggggcgaggacggtgtcttatcatttgtatgttaccagaaacctgtgctatgacttttaactagaaaaacaacaagggatgatggatctttctttggtcacattagcctctgtaagttactcaagacagctgcaatgaactgacaacaatatccacaaacaaggcaaaaggaacttctcatggcagggaactgaatctggatgttattctcagttctgtcattttccagatacctttagaaagaatgagctgcagtttgtgttgttgttttccttgagacaaggt

SEQ ID NO: 142208 - DNA, 485 bp, Homo sapiens
ataagctactacggcagctactatggaggcctgggctatggctgtggaggctttggtggcctgggctatggctatggctgtggatgtggcagcttccgcagactgggttctggctgtggctatggaggctacggatatggctctggctttggaggctatggatatggctctggcttcggaggctacggatatggctgctaccgcccatcatactatggaggatatggattctctggattctattaaactacttgccccagcaacacaatgtgtgaaattataagaggactttcccagaggctgaccttcaatcagttgtgacaacaaaagatcatgctggagctattttgcacaaagagaatttaacatctcagaatttcaggcaattttttttctctgtatacccacatctctataataatcctagtattctctagttttgcttttaaagctgattgaattatctgtttatcttccaataaaac

SEQ ID NO: 142209 - DNA, 658 bp, Homo sapiens
ctgaacaacaaaccaactcaccactcctgacaccatgagtcactacggcagctactacggaggcctgggctacagctgtggaggcttcggtggcctgggctatggctatggctgtggatgtggcagcttctgcagacggggttctggctgtggctatggaggctacggatatggctctggctttggaagctacggatatggctctggctttggaggctacggatatggctctggctttggaggctatggatatggctgctgccgcccatcgtacaatggaggatacgggattctctggcttttattaaatgaattgctgaaattggaagcagaggagaaacctccaaatgtgtttggtcctgtcccgtgctttcattccaaaaatccattctattgccttcagcatcaatggagagatatttagctatgttaaatctttaaaatagatttaagctgcttctgtgaatatttgttgtctttttactttcggagtccgtcacctgaaatcatattcatgtataactactctaggttgttcttctaaatttgctttatttttcttaccaccattaccttgatgttatctatcaagatcctagcaaaaacttgtattttgcttttatctaataaatgaagtaaagtataaatattttaaaaa

SEQ ID NO: 142210 - DNA, 1373 bp, Homo sapiens
ccagtgtccaggctatcagcagagaaagacaggtgggcagcatggctccgggcgaaaaggaaagcggggagggcccagccaagagcgccctccggaagatacgcacagccaccctggtcatcagcttggcccgaggttggcagcagtgggcgaatgagaacagcatcaggcaggcccaggagcctacaggctggctgccgggagggacccaggactcacctcaagctcctaaaccaatcacaccccctacttcacaccagaaagctcagagtgccccaaagtcgccaccccgcctgccagaaggacatggagatggacaaagctcagagaaagcccctgaggtttctcacatcaaaaagaaagaggtgtccaaaacggtggtcagcaagacttatgagagaggaggggacgtgagccacctcagccacaggtacgagagggatgctggtgtgcttgaacctgggcagccagagaatgacattgacagaatcctccacagccacggctccccaacgcggaggagaaaatgtgccaacctggtgtctgagctaaccaagggctggagagtgatggagcaggaggagcccacatggaggagtgacagcgtagacacagaggacagcggctatggaggagaggctgaggagaggcccgagcaggatggagtgcaggtggctgtggtcaggatcaagcgccccttgccctcccaaggagggtgcctgcatgaggaggagaaatactccctctacaggaagatctatggagttggcagtgaaagcccattttcactttctccatacagatcggagacagaagagaaaatcatgcctttaggcgtcccatgcattttgaagctgcctttgggtaaccagatttcgggaagtgagtttggatgggtaaacagatttacagagaaactcaactgcaaagcccaacagaaatatagcccagtgggcaacttgaaagggagatggcagcagtgggctgatgaacacatacaatcccagaagctcaatcctttcagtgaagagtttgattacgagctggccatgtccacccgcctacacaaaggagatgagggctatggccgccccaaagaaggaaccaaaactgctgaaagggccaagcgtgctgaggagcacatctacagggaaatgatggacatgtgcttcattatctgcacaatggctcgccacagacgagatggcaagatccaggttacttttggagatctctttgacagatacgttcgtatttcagataaagtagtgggcattctcatgcgtgccaggaaacatggactggtagactttgaaggagagatgctatggcaaggccgagatgaccatgttgtgattacgctactcaagtga

SEQ ID NO: 142211 - DNA, 1656 bp, Homo sapiens
atgctgggacaagaagcccagttagagtcagggaggccgtacctgcagcagggactgctgcgaggagaatcctatccaacagaatcctcaacaacagaaaccaccaagatttcctccccaccatcccactatgtgccaggggccttaaaaccttatctccacccctcgcaatggctcctcgaggtcagtctggttatccacaattcacagagaagagggaagagattgatgcctcttctgttgcttagcaaagccatctctcctcctccacctgctcacctgtggagcacagccccagggacccctgtggaaggcaaagcccatggacaggccatgtccaagggaagaacaaaaactctgatcgaagtgaaaagaaatgcctcttcgggcaagaagaggagcggaggggctggggaaagaggagaaggaagaagaggagaaacaaagacgggcagaaagggagaagggggagaaaatgaagaggaggaggaggaggacgaaggctcaaaaacagaaggcaagatggggtctcactgcattgcccaggctggagtgaagtggctgttcacaggcacaatcatagctctctgtagcctcaaactcctgagctcaagttatattcccacgtcagcctcccacgtagctggaactacagtacagaagatggcctacactgacttagaaaagggcagtagagttacctgcagtcaactgcagtcagaaaacagagccataattatccctgatgtgcaagccgtgctccgcccttatgagtgtatttatttttattgcatcctctgcattaaggaggacaaagggtatatatttggaaaccaattgttcagagacacccccttgaaacttgtaactatcacctacttctccaacacatggcatgaaaaaattattttacaactacatccaccatgtacttatggccctctgtcagtatggcagaatgttgtactccatgatattactcaacaggctaaacagcacattatcacattgactctgaaaatgaggaatgctatgtccaagatggccctcaacagattggatgatggcccacctggattgctgaaggctgggccgaaacctagccacaagactcaagggttggggggctgcaatcagggtagagcagaacttgatctggacattcctatcttgacaacggcactggggatcttccgtctgaaaagagagttggccaaggtacgcgttgttggccaagagtttccatctgggcatgctgctgcaatgaccgatgaactgaaggcagttcagacttcagacatccatgtcctgtcatcagtcaacttcaggaaatttttcgaaattgctgcccaatctgcaaggacaggaggtagaggaaatggaaaaagaggccagaaagaagaattcagggaccaacagcagctgaacagcttggctgacccgcacgctgggcgtctgattccaggacaactctccaaggaaagggaggaggtggaaggaggactggcacagtgtctggccaatgagagggacttggtcacagcagaggaaatgtctataaggattttcctagaaaagccagataaatgttacatgaaaatcaataacatgcagcatattgtctctagcaccttggatgctgctgttggaccctaa

SEQ ID NO: 142212 - DNA, 987 bp, Homo sapiens
tcagcagcattcatccccatggtattcaggccactttccaagaaccagcccctccttgtacttaagtttacagccctcacctttgtgcttagatggactgtggccagcgggacctccaggcctggctgggtcaggagagttttgcttaaccagatctgtttgatccttgaaccaaaaagcggggagccagagagatcctttgagaactgatgactgctgctgggtcctgcccagccatttgcattttataaaggtctttggcagcggccaaggccttctcattatgtggtgtttttccacttcgggatgaaccggagtggtttgtgcagccacctgatagctctttgcaccagcttaatgggtttatcaggacatccattgttaaggagcacttgtagtcttccgtggttgatcctatttggggatctttgagattcagaaatctggatgtccatttccctccaacaattgcagtgactgtgctggtgtctgaggcatggaacatgcacagtagccacagagctaggctctggagcatgcacgtgattgtgggaaggaggtagtggctttggccctggtcgttgatgttctgcagggcttctttgcccgaggccctccggatctccaccttccggcccgattcaacagatggctctccgccggcgcgccggccctgccgcgagtacggcggctgcgggtccgggcccaagtgggcgacgtcccgctgctgagccaccacctgccccgagccccggcccaccgacagcgagtcgaagtcgatggtcttgttctccgaggacccttccaccgggcagaacatgccacagaatttctgccggggcttggggctgccggagcccaggtttttaaaaaaagcagggacctcttcgtcctctgccgccttcccggattgctttctctcggccatggctcgggggctcgggtagggtcctcgccgtccgtccgtccgtctgccagtccctaagt

SEQ ID NO: 142213 - DNA, 1413 bp, Homo sapiens
atgacttcaccaaatgaactaaataaggcaccatggaccaattgtggagaaacaggatggattaaagacttaaatggaaaacccaaaactattaaaatcctggaagacaacctagtcaataccatcctggacataggaacgggcaaagatttcatgacaaagacaccaaaggcaatcgcaacaaaagcaaaaattgacaagtggaatctaattaaatttaagagcttctgcacagcaaaagaaactatcaacagcataaacagacaacctacagaatgggagaaaatattcacaaactatgcatttgataaaggttttgatctgctaacacctgtaatgactactgtatccattaagaacgtgattacagggacatctcaggttgactgtgctgtcctgattgttgctgctggtgttggtgaatttgaagctggtatctccaagaatgggcagaccagtgagcatgcccttctggcttacacactggatgtgaaacaactaattgttggtgttaacaaaatggattccactgagccaccctgcagccagaagagatatgaggaaatcgttaaggaagtcagcacttacattaagaaaattggctacaaccccaacacagtagcatttgtgccaatttctggttggaatgatgacaacatgctggaggcaactgctaacgtgccttcgttcaagggatggaaagtcacctgtaaagatggcaatgccagtggaaccacgctgcttgaggctctggactacatcctaccaccatctggtccaactgacaagcccttgcgcctgcctctccaggatgtccacaaaattggtggcattggtactgtacttggtggtcaagtgaagactggtgttctcaaacccggtatggtggtctcctttgctgcagtcgatgttacaactgaaataaactttattcctgggaacaatgagggcttcaatatcaagaatgtgtctgtcaaggatgttcgttgtggcaacattgctggtgacagcaaaaatggcccaccaatgaaagcagccggcatcactgctcaggtgatcatcctgaaccatccaggccaaatcagtgctggctatactcctgtactggattgccacatggctcacactgcatgcaagtttgctgtactgaaggaaaagattgatcaccgttctggtaagaagctggaagatggctctaaattcttgaagtccggtgatgctgccatcattgatatggttcctggcaacctcatgtgtattgagagcttctcagactatcctcctctgggtcactttggtgtttgtgatatgagacagacagttgctgtgggtgtcatcaaggcagtggatcagaaggctgctggagctggcaaggtcaccaagtctgcccagaaagctcagaaggctaaatga

SEQ ID NO: 142214 - DNA, 1756 bp, Homo sapiens
atggacataaagaagggaataacagacatcagcgcctctttgagagtggagagtggatgggaagccagaacgagaaaggaaaagactcatatcaacactgtgatcatcggacacgtagattcgggcaagtccaccactactggccatctgatctacaaatgcggtggcgtcgacaaaagaaccatcgaaaaatttgagaaggaggctgctgagatgggaaagtgctccttcaagtatgcctgggtcttggataaactgaaagctgagcgtgaacatggtatcaccattgatatctctttgtggaatatttgagaccagcaagtactatgtgactatcattggtgccccaggacacagagactttatcaaaaacaatgattacagggaacatctcaggcctgactggtgctgtcctgattgttgctgctggtgttggtgaatttgaaagctggtattctccaagaaatgggcagacccgagagcatgcccttcttggcttacacactgggttgttgaaacaaactaattgtcggtgtttaacaaaatggattccacatgagccaccctatagccatgaagagatatgaggaaattgttaaggaaggcagcacttacattaagaaaaattggctacaacccgagcacagtagcatttgtgcccaatttctggttgggaatggttgacaacattgcttggaggccaagtggttaacatgcccttggtttcaaggggatggaaaagtcaccccgtaaggattggcaattgccagttgggaaccacggctgctttggagggctctggcactgcaatcctacccaccaactcgtccaactgaccaagcccctttgcgccctgcctctccaaggatgtcttaccaaaaattgggtggtattgtcaacgttgcaacagaagtaaaatctgttgaaatgcaccatgaagctttgagtgaagttcttcctggggacaatgtggggctttcaatgtcaagaatgtgtctgtcaaggatgttcgtcgtggcaacgttgctggtgacagcaaaaatgacccaccaatggaagcagctggcttcactgctcaggtgattatcctgaaccatccaggccaaataagcgccggctatgcccctgtattggattgccacacggctcacattgcatgcaagtttgctgagctgaaggaaaagattgatcgccgttctggtaaaaagctggaagatggccctaaattcttgaagtctggtgatgctgccattgttgatatggttcctggcaagcccatgtgtgttgagagcttctcagactatccacctttgggtcgctttgctgttcgtgatatgagacagaccagttgcggtgggtgtcatcaaaagcagtggacaagaaaggctgctggagctggcaaggtcaccaaagtctgcccagaaagctcagaaggctaaatgaattattatcccctaatacctgccaccccactcttaatcagtggtggaagaacggtctcagaactgtttgtttcaattggccatttaagttttgtaagtaaaagactggttaatgataacaatgcatcgtaaaaccttcagaaggaaaggagaatgttttgtggaccactttggttttctttttttgcgtgtggcagttttaagttattagtttttaaaatcagtactttttaatggaaacaacttgaccaaaaatttgtcacagaattttgagacccattaaaaaagttaaatgagaaaaaaaaaaaaaaaaa

SEQ ID NO: 142215 - DNA, 897 bp, Homo sapiens
atggggggccagggagatcttcctggagaaactcaggagctccgacccagaggcggtttttcagctccagatgtgactaaaaagggccaacctatggttcaggtccttgcttcagagagtgtaagctccaagccttggtggcttacagatggtgttgagcctgcaggtacacagaagtcaagaactgaggtttgggaacctccacctagatttcagaggatatatggacatgcctgggtatctaggcaaaagtttgctgcaggggcagagcctttatggagaacctctgttagggcagtgcagaagggaaatgtggggtggaagcccccacacagagtccccactggggcactgcctagtggagctgtgagaagagggccaccgtcctccagatcccagaatgataaatccaccaacagcttgcaccatgtgcctggaaaagctgcagacactcaacaccagccagtgaaagcagtcaggagggggcctgtatcctgtgaagccacaggagtggagctgcccaaggccatgggagcccacctcttgcaacagcattccatggatgccaaatttcctaaatgggcctggcctcttaaacagagatgttggcagcgaaattgtcttccagggacctggcagcttgttttggccctgacatgcaaaacccatcactattctgggagagaagtgggcagcaaaggcttggctgcctctgctgagaaccagtacaagccttccacgtctcacagcttccagagcaaaactcagcatcctattgtatcagtcaatgtgacacggcatcctgtctacaacacccaccacctgccacgggaagtgcagccaatcggctgcacggatcctacagtatgtggcatgcgacttcttgtggggacatga

SEQ ID NO: 142216 - DNA, 905 bp, Homo sapiens
  misc_feature (1)...(905): n = a,t,c or g
ngtgccagaccaggttatgacgcacagcgtggcaattcttttaagaggactgcgaactctcccgcaagatcggggcccagcttaagttgctgcctataaatatcagatacggaggttacagnccatcatccgggacaagacagccagtagagtgncttcatgttttctgcggatcgtttggtgaggcaatggaacaaggtttacgagactgctgtcgatccatacgaattggaaagatcctgattcagagtgatgaggagacacaaagagccaaagtatattatgccaaattccccccagacatttaccggagaaaagtccttctgatgtatccaattctcagcactggaaatactgtaattgaagctgtaaaggttcttatagaacatggagttcaacccagtgttatcatcctactcagtctgttctccactcctcatggtgccaaatcaatcattcaggagtttccagagatcacaattttaactactgaagttcatcctgttgcacctacacattttggacagaaatactttggaacagactaagttatttaagtaaaataattgtcttatgtaatattacaatcatgttttgattttctatttgttttactgattcacttgagggtggcagagaaaaatgtgttaaaatgctttttagttttggaagtgggtatatttgaggttatatctcatttagttatttgtttactgttggcaccgaattcaacaatgaagtatatgcaactcttacaaaacataaattttaataatattctaatgcaaattactgaaccctcagtgcattaaaattatttcctaatttatgagcctcttagtttggaggttgcttgaagccacaaataaaactcaaaggaanggtcaatcaaaangggtcggcct

SEQ ID NO: 142217 - DNA, 920 bp, Homo sapiens
atgcccccactgacagccccgagtctgtttccaggtggagggccagaggggcttgaaaagttgtctgagactatccgcctcccagctgccacagaaaagggtgttagcttttccccacctgtgaagtctgcatatccgattcgcgccctcccccaagttctggccaggggggcttcttgcccctttcaaatcattacagagttcaccaagagaagtgcttctacctgtggagttttaccccctgctcctcaggccaccctcacgatggatccctgtggtgccaaccaggaatgggctgcttggggacccagcaagcttccagggcctttctgctgctttctctacccctgtatttcactcggctctctaaattgactcagctccaggtcctgcaggagcaatctgcttccttaagagggtctgtgggtcctctcctctgtcctattttgaatgttcacattgaatgcagctttgaggtgcagatcagacttgttgtggaagagggattgaatcagctgccatataaagaatgcatggtgaccactccaacaggtgaggcaatggaacaaggtttacgagactgctgtcgatccatacgaattggaaagatcctgattcagagtgatgaggagacacaaagagccaaagtatattatgccaaattccccccagacatttaccggagaaaagtccttctgatgtatccaattctcagcactggaaatactgtaattgaagctgtaaaggttcttatagaacatggagttcaacccagtgttatcatcctactcagtctgttctccactcctcatggtgccaaatcaatcattcaggagtttccagagatcacaattttaactactgaagttcatcctgttgcacctacacattttggacagaaatactttggaacagactaa

SEQ ID NO: 142218 - DNA, 983 bp, Homo sapiens
ctcaactcagagggcaacagtggtagtggggacagtatcagctatgacgcaccagctggcaactccttcctagaggactgcgaactctcccggcagatcggggcgcagcttaagctgctgcctatgaatgatcagatacgggagctacagaccatcatccgggacaagacagccagtagaggtgacttcatgttttctgcggatcgtttgatcacacttgttgtggaagagggattgaatcagctgccatataaagaatgcatggtgaccactccaacagggtacaagtatgaaggagtgaaatttgagaagggaaattgtggggtcagcataatgagaagcggcgaggcaatggaacaaggtttacgagactgctgtcgatccatacgaattggaaagatcctgattcagagtggaggggagacacacagagcccaagtatattatgcccaattccccccagacatttaccggagaaaagtccttctgatgtatccaattctccagactgggaaatactgaatttgaggctgtaaaggtcctataagaccatggagttcaccccagtgtaatcatccaactcagtccgttcctcattccccatggtggccaattcaatcattcagaggtttccagagttcccaatttaaccaactgaagttcatcctgttgcacctacacattttggacagaaatactttggaacagactaagttatttaattaaaataattgtcttatgtaatattacaatcatgttttgattttctatttgttttactgattcacttgagggtggcagagaaaaatgtgttaaaatgctttttagttttggaagtgggtatatttgagggtatatctcatttagctatttgcttactgttggcaccgaattcaacaatgaaggatatgcaactcttaccatacataaattctaatagtattctaaagcaaattactgaaccctcactgcattagtattat

SEQ ID NO: 142219 - DNA, 716 bp, Homo sapiens
ggaattcgctctgccatgcaaaacacacaaaatcttctccagatgccctatggctgtggagagcagaatatggtcctctttgctcctaacatctatggactggatgagtctaaatgaaacacagcagcttactccagagatcaagtccaaggccattggctatctcaacactggttaccagagacagttgaactacaaacactatgatggctcctacagcacctttggggagcgatatggcaggaaccagggcaacacctggctcacagcctttgttctgaagacttttgcccaagctcgagcctacatcttcatcgatgaagcacacattacccaagccctcatatggctctcccagaggcagaaggacaatggctgtttcaggagctctgggtcactgctcaacaatgccataaaggtgaatcattctggagctagttttgatttgtccattatgatatctgcaaggatgaggataggaagtgataatgtgaaaaattctaagggaaagcctcagaggaaaataaaacctggatggcaccaaaaaagaggggatagaacaaaagttgattgtgatactttgtcctatagggatggatatgggtaaggatgaattccatgacacagcagaatagaaagaattaatcaatagcattctcagaagttgaattattcaaatctctctctcgtattcacagggaggaagaaaagatgaa

SEQ ID NO: 142220 - DNA, 4629 bp, Homo sapiens
atgcggaaagacagacttcttcatttatgtcttgtgctacttcttatcctgctttctgccagtgactcaaactctacagaaccgcagtatatggtgctggtcccctccctgctccacactgaggcccctaagaagggctgtgtccttctgagccacctgaatgagacagtgactgtaagtgcttccttggagtctggcagggaaaacaggagcctcttcactgacctggtggcggagaaggacttattccactgtgtctccttcactctcccaaggatctcagcctcttcagaggtggcattccttagcatccagataaaggggcctacgcaagatttcaggaagaggaacacagttctggtactgaacacccaaagtctggtctttgtccagacagacaaacccatgtataaaccaggacagacagcctcctgtcttattacccaaattacctgctttatcatgtctgaatcttatcggagaactacttttccagtaagattccgtgttgtctccgtggatgaaaattttcgccctcgaaatgaactgaacccaagaagaaatcgaattgcacaatggcagagtctcaagctagaagctggcatcaatcagttgtcctttcccctctcatcagagcccattcagggctcctacagggtggtggtacagacagaatcaggtggaaggatacagcaccccttcaccgtggaggaatttgtgcttcccaagtttgaggtcaaagttcaggtgccaaagataatcagtatcatggatgaaaaagtgaacataacagtctgtggagaatacacttatgggaagcctgtcccaggacttgcaactgtgagcctgtgtagaaaattatctcgtgttcttaattgtgacaagcaggaggtctgtgaggaattcagtcaacagcttaacagcaatggctgcatcacccaacaagtacacaccaaaatgctccagattacaaatacgggctttgaaatgaagcttagagtggaagccaggatcagagaagaggggacagacctggaagtcactgcaaacaggatcagtgaaatcacaaacattgtatccaaactcaaattcgtgaaagtggattcacactttagacaaggaatccccttttttgcacaggtgcttctggtggatggaaaaggtgtgcccatccccaataaactcttcttcatctctgtgaatgacgccaattattactccaatgcaaccaccaatgagcagggtcttgcacagttttcaatcaatactaccagtatctcggttaataaactttttgtccgggttttcactgtgcatcccaacttgtgttttcactattcatgggtagcagaagaccaccagggtgctcagcacactgcaaatcgtgttttctccttaagtggaagttacattcacctggagcctgtggctggtaccctgccctgtggccacacggagactatcacggcacactatacactgaatagacaggccatgggagagttatcggagctcagtttccattacctgatcatggctaagggagtcatcgtcagatctggaacccacactctgcctgtggagtcaggagacagcattcatagcaatgatcatggcagtatgactcaggggattgggggatccccactagcaactgtgcatgcatttgcactgacggtggtgttagcatgggggtggggcactgtgaaaggcagttttgccttatccttccctgtggagtcagacgttgcccccattgcacgaatgttcatctttgccattttaccagatggagaagttgttggagactctgaaaaatttgagattgaaaactgtctagccaacaaggtggatttgagcttcagcccagcacaaagtcccccagcctcacatgcccacctgcaagtagcagctgctccgcagtccctctgtgcccttcgtgctgtggaccaaagtgtgctgctcatgaagcctgaggctgagctctctgtgtcctcagtatataatctgctaactgtgaaggatctcaccaattttcctgacaatgtggaccagcaggaggaagaacaaggacactgtccccgtcctttcttcattcataatggagccatctatgttcccttatcaagtaatgaagcagatatttatagcttcctcaaggggatgggattgaaggtgttcactaactcaaaaatccgaaaaccaaagtcgtgttcagtcatcccttccgtgtctgcaggagcagtaggtcaaggatactatggaggtctaggagtagtagagagaccatatgttcctcaattaggcacatataatgtgatacccttaaataatgaacaaagttcagggccagtccctgaaacggtgcgaagctattttcctgagacttggatctgggagttggtggcagtgaactcatcaggtgtggctgaggtaggagtaacagtccctgacaccatcaccgagtggaaggcaggggccttctgcctgtccgaagatgctggacttggtatctcttccactgcctctctccgagccttccagcccttctttgtggagctcacaatgccttactctgtgattcgtggagaggtcttcacactcaaggccacggtcctaaactaccttcccaaatgcatccgggtaaggaaaatgagggtgaacaggaaagggaatgtgaacttctcagtgagtgcagaggcaatgcagtccttagaactctgtggaaatgaggttgttgaggtccctgagattaaaagaaaagacacagtcatcaaaaccctgttggtggaggctgaaggtattgagcaagaaaagactttcagttctatgacctgtgcctcaggtgctaatgtgtctgagcagttgtccttgaagctcccatcaaatgtggtcaaagaatctgccagagcttctttctcagttctgggtgacatattaggttctgctatgcaaaatatacaaaatctcctccagatgccatatggctgtggagaacagaacatggtcctatttgctcctaacatctatgtcttgaactatctgaatgaaacccagcagctgacgcaggagatcaaggccaaggccgttggctatctcatcactggttaccagagacagctgaactacaaacaccaagatggctcctacagcacctttggggaacgatatggcaggaaccagggcaacacttggctcacagcttttgtactgaagactttcgcccaggctcgatcctacatcttcattgatgaagcacacattacccaatctctcacgtggctctcccagatgcagaaggacaatggctgtttcaggagctctgggtcactgctcaacaatgccataaagggaggtgtagaagatgaagcgaccctctccgcctatgttactattgcccttctggaaattcctctcccagtcactaaccctattgttcgcaatgccctgttctgcctggagtcagcctggaatgtagcaaaggaggggacccatgggagccatgtctacaccaaggcattgctggcctatgctttttccctactgggaaagcaaaatcagaatagagaaatactgaactcacttgataaggaagctgtgaaagaagatccagagatggaggaaggactgtgcctggaggtggaggggaagatggtcagtaggacaaagggtgacattgatgactcgcttattggtggagatgccttcactgaagtttcccaaagcgaagacaacctcgtccattgggagcgccctcagagacccaaggcaccagtggggcatctttaccaaacccaggctccctctgctgaggtggagatgacatcctatgtgctcctcgcttatctcacggcccagccagcccccacctcaggggacctgacctctgcaactaacattgtgaagtggatcatgaagcagcagaacgcccaaggtggtttctcctccacccaggacacagtggtggctctccatgccctgtccaggtatggagcagccactttcaccagaactgagaaaactgcacaggtcaccgttcaggattcacagaccttttctacaaatttccaagtagacaacaacaacctcctattactgcagcagatctcattgccagagctccctggagaatatgtcataacagtaactggggaaagatgtgtgtatcttcagacatccatgaaatacaatattcttccagagaaagaggactccccatttgctttaaaagtgcagactgtgccccaaacttgcgatggacacaaagcccacaccagctttcagatctcactgaccatcagttacacaggaaaccgtcctgcttccaatatggtgattgttgatgtaaagatggtatctggttttattcccctgaaaccaacagtaaaaatgcttgaaagatctagctctgtgagccggacagaagtgagcaacaaccatgtcctcatttatgtggaacaggtgacaaatcagacgctaagtttttccttcatggttctgcaagacatcccagtaggagacttgaagccagcaattgttaaagtctatgattactatgagacagatgagtctgtggttgctgagtatatcgccccctgcagcacagatacagagcatggaaatgtttga

SEQ ID NO: 142221 - DNA, 4615 bp, Homo sapiens
ggacacaaccctgagatttatccctcacaatgcggaaagacagacttcttcatttatgtcttgtgctacttcttatcctgctttctgccagtgactcaaactctacagaaccgcagtatatggtgctggtcccctccctgctccacactgaggcccctaagaagggctgtgtccttctgagccacctgaatgagacagtgactgtaagtgcttccttggagtctggcagggaaaacaggagcctcttcactgacctggtggcggagaaggacttattccactgtgtctccttcactctcccaaggatctcagcctcttcagaggtggcattccttagcatccagataaaggggcctacgcaagatttcaggaagaggaacacagttctggtactgaacacccaaagtctggtctttgtccagacagacaaacccatgtataaaccaggacagacagtaagattccgtgttgtctccgtggatgaaaattttcgccctcgaaatgaactgattccactgatataccttgagaacccaagaagaaatcgaattgcacaatggcagagtctcaagctagaagctggcatcaatcagttgtcctttcccctctcatcagagcccattcagggctcctacagggtggtggtacagacagaatcaggtggaaggatacagcaccccttcaccgtggaggaatttgtgcttcccaagtttgaggtcaaagttcaggtgccaaagataatcagtatcatggatgaaaaagtgaacataacagtctgtggagaatacacttatgggaagcctgtcccaggacttgcaactgtgagcctgtgtagaaaattatctcgtgttcttaattgtgacaagcaggaggtctgtgaggaattcagtcaacagcttaacagcaatggctgcatcacccaacaagtacacaccaaaatgctccagattacaaatacgggctttgaaatgaagcttagagtggaagccaggatcagagaagaggggacagacctggaagtcactgcaaacaggatcagtgaaatcacaaacattgtatccaaactcaaattcgtgaaagtggattcacactttagacaaggaatccccttttttgcacaggtgcttctggtggatggaaaaggtgtgcccatccccaataaactcttcttcatctctgtgaatgacgccaattattactccaatgcaaccaccaatgagcagggtcttgcacagttttcaatcaatactaccagtatctcggttaataaactttttgtccgggttttcactgtgcatcccaacttgtgttttcactattcatgggtagcagaagaccaccagggcgctcagcacactgcaaatcgtgttttctccttaagtggaagttacattcacctggagcctgtggctggtaccctgccctgtggccacacggagactatcacggcacactatacactgaatagacaggccatgggagagttatcggagctcagtttccattacctgatcatggctaagggagtcatcgtcagatctggaacccacactctgcctgtggagtcaggagacatgaaaggcagttttgccttatccttccctgtggagtcagacgttgcccccattgcacgaatgttcatctttgccattttaccagatggagaagttgttggagactctgaaaaatttgagattgaaaactgtctagccaacaaggtggatttgagcttcagcccagcacaaagtcccccagcctcacatgcccacctgcaagtagcagctgctccgcagtccctctgtgcccttcgtgctgtggaccaaagtgtgctgctcatgaagcctgaggctgagctctctgtgtcctcagtatataatctgctaactgtgaaggatctcaccaattttcctgacaatgtggaccagcaggaggaagaacaaggacactgtccccgtcctttcttcattcataatggagccatctatgttcccttatcaagtaatgaagcagatatttatagcttcctcaaggggatgggattgaaggtgttcactaactcaaaaatccgaaaaccaaagtcgtgttcagtcatcccttccgtgtctgcaggagcagtaggtcaaggatactatggagcaggtctaggagtagtagagagaccatatgttcctcaattaggcacatataatgtgatacccttaaataatgaacaaagttcagggccagtccctgaaacggtgcgaagctattttcctgagacttggatctgggagttggtggcagtgaactcatcaggtgtggctgaggtaggagtaacagtccctgacaccatcaccgagtggaaggcaggggccttctgcctgtctgaagatgctggacttggtatctcttccactgcctctctccgagccttccagcccttctttgtggagctcacaatgccttactctgtgattcgtggagaggtcttcacactcaaggccacggtcctaaactaccttcccaaatgcatccgggtcagtgtgcagctgaaagcctctccagccttcctagcttcccaaaatacaaagggagaagaatcctattgtatctgtggaagtgagagacaaaccttgtcttggacagtgactcctaaaactctggggaatgtgaacttctcagtgagtgcagaggcaatgcagtccttagaactctgtggaaatgaggttgttgaggtccctgagattaaaagaaaagacacagtcatcaaaaccctgttggtggaggctgaaggtattgagcaagaaaagactttcagttccatgacctgtgcctcaggtgctaatgtgtctgagcagttgtccttgaagctcccatcaaatgtggtcaaagaatctgccagagcttctttctcagttctgggtgacatattaggttctgctatgcaaaatatacaaaatctcctccagatgccatatggctgtggagaacagaacatggtcctatttgctcctaacatctatgtcttgaactatctgaatgaaacccagcagctgacgcaggagatcaaggccaaggccgttggctatctcatcactggttaccagagacagctgaactacaaacaccaagatggctcctacagcacctttggggaacgatatggcaggaaccagggcaacacttggctcacagcttttgtactgaagactttcgcccaggctcgatcctacatcttcattgatgaagcacacattacccaatctctcacgtggctctcccagatgcagaaggacaatggctgtttcaggagctctgggtcactgctcaacaatgccataaagggaggtgtagaagatgaagcgaccctctccgcctatgttactattgcccttctggaaattcctctcccagtcactaaccctattgttcgcaatgccctgttctgcctggagtcagcctggaatgtagcaaaggaggggacccatgggagccatgtctacaccaaggcattgctggcctatgctttttccctactgggaaagcaaaatcagaatagagaaatactgaactcacttgataaggaagctgtgaaagaagacaacctcgtccattgggagcgccctcagagacccaaggcaccagtggggcatctttaccaaacccaggctccctctgctgaggtggagatgacatcctatgtgctcctcgcttatctcacggcccagccagcccccacctcaggggacctgacctctgcaactaacattgtgaagtggatcatgaagcagcagaacgcccaaggtggtttctcctccacccaggacacagtggtggctctccatgccctgtccaggtatggagcagccactttcaccagaactgagaaaactgcacaggtcaccgttcaggattcacagaccttttctacaaatttccaagtagacaacaacaacctcctattactgcagcagatctcattgccagagctccctggagaatatgtcataacagtaactggggaaagatgtgtgtatcttcagacatccatgaaatacaatattcttccagagaaagaggactccccatttgctttaaaagtgcagactgtgccccagacttgcgatggacacaaagcccacaccagctttcagatctcactgaccatcagttacacaggaaaccgtcctgcttccaatatggtgattgttgatgtaaagatggtatctggttttattcccctgaaaccaacagtaaaaatgcttgaaagatctagctctgtgagccggacagaagtgagcaacaaccatgtcctcatttatgtggaacaggtgacaaatcagacgctaagtttttccttcatggttctgcaagacatcccagtaggagacttgaagccagcaattgttaaagtctatgattactatgagacagatgagtctgtggttgctgagtatatcgccccctgcagcacagatacagagcatggaaatgtttgaggaccatacaggctgtatattttggtggattctctgtcctatacatttacttagaaggaatggagttatttgtctctataaaatagacactaaaaatatttgctgaataaatatgtacttctggtcaaactaaaaaa

SEQ ID NO: 142222 - DNA, 855 bp, Homo sapiens
tttcgtcccaaatcccgcctttccccctacctgctttcacccctgctgccttagtccctggatctggggctcactggcaggcagagtcctgccctccggaagttggtgtggggccctcctgggtctggtcctgttcgaccccctctgaggcccacctggaggagcggcagttgagtttctatgctaattgttccaataataggagccgccttttactgcggagtctttgtgtgccaggcgctgtgcttaggctagtatgatgtagtggcctatgttgaagtgtggtcatccaatggaacagaaaattattcaaagacatttacaacacagcttgtggatatgggggcaaaggtttcaaaaacttttaacaaacaagtaactcacgttatcttcaaagatggctaccagagcacttgggacaaagctcagaagagaggcgtaaagctcgtttcggtgctctgggtggaaaagtgtactgtggaaagtgctggagtgaatcggctctctggggagaataagctcatcacagcacggcttcccgaggagaacgttgctgctttgatttctgttggctctgaggcagcagcagaggcagctcctttcacacttgtggctgcttctgcagataagctgttcggtgacctccatatttctaaatactgtggccgtattgctgtttcggtttttcagtttcagtccccaactgcctttgctgaatctttagcgtctcctgccacagttattgcagtattccctgactggcctcctcctcctggaccagtgatctgcccacgacccctccctcacacctgtccccatgccccagacccacaggacagggtccaagctcattag

SEQ ID NO: 142223 - DNA, 405 bp, Homo sapiens
tgagcttttgtgtttcctttccagttggaggatggggctgtgcatcacatccatagctacctggtcggcagctggctcacctacaggctgcctttccattaaatacttctctacaggaagatcttcatcctttagggctttaaaggaattgtgctgtttgtttccaggactatgcttgcatctctcacagttattctggctggcaatatcctcctccagaagacattttggctttttgtcctgatttcctttccacctctctgagtcagctgtgctgaatttgtatggcttggcgtccttggtttttggtcctcgtagagtaggaggattcccaaagcgatcttctaccacccgagcccgaaagctaagtgtcagaattgcctacaaatccgaccgtccacgaaa

SEQ ID NO: 142224 - DNA, 912 bp, Homo sapiens
atgaggacttctgtgaaagaaaactgcttagaagagagccttgagattaacgacagacgaggttcactccaaactcaccactctgatgtttctagttcttgttctgatcctgatcccagagataaccaaatccaagaagcatacgggactcctgacaaatttattgcaaaaggatcaccaaggaatttagtcttaaggatatttaaatccaacaacagaactacacacactgcaacacatggaattgcctccaaagagcatcaagcagattcaaaccagactagagatacagctacagatcaaaccttaatggcagttcaaaacaagtcccatacgggtcagcttcaccagagacatcataagcaaaagaatgctgccatttcttatagatttctgtgcagtttatcagccctctcccagaattttctccttgggttaaaaagaaagcatgattcctatagcccatttcctcaactagaaatcaagtttgttcaaacctctaggactgattgctacactcggcaaaagcaggagctgatctaccctggacacgttgaggttttggcaatgtgcgaaatggctccgctgtgcgacccagcagttagcggcaggagggacagagggatgatgtcaactcgttttgccagccgagcacgccgtcgtggcccggcagccctggtctgcgggccagccctccgcaaagtaggaggattcccaaagcgatcttctaccaaccgagcccgggagctcggtgtcagaattgcctacaaatccgaccgtccagtcctacccgcggcgcgcatgcaaagtgcaccgcaagttcgcgctctctcggaagtgtctatagcttccggaagggggaaggagagggagcaaggcagaaggaggctgcctaaaaaaaataaaaagtaa

SEQ ID NO: 142225 - DNA, 393 bp, Homo sapiens
  misc_feature (1)...(393): n = a,t,c or g
tttcgtcgagttgcatgtgttggttcagctggcgatagcggcgggagcggagccggcggggcctgtgcgaccgcctgggtttgtgaaatggctgctgacatttctgaatccagcggggctgactgcaaaggagacccaaggaacagtgccaagttagatgccgattacccacttcgagtcctttattgtggagagtactgtgaatatatgcctgatgttgctaaatgtagacaatggttagagaagaattttccaaatgaatttgcaaaacttactgtagaaaattcacccaaacaagaagctggaattagtgagggtcaaggaacagcaggggaagaagaggagaagaaaaaacagaagagaggtaagacctaaattcacatcttgatttgn

SEQ ID NO: 142226 - DNA, 2482 bp, Homo sapiens
ttgtctcgcgggagcgctgctggcggtcgggcgctcgggcggccctggggcgcgagacgagttgcatgtgttggttcagctggcgatagcggcgggagcggagccggcggggcctgtgcgaccgcctgggtttgtgaaatggctgctgacatttctgaatccagcggggctgactgcaaaggagacccaaggaacagtgccaagttagatgccgattacccacttcgagtcctttattgtggagtctgttcattaccaacagagtactgtgaatatatgcctgatgttgctaaatgtagacaatggttagagaagaattttccaaatgaatttgcaaaacttactgtagaaaattcacccaaacaagaagctggaattagtgagggtcaaggaacagcaggggaagaagaggagaagaaaaaacagaagagaggtggaaggggtcaaataaaacaaaaaaagaagaccgtaccacaaaaggttactatagccaaaattcccagagcaaagaagaaatatgtgacaagagtatgtggccttgcaacttttgaaattgatcttaaagaagcacaaagattttttgctcaaaaattctcctgtggtgcctcagtaacaggggaggatgaaattatcattcagggagattttacagatgccataatttgatgtcattcaggaaaaatggccagaggtaggatgatgacagcccctcgaagatcttgggaggaagtaaagaagtgaatttgaaaatttgtctgtatttaatggcctgaactgagagttgatatggccaaagggagagaggccttttaaaatatatatatatatacacatatatatgtatatatacacatatatgtatgtatacacatatacacatgtatatatacatgtgtgtatgtatacatgtatatacatatatacatacacatatatgtatacatatatacacatatatgtatacatatatacacatatatgtatacatatatacacatatatgtatacatatatacacatatatgtatacatatatatatattctacagtaaaactgtagactgtcctcgtccttggcattttcactgttctgtacaaggctgcttgtttttttattgccaaagtcaaataaacgggagactgtcatgctcatgcatgaatagaatttagtcaaataaaaaattttggtcatttggtactgactttctctctctctctctctctctttttttttttgacagagtctcgcactgttgcctgggctggaatgcagtggtgcgatctcggctcactgcaacctccgctcccgggttcaagtgattctcctgcctcagcctcccaagtaggtgggattacaggcgcccgcaccacgcccagctaatttttgtatttttagtagagatggggtttcactatgttggccaggctggtctcgaactcctgacctcgtgattggcccacctcagcctcccaaagtgtggtattacagatgtgagccaccgcacccagcctgagtttctctttctctctttttaactttattttttgaaaaacccggtagactttgtggggagcatttttgttgataattttactgatctaaagctgagtgattttttaaaagaatttgaatttggcttcctcaccagtaatatgtctccttgcttctttgatgtgatagttttgagatgggtgagaatctaatagatctgtggttgaatttgctgtgttgttatgaagtccaccctgtgggcacaataacataactgttggtaggagttgtttgagctattctggagattatttggtaaagtatactaaaagccttaaaaccatgtatgtgcgctgtttgaaccagtaagccacttctttgacattagaagacattagaagaaataatcagccttgcataaaacttatggatgaaagtattcatcacaatattatttataataaaaaattgcaaatgttataaatgaacaattgggaaatggttaaagaagtgatggtgcattgtgtggtagaatatatgcatatgtttaaagaatcatattttctaagattatttggaagcatgtttggtaatgtcaagtggagtaccccagatacattttagacatttatcgtcatcatctgctctgagtggaaggccgttcagagaggctagaggttcttattctggctataaattatgtgagtaaaattgtgctaaccagttaaaagtactgtacacccatgctcaatatatagtcctggaaatagcaattgaaacatgtcttctcacaagagaaaatgacagttttaatgatgtatttgatgaatttaaactttaagtcaggtgctgcaaattggaaagaagacttgtggtgttttaagttgctgtggacacttttaagaaacttagaacccatggaacccttgtttatcgccatgcaaattacaatcttgaatgagtgttttttaaaaataaagtattagaaaa

SEQ ID NO: 142227 - DNA, 2299 bp, Homo sapiens
ggctggcgtcacgtgtcccccccgcggggggcgcccttgagggcggcgcttccggtcggcggagcctggtggccgcagcggcggtggcgacgacggccgagacgtggggatggcgggcgccgggagcgaagcccggttcgccggtctgtcgctggtgcagctcaacgagctgctggaggacgagggccagctgacggagatggtgcagaagatggaggagatttgcagtgtgtgctccctttctctcaacccatttggactcattctcggaaagtctgatcttttgggtctggttctcctccaggcaggcgcgctgatggcgtttttgaggtgacgccgcccacaccgggcttctccgggggcggaggaaacacctatgaaccctccggcagccttccttgccgggcgccagaacatcgggtcagaagttgagatttccactatcgagaaacaacggaaggagctgcagttgctcattggagaattaaaagatcgagataaagagctcaatgacatggttgcagtgcaccagcaacagcttctttcatgggaagaggatcggcagaaagtgttgacactggaagaacgttgcagcaaattagaaggtgaactacataaaagaactgaaataatcaggtcactcacgaagaaggctagaaacgaaactctcagcaacacgttagtggaactttctgcccaggtaggacagctacaagctcgagaacaagctcttacgacaatgataaagctaaaggacaaagatattattgaggcagttaatcacattgcagattgttcgggtaaatttaaaatgctagagcatgccctacgtgatgccaagatggcggagacttgtattgtgaaagaaaagcaagattataagcagaaattgaaggcacttaagattgaagtcaacaaactaaaagaggacctcaatgaaaagacgacagaaaataatgagcaacgagaagagatcattcgcctcaagcaagagaaaagttgcctgcacgatgaattgctttttactgtagagagagaaaagaggaaagatgaattgcttaatattgcgaagtcaaagcaagaacgcacaaattcagaactgcacaatctgagacagatttatgtaaaacaacagagtgatctgcagtttcttaatttcaatgtggaaaattctcaggaattaatacagatgtatgactcaaagatggaggaatcaaaggctctggactccagcagagacatgtgtttatcagaccttgaaaataaccacccaaaagtcgatattaagagggaaaaaaatcagaagtcactgtttaaggaccagaaatttgaagccatgttggttcagcaaaataggtcagacaagagctcttgcgatgaatgcaaagagaagaaacaacagatcgatactgtgtttggggagaaaagtgtaattacgctgtcatccatattcaccaaagacttagtagagaaacacaacctcccttggtctctgggaggaaaaacccagattgaacccgaaaacaaaattacattgtgcaagatccacacaaaatcaccaaaatgtcatggcactggggttcagaacgaaggaaaacaaccctcagaaacacccactttatctgatgagaagcagtggcatgatgtcagtgtttacctgggcctgaccaactgtccaagttcaaaacatccagaaaagctggatgtagaatgtcaagatcagatggaaaggtccgaaatctcatgctgccagaaaaatgaagcctgtctgggcgaaagtggcatgtgtgactccaagtgctgccacccgagtaacttcataattgaagccccaggccacatgtctgacgtggagtggatgagtattttcaagccttccaaaatgcagagaattgtccgcctcaaatctgggtgcacctgttcagaaagcatctgtggcacacaacatgactccccggcaagaaacttgaattgtttaaaagtcatgcagatagtcattctgccagttgcaaattattttaaaaagtcggtcatcacgctaaatgtcatctattcatatttggtctttaaagatctttggataattgcaaaaaattcacccaaacaagaagctggaattagtgagggtcaaggaacagcaggggaagaagaggagaagaaaaaacagaagagagtaacaggggaggatgaaattatcattcagggagattttacagatgacataattgatgtcattcaggaaaaatggccagaggtagatgatgacagcatcgaagatcttggagaagtaaagaagtga

SEQ ID NO: 142228 - DNA, 463 bp, Homo sapiens
atgatgatgatcatattgatgatggtggtggtggtgggtggagaagtcaaccctgacaaaaagaagggcaaccagaatgtccaaatctggacacaccctctcctcacctacacctgctcatcctctgcaccacggaacagtaccaccatcgagcaagccagaaacagagcctgcatcagcttatggtccgttctctccaacagagaccgcaggatgtgccgaggcagggaacagtcctcagccctggctgaacaaaagatgcccccctcggaagcctggagaacgggacaggaccagaggaccacgttctcccagatcctggacttcggtacagtgtggaagccagctctccaggccacggaagtcctctgagcagcctgttaccttctgcctcagtgccagagtccatgacaattagtgaactgcgccaggccactgtggccatgatgaacaggaaggatga

SEQ ID NO: 142229 - DNA, 684 bp, Homo sapiens
atggagccctggggcctgcaaggcagcaactgctcccagctgtgccggactgcgccaggctggtcagataaggagcatgagccagaggaggaagtggaaaggaagcgggccgggcaaaaggagacaatcccagtgtccaagggcctagaaatagtctgttttgtgggagtaaaggccaccagggactgtgaaagtggccaccggacatgtgagaaatccttcgtgtctgacgatgggttcttatcgagggcaaatgaccacaaactcatccttgctccccagtgtgctctctttgctcattctgtgaacacccaggttttcctggcaaaggagcctttggtggtggatgtcttcatggcacatgtcattcagtggtgcacccaccacaaggatgaccctcctcctcctgaagatgatgagaacaaagaaaagcgaacagatgatatccctgtttgggaccaagaattcctgaaagttgaccaaggaacactttttgaactcattctggctgcaaactacttagacatcaaaggtttgcttgatgttacatgcaagactgttgccaatatgatcaaggggaaaactcctgaggagattcgcaagaccttcaatatcaaaaatgactttactgaagaggaggaagcccaggtacgcaaagagaaccagtggtgtgaagagaagtga

SEQ ID NO: 142230 - DNA, 1671 bp, Homo sapiens
atggaggatggggcaagagccgcaacagcgccgcggagttccaacgctgccggttccctggggtacgagcacagcctcaagcagcctcaagccctaggaagcccccagttcaaagcacagggcgcattggagcctgggcacgatacagttcacaccacggctgcgatgcgccccgcgctccggcgggcggagcgcaccatgccgcagctggactccggcgggggcggcgcgggcggcggcgacgacctcggcgcgccggacgagctggtggccttccaggatgaaggcgaggagcaggacgacaagagccgcgacagcgccgccggtcccgagcgcgacctggccgagctcaagtcgtcgctcgtgaacgagtccgagggcgcggccggcggcgcagggatcccgggggtcccggggacaggcgccggggccccaggcgagacagaggctctcgggcgggaacacgctgcgcagagactcttcccggacaaacttccagagcccctggaggacggcctgaaggccccggagtgcaccagcggcatgtacaaagagaccgtctactccgccttcaatctgctcatgcattacccacccccctcgggagcagggcagcacccccagccgcagcccccgctgcaaaagccaaacatgtccaagtatcggacctggaccgagatgataaaatccgtgtgcgtcctccacggagccaaagactccaatggtttgatggaggcagaggaactgcatggttgggaaggggatggagacctcctcatgcccacaaggcggcaatgtctacaaggtaccactgacaccttgccactggctaaggacatctgcattgtcttttccaactgggatgaaatcacagtcacctctctccctgcaattcctggctgtgtccacaacagtatcagactatggaagaaggaggcaatttctctgacccactgggatgggggcatcttcaaggcttctttggccctgggtatcaaaggtctgctgagagaggaggtggaaggcagcctttctgctgacaactggaccttggttctaatctcactccccttcccccacacaccagagaagaatcctacagcatctggcagctcttcttcccaggccaagctctcaccactggccaatcagagaagaaagcagtgggctcaggcccctttatctgatgtcaaggccaggcggtgggtggactggccacacgcacctagcagagctctgtgcaactgtggcaacagccttgtgccagcaggtgagaagcaggcaacttctgagctgagcaaaatcaattcacaaaagtacatgcagcatcagaccgcagcggtctgctcgcaggctgtgtgcacgctgacagcccttgccaccgccagcagagaaactccctcgcctctgacggttgactctgaaaacccccaaatgcttgagccccacaacactttcccagcgaagaaagttgctgtttcctctggcctcaagcctgtggggggtccctcaagcagagggctgctcctgaagcctggtctggagctgggagaggccttggggaaaagcccatggaaggaagggcagatctccaccttgagccttgtgctacctccagagcagaggctgaccagacagaacgagaagctccaatgtgactccaaagaatag

SEQ ID NO: 142231 - DNA, 1590 bp, Homo sapiens
atgcgcccagacccagctgaggagcccactggtcaacttttctcagtggctaccacaggactccatggaaaacccaaagccgcagactacagaatctctgagcaccaggaggggctgcctccaagcttcggctggtcctcaaccacacatgcgcctcttccagtcactaccaccgaagacactacaccacgggaaattccatcaaaggcgaagtggacttcagtgcttcaggagcatcttcctggactcctccgtcttgctcatgactgggtcccctgggcagagccaggtcctggcagagagcagatatccagtaaatacctcttggccctaagaatgactgggaacactcatgtagcgagaacaccttcctgtgtgttatctcatctcatcctcacagcagcccagagagcaggcctgaggggcccccagggtggacctagctcagagggcagcatctcgggcagagggcacccttataaactggagattcttgttcctgttctaagcggagctttggtgcctctcgccctgcacgctctcgggcgggaacacgctgcgcagagactcttcccggacaaacttccagagcccctggaggacggcctgaaggccccggagtgcaccagcggcatgtacaaagagaccgtctactccgccttcaatctgctcatgcattacccacccccctcgggagcagggcagcacccccagccgcagcccccgctggctctaccaggttccaccaagccagtttccacggcagcacacgggaatattcataccagcactgccacctcctcagctactctgagactcaaccatacagtcacacccctcacaccttgtgactggtgcttcctgctgctgtgtacaaacaaggctctggtggaggaaacaggtgttttatcaggtcacaggggcccccacccccaatggtacagtgcacagatcctcctgctgcaggcccctttatctgatgtcaaggccaggcggtgggtggactggccacacgcacctagcagagctctgtgcaactgtggcaacagccttgtgccagcaggcttgaggccagaggaaacagcaactttcttcgctgggaaagtgttgtggggctcaagcatttgggggttttcagagtcaaccgtcagaggcgagggagtttctctgctggcggtggcaagggctgtcagcgtgcacacagcctgcgagcagaccgctgcggtctacagggaaaatgccgactgtgtttatttttcacctgagcctgcaggaagttgggggctgtgccggactgcgccaggctggtcagataaggagcatgagccagaggaggaagtggaaaggaagcgggtgactcaaccctctgggagggcccctcaggagtttgatatggaagaaactctgtcgtcgttccgctacctgggctggaccctgatgggaagacagacaaggcagggcagatatccatcaggcactccctctgactgcccaggtacactgaatcaaaaaggaaaacagaaaaaacagaacaagaaacaccccaatgggttgcagcttatggatggtgcctgcagcattgtgagctga

SEQ ID NO: 142232 - DNA, 687 bp, Homo sapiens
  misc_feature (1)...(687): n = a,t,c or g
gccctgtttattctgcaaacaaggcttaaaaatgtatagacacaatttgtaggctgagaaatctctgtgtagttgggacttccatacttccgcaaaagtagtaaggacagcgacttctgaacacattaacctaccactgttttgtttagagcgaacacagggagaatggattcctaacggcctgtttctttaagggatcggcgcagttcgctgctctagtctttaagaacaagtggagccttcacttgagccgccacctccttgccattcagggcttcaacaattgcaagcgcaaactcgattctcagagtaggtgtaatgacctccattcatcattttgtctttagcaagagggtgtgttgtaactttacttccaaaacctatttcatgagccaacagagcagtaggacctgcacagatggcggctatcaggcccttccgttttcctgctcctcagtatctccttcacagcagcagactcagataaaatctgtgcgcccagattaccttctggtagaaccaccacatcatatgggtccctctttttttgcatcttcaggcctgcatcangaccaatgaccacatcacnggctacacttgtactgggtcttttcagccaggccctggaacggtgaccttaatnccagctcggctcatgacatctaacacgaatgaccgctccatttc

SEQ ID NO: 142233 - DNA, 507 bp, Homo sapiens
atgcccatttccatctacacgaactcattctttctgaatcataaatgccacaccctcagttgcacataaaactttgccatattatgtatacatcagtgtgtacgaagacaagttgtggcttagaagcagtccatttacagtttctggaactgtttctcgtctcacttctccataactgattctaggtctgaaaggtttccttctaaaatctgatagcctgattttgaggatatgttttcaatgccttttctggttgcaaatcctgatgttggcaggtctttttcctgtaagcatgaagaccacccaagacaaggtacactgtgctgttaatcaaagtggcacagaacaactatgtgacaggtcatagccaggagtgtaatgtaacatggatatggagggccacaaagagtcccatagccctcctgcaacacatctgaaaatctcctgaaattcagaataaacccattactgaaaaacaaaagtgtttattggcataccagacggttt

SEQ ID NO: 142234 - DNA, 1543 bp, Homo sapiens
tttcgttgagaggtacccaacgggccggggcgccgcgtccgcaggaagaggcgcggtgtgcaggcttgtaaacatataacataaaaatggcttccaaaagagctctggtcatcctggctaaaggagcagaggaaatggagacggtcatccctgtagatgtcatgaggcgagctgggattaagggcaccgttgcaggcctggctggaaaagacccagtacagtgtagccgtgatgtggtcatttgtcctgatgccagccttgaagatgcaaaaaaagagggaccatatgatgtggtggttctaccaggaggtaatctgggcgcacagaatttatctgagtctgctgctgtgaaggagatactgaaggagcaggaaaaccggaagggcctgatagccgccatctgtgcaggtgacgtgcaggggcagcctgtgttgcagcgtcattggtgggtggggtagcctttcattcgatggtttgacaaaatgatgaatggaggtaagtatatgcttgtttttgtttgtttgtttgttttttgagatggagtctcgctccatcgcccaggcaccagcttcgagtttgcgcttgcaattgttgaagccctgaatggcaaggaggtggcggctcaagtgaaggctccacttgttcttaaagactagagcagcgaactgcgacgatcacttagagaaacaggccgccaggtgagctcagtcagtccacgagactccatccgagggtctcatagctgctggagtggccaagaggatatcatcaacatccccactgttgtcaccaccaccaccatcactatcaccatcattaccatcaccatcaccatcatcaccatcactaccaccgtcatcaccatcaccctcaccaccctcaccatcaccctcaccactatcaccacactcaccaccaccaccatcaccaccatcattaccaccagcatcaccctcaccaccatcaccatcaccaccaccatcaccttcaccaccaccaccaccatcaccaccagcatcaccctcaccatcaccctcaccaccaccatcaccacactcaccaccaccatcaccatcaccaccagcatcaccctcaccaccaccatcaccatcaccaccaccatcaccttcaccaccaccaccatcaccaccagcatcaccttcaccatcaccctcaccaccaccatcaccactaccaacaccatcaccctcaccactaccatcatcaccatcaccaccaccatcaccatcaccctcaccaccaccatcaccatcagcatcaccaccaccaccaccaccgtcaccatcattatcaccaccatcatcatctttttcacttcttgcagcttgcaggttcccaaacaagtcccggaccagctgatcagatgggatctccccacagggctgcatacctgctgggcctatcaaattttagaaggaaacctttcagacctagaatcagttatggagaagtgagatgataaacagttccagaaactgtaaatggactgcttctaagccacaacttgtcttcgtacacactg

SEQ ID NO: 142235 - DNA, 649 bp, Homo sapiens
  misc_feature (1)...(649): n = a,t,c or g
ctagggatccccccgggcctgcaggaattcgggcacgaacggaaaggnccctgatagccgcccatctgtgcaggcccctactgccctgtggccccatgaaataggtttgggaagtaaagtnacaacacacccctcttgcctaaagacaaaatgatgaaatgggaggtcattaacacccctacctctgagaatccgtgtggaaaaaagacggccctgaattccttaacaaagccggggggcctgggacccagcttccgaagtttgccgccttgccaattgttgaaagcccctgaatggccaaggaggtggcaggctcaaagtgaaggctcccacttgttccttaaagactagaagcagcgaactgccgacgatcacttagagaaacaggcccgttaggaattccattctcactgtgttcgcctctaaacaaaacaattggtaggttaatgtgttcagaagtcgctgtccttactacttttggcggaagtatggaagtcacaactaaacgagagaattcatcaactaccgaatgagggtatacattactgaaccttggatgcagaatagacagggccctttaacaaactactgattgtttcttgttttgtctctcatttcttttgtgaaattaaattccgtatcaccttca

SEQ ID NO: 142236 - DNA, 390 bp, Homo sapiens; identical to SEQ ID NO: 135829

SEQ ID NO: 142237 - DNA, 428 bp, Homo sapiens
gaccatcattacgcctagcttggcacgaggcggcacgaggtacgcattctgcttcagagcaagaatgctggggcagtgattggaaaaggaggcaagaatattaaggctctccgtacagactacaatgccagtgtttcagtcccagacagcagtggccccgagcgcatattgagtatcagtgctgatattgaaacaattggagaaattctgaagaaaatcatccctaccttggaagagtaccaacactataaaggaagtgactttgactgcgagttgaggctgttgattcatcagagtctagcaggaggaattattggggtcaaaggtgctaaaatcaaagaacttcgagagaacactcaaaccaccatcaagcttttccaggaatgctgtcctcattccactgacagagttgttcttattggaggaaa

SEQ ID NO: 142238 - DNA, 2118 bp, Homo sapiens; identical to SEQ ID NO: 139131

SEQ ID NO: 142239 - DNA, 1827 bp, Homo sapiens; identical to SEQ ID NO: 135833

SEQ ID NO: 142240 - DNA, 2360 bp, Homo sapiens
tttcgtggctgaggcggcgcggcagcggatggacggcagtctcgcacggctactgcagcactggggtgtcagttgttggtccgacccagaacgcttcagttgtgctctgcaaggatatataataactgattggtgtgcccgtttaataaaagaatatggaaactgaacagccagaagaaaccttccctaacactgaaaccaatggtgaatttggtaaacgccctgcagaagatatggaagaggaacaagcatttaaaagatctagaaacactgatgagatggttgaattacgcattctgcttcagagcaagaatgctggggcagtgattggaaaaggaggcaagaatattaaggctctccgtacagactacaatgccagtgtttcagtcccagacagcagtggccccgagcgcatattgagtatcagtgctgatattgaaacaattggagaaattctgaagaaaatcatccctaccttggaagagggcctgcagttgccatcacccactgcaaccagccagctcccgctcgaatctgatgctgtggaatgcttaaattaccaacactataaaggaagtgactttgactgcgagttgaggctgttgattcatcagagtctagcaggaggaattattggggtcaaaggtgctaaaatcaaagaacttcgagagaacactcaaaccaccatcaagcttttccaggaatgctgtcctcattccactgacagagttgttcttattggaggaaaacccgataggtttgttagagtgcataaagatcatccttgatcttatatctgagtctcccatcaaaggacggtgcacagccttatgatcccaatttttacggatggaaacctatggattatgggtggttttacaatgatgtttgatgaccgtcgcggacgcccagtgggatttcccatgcggggaagaggtggttttgacagaatgcctcctggtcggggtgggcgtcccatgcctccatctagaagagattatgatgatatgagccctcgtcgaggaccacctccccctcctcccggacgaggcggccggagtggtagcagagctcggaatcttcctcttcctccaccaccaccacctagagggggagacctcatggcctatgacagaagagggagacctggagaccgttacgacggcatggttggtttcagtgctgatgaaacttgggactctgcaatagatacatggagcccatcagaatggcagatggcttatgaaccacagggtggctccggatatgattattcctatgcagggggtcgtggctcatatggtgatcttggtggacctattattactacacaagtaactattcccaaagatttggctggatctattattggcaaaggtggtcagcggattaaacaaatccgtcatgagtcgggagcttcgatcaaaattgatgagcctttagaaggatccgaagatcggatcattaccattacaggaacacaggaccagatacagaatgcacagtatttgctgcagaacagtgtgaagcagtattctggaaagtttttctaagactagtgaagaactgaaggagtccctgcatcttttttttttttatctgcttctgtttaaaaagccaacattcctctgcttcataggtgttctgcatttgaggtgtagtgaaatctttgctgttcaccagatgtaatgttttacgttccttacaaacagggttgggggggggaagggcgtgcaaaaactaacattgaaattttgaaacagcagcagagtgagtggattttatttttcgttattgttggtggtttaaaaaattccccccatgtaattattgtgaacaccttgctttgtggtcactgtaacatttggggggtgggacagggaggaaaagtaacaatagtccacatgtccctggcatctgttcagagcagtgtgcagaatgtaatgctcttttgtaagaaacgttttatgatttttaaaataaatttagtgaacctatttttggtggtcattttttttttaagacagtcattttaaaatggtggctgaatttcccaacccacccccaaactaaacactaagtttaattttcagctcctctgttggacatataagtgcatctcttgttggacataggcaaaataacttggcaaacttagttctggtgatttcttgatggtttggaagtctattgctgggaagaaattccatcatacatattcatgcttataataagctggggattttttgtttgtttttgcaaatgcttgcccctacttttcaacaattttctatgttagttgtgaagaactaaggtggggagcagtactacaagttgagtaatggtatgagtatatacca

SEQ ID NO: 142241 - DNA, 2866 bp, Homo sapiens
gtgaacgagaaaggaggagggcgctccaggcgacagcattgcagacgccattatcctctgtttctctgctgcaccgacctcgacgtcttgcctgtgtcccacttgttcgcggcctataggctactgcagcactggggtgtcagttgttggtccgacccagaacgcttcagttgtgctctgcaaggatatataataactgattggtgtgcccgtttaataaaagaatatggaaactgaacagccagaagaaaccttccctaacactgaaaccaatggtgaatttggtaaacgccctgcagaagatatggaagaggaacaagcatttaaaagatctagaaacactgatgagatggttgaattacgcattctgcttcagagcaagaatgctggggcagtgattggaaaaggaggcaagaatattaaggctctccgtacagactacaatgccagtgtttcagtcccagacagcagtggccccgagcgcatattgagtatcagtgctgatattgaaacaattggagaaattctgaagaaaatcatccctaccttggaagagggcctgcagttgccatcacccactgcaaccagccagctcccgctcgaatctgatgctgtggaatgcttaaattaccaacactataaaggaagtgactttgactgcgagttgaggctgttgattcatcagagtctagcaggaggaattattggggtcaaaggtgctaaaattaaagaacttcgagagaacactcaaaccaccatcaagcttttccaggaatgctgtcctcattccactgacagagttgttcttattggaggaaaacccgatagggttgtagagtgcataaagatcatccttgatcttatatctgagtctcccatcaaaggacgtgcacagccttatgatcccaatttttacgatgaaacctatgattatggtggttttacaatgatgtttgatgaccgtcgcggacgcccagtgggatttcccatgcggggaagaggtggttttgacagaatgcctcctggtcggggtgggcgtcccatgcctccatctagaagagattatgatgatatgagccctcgtcgaggaccacctccccctcctcccggacgaggcggaccggggtggtagcagagctcggaatcttcctcttcctccaccaccaccacctagagggggagacctcatggcctatgacagaagagggagacctggagaccgttacgacggcatggttggtttcagtgctgatgaaacttgggactctgcaatagatacatggagcccattcagaatggcagatggcttatgaaccacagggtgggctccggcatatgattattcctatgacaggggggtcgtggctcatatggtgatcttggtggacctattattactacacaagtaactattcccaaagatttggctgggatctatttattggcaaaggtggtcagcgggattaaacaaatccgtcatgagtcggggagctttcgatcaaaattgatgagcctttaggaaggatccgaagatcggatcattaccattacagggaacacaggaccagatacaggaatgcacagtatttgctgcaggaacagtgtgaagcagtatgcagatgttgaaggattctaatgcaagatattttttcttttttatagtgttgaagcagtattctggaaagtttttctaagactagtgaagaactgaaggaattctggcatcttttttttttttatctgcttttgtttaaaaaaccaacattcctttgcttcataggtgttttgcatttgaggggtagtgaaatttttgctgttccccaaatgtaatgttttagttccttacaaacagggttgggggggggaagggggtgcaaaaactaacattcaaattttgaaacagcagcagagtgagtggattttatttttcgttattgtggtggtttaaaaaattccccccatgtaattattgtgaacaccttgctttgtggtcactgtaacatttggggggtgggccagggaggaaaagtaacaatagtccacatgtccctggcatctgttcagagcagtgtgcagaatgtaatgctcttttgtaagaaacgttttatgatttttaaaataaatttagtgaacctatttttggtggtcattttttttttaagacagtcattttaaaatggtggctgaatttcccaacccacccccaaactaaacactaagtttaattttcagctcctctgttggacatataagtgcatctcttgttggacataggcaaaataacttggcaaacttagttctggtgatttcttgatggtttggaagtctattgctgggaagaaattccatcatacatattcatgcttataataagctggggattttttgtttgtttttgcaaatgcttgcccctacttttcaacaattttctatgttagttgtgaagaactaaggtggggagcagtactacaagttgagtaatggtatgagtatataccagaattctgattggcagcaagtttattaatcagaataacacttggttatggaagtgactaatgctgaaaaaattgattatttttattagataatttctcacctatagacttaaactgtcaatttgctctagtgtcttattagttaaactttgtaaaatatatatatacttgtttttccattgtatgcaaattgaaagaaaaagatgtaccatttctctgttgtatgttggattatgtaggaatgtttgtgtacaattcaaaaaaaaaaaagatgaaaaaagttcctgtggatgttttgtgtagtatcttggcatttgtattgatagttaaaattcacttccaaataaataaaacacccatgatgctag

SEQ ID NO: 142242 - DNA, 988 bp, Homo sapiens
ttcttttaagtttgatttaatttaacagttccaaaatccctgttttccaggtaaagaaactgaggccagcagcaagggcaggtctagcatccaggttccctcttaagtacctctgattctgaagcggaacctgcttacagaacatcacgggcggcttcagggtctatataagaaaaacagatgcccaagcgggaaggagactaggaggccgtgttgagaaaaccagacccagccactggccttgaagtccggatggaagcttggcgcttgcctcgcctcgtcttccttccgccctggtgctgagcggctagtccagagccggcaggatctgcgcttccggtttccgggttctccgggtgtagccgcctctgccccgggggatcccctctcctccagcaggccggggaggcctacgtgggcggcttcgttgcagccagcttgccgttgtcacggaaatctcctccggcgtctccagggaccacagcgggagaggaaatagccaccaacgagatagcgggggtgtgctcctcctgaattccatttcgatgcaggcaccgctgtctactgtaagaggagcggcccttgggtgggggagagtggaagaggaactgtcgttggcagagaagacttcaggagaaatccggtccctggctttcgcttctgcagggccaggccgagtggggttcaggcagcgatgggagctcaggagaagaagggcttttcctgggcccctttgtgccctggctggagctggaatggccaggatgcagggagcaatgtcccaagctatgtaggacagcagggccctgggtctggcccatgaaaccattctttcctccttggcctctgggcctttcctccagttcccaataagtttgccatttccatctaagacctcagaagcctggacttcattttccatatcactatcaccattttggtcacaatcatttaacccatctctaagaagttccaaactttccctcat

SEQ ID NO: 142243 - DNA, 439 bp, Homo sapiens; identical to SEQ ID NO: 132756
  misc_feature (1)...(439): n = a,t,c or g

SEQ ID NO: 142244 - DNA, 1059 bp, Homo sapiens; identical to SEQ ID NO: 114869

SEQ ID NO: 142245 - DNA, 933 bp, Homo sapiens
ctaagccaagaagatctgggaaggagtcagagagccttgggccagagttccaggggctctgggagtggctgccaggtgagttggacagtccgatttccagtggggtcccacacagatgggatgtggcttaggaggaatcctgggctgcaggcattccttggcccggtggccagatttctggaacttgtagcaagctcctcggggaggaggttctggaggaacacctggctgctgcagttcaggcgtttggaagttcttgtgtgctggagatgtggctggggtttgtctcacagtggaggcaaggaactgcaacttttttctattattgtacaccttgaaggtgaggttaattaaatccttgactatgcctttagctccagccacctttttaagagtaaattgctgggcaggagggggagggctagtcatggaaggaaactgtaagccggaccaggtgtgaggaggggaggcgataaaaggattatagggtggaggagcggaggctgaggaagaattgggacctagctcggtctggcgaggagcagctggccccttccccagaaaagtgggacttgccgctaagggtgaaggaccaaggcaggcgtccctgcgtggtctgacacctctgaagcctgggtgaataatcagagaggtgtccctggaatgattaaacaccaagggaaggctgccttcccagtccgtgactggcgccggagttttgggtccacggataaaacgtgtctcctttgtctcggatttgaaattggtgagatgtttcttgggctggtcggtctgaggacctgaggtcgtaggtggatctttaggatcctggttctccttttgcttctccattctttttctttccccatctcttccctcttccctcctcctcttcctcttccttctccttttcctctcctccttctcctccat

SEQ ID NO: 142246 - DNA, 270 bp, Homo sapiens
ttagtcggacatgatcggcagggagagcacgtgtgtttttatgagaattatgctgagataggtaacagataaggaagaaatttgggcttgactgaagtaacgggggctgtctgtgaagccttgcggcagtacagcccaggtaatttgctgagcctgatgggtgtcagggtcagtccaagtgaaagcgaagagacgcagatttgaaattggtgagatgtttcttgggctggttggtctgaggacctgaggttgtaagtggatctttctcat

SEQ ID NO: 142247 - DNA, 930 bp, Homo sapiens; identical to SEQ ID NO: 123808

SEQ ID NO: 142248 - DNA, 233 bp, Homo sapiens
ctctctcactatccctcaaccactttctcctttcaatcttggcgtcacccttcaatctctcccttctcttaatttcagttcctttccttttctggtagagaacggagacgcgttttatctggcagccactctcagagcccctggaactgtggcccaaggctctctgactccttcccagatcttctcggcttagtggctgaagactgatcctgcccaatcgcctcggaagcccc

SEQ ID NO: 142249 - DNA, 357 bp, Homo sapiens; identical to SEQ ID NO: 114504

SEQ ID NO: 142250 - DNA, 909 bp, Homo sapiens; identical to SEQ ID NO: 114873

SEQ ID NO: 142251 - DNA, 525 bp, Homo sapiens; identical to SEQ ID NO: 116093

SEQ ID NO: 142252 - DNA, 522 bp, Homo sapiens; identical to SEQ ID NO: 114318

SEQ ID NO: 142253 - DNA, 534 bp, Homo sapiens; identical to SEQ ID NO: 122401

SEQ ID NO: 142254 - DNA, 420 bp, Homo sapiens; identical to SEQ ID NO: 114509

SEQ ID NO: 142255 - DNA, 552 bp, Homo sapiens
  misc_feature (1)...(552): n = a,t,c or g
atggatagatatngactgntcttgggcctctccctttttccctttctccttgctgcctacattgccaagggaagcgactatgtggtcaccatgaggaagcaagaaggaggaaaaatgtcagcattccaagaaaggaagctggaatcattcactgcaaaggccatcaaaaaggcatcagatcccatcgctcaggacaatgcttatgctgataagttagctaaaaaagcagctagcgttccaacttctgtccctcacgggatttctcaggccccccctcccctccctacgcatcaagctcggtactggcaaattgactttactcacatgcctcgagtcaggaaactaaaatacctcttggtctgggtagacaccttcactggatgggtagaggcctttcccacagggtctaagaaggccactgcggtcatttcttcccttttgtcagacataattcctcagtttagccttcccacctctatacactccgatagcagactggcctttattagtcaaatcacccaagcagtttctcaggctcttggtattaagtga

SEQ ID NO: 142256 - DNA, 1135 bp, Homo sapiens
taaaacggccccacccttatctccctttgctgactctcttttcggactcagcccacctgcacccaggtgaaataaacaaccatgttgctcacacaaggcctgtttggtggtctcttcacacggacgtgcatgaaatttggtgccgtgactcggatcgggggacctcccttgggagatcaatcccctgtcctcctgtcctttgctccgtgagaaagatccacctacaacctcaggtcctcagaccgaccagcccaaggaacatctcaccaattttaaatcaggtaagcggcctcttcttactctcttctccaacctctctcactgtccctcaacctctttctcctttcaatcttggcgccacacttcaatctctcccttctcttaatttcaattcctttcattttctggtagagacaaaggagacacgttttatccgtggagccaaaattccggcgcctgtcacagactagggaaggcagcctttccttggtgtttaatcattgcagggacacctctctgattattcagccaggcttcagaggtgtcagaccacgcagggacgcctgacttggtccttcacccttagtggcaagtcccgcttttctgggggaaggggcaagtaccccaaccccttctctctgtgtctctaccccttctccgcctttctggggggcaagaaacacccaaccccttctccttcaccctgagtggcaagtccgcttttctagaggagcaagtaccccaacctcgtatctctgtgccccagtcccttatttccacgccccgacctcttatctctgtggcccaatcccttatttctgcaccccaacctcttatatctctgtgccccaatcccttatttccatgccccgacctcttatctctgcaccccaaccccttatttccacgacccaacccctttcccgcttttctggaaggagcttgctacaagtgccagaaatctggccaccaggccaaggaatgcctgcagcccgggattcctcctaagctgcgtcccatctgtgcgggaccccactggaaatcggactgtccaactcacctggcagccactcccagagcccctggaactctggcccaaggctctctgactgcttcccagatcttcttggcttag

SEQ ID NO: 142257 - DNA, 1902 bp, Homo sapiens
cttctgaaggtgaagcaaaaggcagcattaccttgaccgtctgtactgcgctttatctcaaacttactttattccacaaaactggtgtctttggtcccctgcgatttccagtagttaataccctcaatccatcaccctttcatgatgggaccagagagctgggggcttccgaggcgattgggcagtgtcagtcttcagccgctaagctgagaagatctgggaaggagtcagagagccttgggccagagttccaggggctctggaagtggctaccaggatctagccagtgctttgcacgtgagagcttggaggagaagctgagcctgtgcttccgcccctcggatccgggcgccgagcccccgaggacggccgtgcggcccatcacggagcgcagcctcctgcagggggacgaatattgctgtgctttaggtcaaggggtccccaacccctggtccacagaccggtactggaactgggccacactacaggagataggaccatctagttgcaggaaaacaagctcagggctcccattgattctacgttatggccatgtcagagaccttcatggcagctcctcccatcacaggcctggaggcccaaaaaggaacaagtggtttcgtgagctgggcctagggtctgcctgctgtatgcggcctagggacttggtgccctgtgtaccagctgctccagctgtggctgaaaggggcgagagtacagctcaggctgtggcttcagagggtgcaagccccaagccttggcagcttccaggaggtgttgggcccgtgggtgctcagaaatcaagaattgaggtttgggaacctttgcctatatttcgcaggatgtatggaaaagcctgtatgtccaggcagaagtttgctgcaggggcagggttttcctggtatgttcctgtggcagttgttggagcaaaagttcacgatgtgaacctccatatgctgtcctttccatccaagtggaagctgcacacatgcatgaaatttggtgccgtgactcagatcgtgacctcccttgggaggtcctcctgttctttgctccttgagaaagatccacctatggtcctcagaccgaccagcccaagaaacatctcaccaatttcaaatctgacaaaggagacacgttttatccgtggacccaaaactccggcgccggtcacggactgggaaggcagccttcccttggtgtttaatcattgcagggacgcctctctgattattcacccaggttttagaggtgtcagaccacgcagggacgcctgccttagtccttcacccttagcgaatttaattaacctcaccttcaaggtgtacaataatagaaaaaagttgcaattccttgccttcactgtgagacaaacctcagccatgtctccagcacacaagaacttccaaacgcctgaacctcagcggccaggcattcctccagaacctcctcccccaggagcttgctacaagtgccagaaatccggccaccaggccaaggaatgcctgcagcccaggattcctcctaagccacgtcccatctgtgcgggaccccactggaaattggactgtccaactcacctggcatccactcccagagcccctggaactctggcccaaggctctctgactgcttcccagatcttcttggcttagcggctgaagaccgatgctgcccgatcgccttggaagccccctcaatgcgttctccaaatgcatgaattacaaccaggaaaaaaagaaggttttgatatcctgaactctttgctggtttaacatgtatgtttctgtcacatgtttcaggtgggacagggacagtacccgtgtaacgcagaagaggagcaccaggatggagaaactctagcctcaccgactgtttaggttgtgagagcacacggggcat

SEQ ID NO: 142258 - DNA, 1556 bp, Homo sapiens
atgcagaaacgactttggaactgggtaacaggcagagattggaacagtttgcagggctctgtagaagataggaagatgcgagaaagtttggaactctctagagacttaccgaatggctttgaccaaaatgctgataatgatattaatgatgaaaaccaggctgaggtggtctcagatagagatgaggaacttgttggtaactggagcaaagggactcctgaggattacccacgatttttccatatgcatcctaggacagcagaacttagtctcctggagccagtaaacagagactttcaccagaaatttgatttggttattaaggctgaacaagacaatggtcatcctcttcctgcctttgccggtctacacattgaaatactggatgaaaacaatcaaagtccatattttacaatgcccagttatcaaggctatatcctggaatctgccccagtgggagcaaccatttcggacagtctcaatttgacttcacctttaagaatagtagctctggacaaggacatagaagatacaaaagacccagagcttcacctttttctgaatgactacacctcagtcttcaccgtcacacagactggtattactcgctacctcaccttacttcaaccagtggacagggaagaacagcaaacttacaccttttcgataacagcatttgatggtgtacaagaaagtgagccagtcatcgtcaatattcaagtgatggatgcaaatgataacacgccaaccttccctgaaatatcctatgatgtgtatgtttatacagacatgagacctggggacagtgtcatacagctgctgatggcaacaaaagacactggggactactatggagggagagagggagaagagacaattgaaaaattaactattgtgtactatactcagtatctgggtgacagaatcaatcataccccaaacctcaacatcatgcaatatacccagggggcttccgaggcgatcaagcagtgtcagtcttcagccgctaagccgagaagatctgggaaggagtcagtcagagagccttgggccagagttccaggggctctgggagtggctgccaggtgagtcgaacagtccgatttccagtggggtcccgcacagatgggacgcggcttaggaggaatcccgggctgcgggcattccttggcccagtggccagatttccggcacgtgtagcaagctcctgtgggaggaggttctggaggaacgccttgccgctgcggttcaggcatttggaagttcttttgtgctggagatgtggctggggtttgtctcacagtggaggcaaggaattgcaacatttttctattattgtacaccttgaaggtgaggttaattaaatccttgactatgcctttagctccagccacctttttaagagtaaattgctgggcaggagggggagggctagtcatggaaggaaactgtaagccggaccaggtgtgaggaggggaggcgataaaaggattatagggtggaggagcggaggctgaggaagaattgggacctagctcggtctggcgaggagcagc

SEQ ID NO: 142259 - DNA, 1008 bp, Homo sapiens; identical to SEQ ID NO: 116088

SEQ ID NO: 142260 - DNA, 2910 bp, Homo sapiens
  misc_feature (1)...(2910): n = a,t,c or g
atgggagactttaacaccccactgtcaacattagacagatcaacgagacagaaagtcaacaaggatacccaggaattgaactcagctctgcaccaaccagacctaatagacatctacggaactctccaccccaaatcaacagaatatacatttttttcagcaccacaccacacctattccaaaattgaccacatacttggaagtaaagctctcctcagcaaatgtaaaagaacagaaattataacaagctatctctcagaccacagtgcaatcaaactagaactcaggattcagaatctcactcaaaaccactcaactacatggaaactgaacaacctgctcctgaatgactactggttacataacgaaatgaaggcagaaataaagatgttctttgaaaccaacgagaacaaagacacaacataccagaatctctgggatgccttcaaagcagtgtgtagagggaaatttatagcactaaatgcccacaagagaaagcaggaaagatccaaaactaacaccctaacatcgatcaacaaaattgatagaccactagcaaggctaataaagaaaaaaagagagaagactcaaatagatgcaataaaaaatgataaaggggatatcaccaccgatcccacagaaatgcaaactaccatcagagaatactacaaacacctctatgcaaataaactagaaaatctagaagaaatggataaattcctcaacacatacactctcccaagactaaaccaggaagaagttgaatctctgaatagaccaataacaggagctgaaattgtggcaataatcaatagcttaccaaccaaaaagagtccaggaccagatggattcacagccgaattctaccagagttgcttcaaagagaataaaatacctaggaatccaacttacaaggatgtgaaggacctcttcaaggagaactacaaaccactgctcaatgaaataaaagaggatacaaacaaatggaagaacattccatgctcatggataggaagaatcaatatcgtgaaaatggccatactgcccaaggtaatttacagattcaatgccatccccataaagctaccaatgactttcttcacagaagtggaaaaaactactttaaagttcatatggaaccaaaaaagagcccgcatcgccaagtcaatcctaagccaaaagaacaaagctggaggcatcatgctatctgacttcaaactatactacaaggctacagtaaccaaaacagcatggtactggtaccaaaacagagatatagatcaatggaaaagaacagagccctcagaaataatgccgcatatctacaactatctaatctttgacaaacctgagaaaaacaagcaatggggaaaggattccttatttaataaatggtgctgggaaaactggctagccatatgtagaaagctgaaactggatcccttccttacaccttatacaaaaatcaattcaagatggattaaagacttaaacattagacctaaaaccataaaaaccctagaagaaaacctaggcattaccattcaggacataggcacgggcaaggacttcatgtctaaaacaccaaaagcaatggcaacaaaagccaaaattgacaaatgggatctaattaaactaaagaacttctgcacagcaaaagaaactaccatcagagtgaacaggcaacctacaaattgggagaaaatttttgcaacctacccatctgaccaagggctaataaccagaatctacaatgaactcaaacaaatttacaagaaaaaaacaaacaaccccatcaaaaagtgggcaaaggacatgaacagacacttctcaaaagaagacatttatgcagccaaaaaacacatgaaaaaatgctcagcatcactggccatcagagaaatgcaaatcaaaaccacaatgagataccatctcacaccagttagaatggcaatcattaaaaagtcaggaaataacaggtcctcaatggattggatgatgtccagctgtttaggtgaaataaacagccatgttgctcacacaaagcctgtttggtggtctcttcatacagacgtgcatgaagtttggtgtcgtgactcggattgggggacctcccttgggagatcaatcccccgtcctcctgctctttgctccgtgagaaagatccgcctacgacctcaggtcctcagacctaccagcccaagaaacatctcaccaatttcaaatccgcatgctttgaaaggattaaagcctgttatcactcgcctgctaaagcatggccttttaaagcctataaactctccttacaattcccccattttacctgtcttaaaaccagacaagccttacaagttagttcaggatctatgccttatcaaccaaatggttttgcctatccaccccatggtgccaaacccatatactctcctatcctcaatacctccctccacaatccattattctgttctggatctcaaacgtgctttctttactattcctttgcacccgtcatcccagcctctcttcgctttcacttgcactgaccctgacacccatcaggctcagcaaattacctgggctgcactgccgcaaggcttcacagacaacccccattacttcagtcaagcccaaatttcatcctcatctgttacctatctcaacataattctcgtaaaaacacacgtgctgtccctgctgatcatgtccgactgatctctcaaaccccagcaccttctacaaaacaacaactcctttccttcctaggcatggttagcgtggtcagaattcttacacaagagccaggaccgcaccctgtagcctttctgtccaaacaacttgaccttactgttttagcctagccctcatgtctgcgtgcagcggctgccgtnttttaatacttttagagggcctcaa

SEQ ID NO: 142261 - DNA, 1490 bp, Homo sapiens
ctaagccaagaagatctgggaagcagtcagagagccttgggccagagttccaggggctctgggagtggctgccaggtgagttggacagtccgatttccagtggggtccggcacagatgggacgtggcttaggaggaatcctgggctgcaggcattccttggcctggtggccacgtttctggcacttgtagcaagctcctgggggaggaggttctggaggaacacctggccgctgcggttcaggcgtttggaagttcttgtgtgctggagatgcggctggggtttgtctcacagtggggacaaggaattgcaacttttttctattattgtacaccttgaaggcgaggttagttaaatcttgcccctccctcagaaaagcgggacttgccgctaaaggtgaaggaccaaggcaggcgtccctgcgtggtctgacacccgtgaaacgtgggtgtataatcagagaggtgtccctgcaatgattaaacaccaagggaaggctgccttcccagtccgtgaccggcaccggagttttgggtccacggataaaacgtgtctcctttgtctctcccagaaaatgaaaggaattgaaattaagagaagggagagattgaagagtggaaaggagaaagtggttgagggacagtgagagaggctgcatgctccctcccatgaggggtggaacatagcaggtcagagtgcatggagttcgctcctgccagtgccaaagcagccagctggttccagcactcgtgtactccagtttctgccttgtcgactcgcaaactccctctgtcctttcccctgctctatattccatcacttcactagaatttaaactgcctccactgtgagagttacctaagctcagcgtccgtgatggtctatggggcttccaaggcgatcgggcagcatcagtcttcagccgctaagccaagaagatctgggaaggagtcagagagccttgggccagagttccagggactctgggagtggctgccagactcaggagcccagctggcttcacccactggatcctgcatgggggctgcaggtggagctgcctgccagtcccacgccgtgtgcacgcactcctcagcccttggctggtcgatgggactgggcgccgtggagcagggggcggcgctcatgggggaggctcgggccgcacaggagcccatggagtgggtgggaggctcaggcatgacaggctgcaggtcccgagccgtgccccacgggaaggcagctaaggccgggcgagaaatcgagcacagcgccagtgggctggcactgctgggggacccagtacaccctctgcagccactggcccgggtgctaagccactcactgcccaggccggcagggccagccggttgctccgagtgtggggcccgccaagcccacgcctacccggaactccagctggcccgcaagcgcggcgcacagccctggttcctgctggcacctctccctccacacctccctgcaagctga

SEQ ID NO: 142262 - DNA, 560 bp, Homo sapiens
atggacgccgagcttcaggtaactctcacagtggaaggatcgggggacctcccttgggagatcaatcccccgtcctcctacactttgctctgtgagaaagatccacctacaacctcaggtcctcagaccaaccagcccaagaaacattctcaccaatttcaaatccgagacaaaggagacacgttttatccgtggacccacaactccggcgccagtcacggactgggaaggcagccttccttggtgttaagagcttgctacaagtgccagaaatctgacccccaggccaaggactgccggcagcccaggattcctcttaagccacgtcccatctgtgtgggaccccactgcaaatcggactgttcaactcacctggcagccactcccagagcccctggaactctggcccaaggctctctgactgactccttcccagatcttctcagcttagcggctgaagactgacactgcctgatcgcctcggaagcccccctgacaccagttaggctcagcaaattacctgggctgtactgctgcaaggcttcacagacagcccccat

SEQ ID NO: 142263 - DNA, 1677 bp, Homo sapiens
atgatcattacacacaatatcgtggaggactctcaaaagcattttgctaagcgaaagatatcagtcacaaaatacgaattcggtcttattcatttaagcttccataaagtgccaacaggcaactttctcaggttgtcaccctatttaaaagttccgagaaaatccacagcattagacatgtctcttgtcaatctggaacatgggattccgtgtgggaaagtacatgctaaaaggaaattagaagatctgtaccaagaaaagaatagcagcaccatgagagaaccgggacttgggagacagcaatgtcagcattcccatagattcgattctactgataaggactttgattatgcacccatgttcacagcaaccttattcacaatagccaaaaggtggaaacaactcaagggtccatggacaagtgaatgggtaaacaaaacgtggtgcatacatatcgcagaatattatttaaccttaagaaggaaggaaatcctggcacatgtcgcaacatggatgaattttgtggacagtgtgcatggtgaagtaagccagacacagaaggaaaaatcctgtatgattccaatcataatgaagtacctggagaagtcaaactcgcagagacagaaagtagaatggtggttgccagaggctagggtcgaggccaaaggcctaagcaccagcgtggctggtggtgtaagtcctggagtccgaaggctcaagaaccaggagctccaatctgctgcctggagatgcatgaccacctgggaagcagatcctgaaggtgtcaggaaccaggctggagacaacgctgcaaaggagctagttcttgcctgtgtttatttatcttgtaaaacctccctaacgcagcgaggtcgagcaacacagatccacactctggcaccacggctccgggtttggtcggtacacgttgtctgcctctcaggttatcacagggcacagtcttccaaacatttcactcacagggcacagtcttccaaacatttcactcacagggcacagtcttccaaacatttcactcacaggggacagtcttccaaacgtttcactcacagggcacagtcttgcaaacatttcactcacagggcacagtcttccaaacgtttcactcacagggcacagtcttccaaacgtttcactcacaggggacagtattccaaacgtttcactcacagggcacagtcttccaaacgtttcactcacagggcacagtcttgcaaacgtttcactcacagggcacagtcttgcaaacgtttcactcacagggcacagtcttccaaacgtttcactcacagggcacagtcttccaaacgtttcactcacagggcacagtcttgcaaacgtttcactcacagggcacagtcttgcaaacgtttcactcacagggcacagtcttgcaaacgtttcactcacaggggacagtattccaaacgtttcactcacaggggacagtattccaaacgtttcactcacaggggacagtattccaaacgtttcactcacaggggacagtattccaaacgtttcactcacagggcacagtcttccaaacgtttcactcacagggcacagtcttccaaacgtttcactcacaggggacagtcttgcaaacatttccccgcgcataacaaggctcactggttccctaccctgaaataa

SEQ ID NO: 142264 - DNA, 879 bp, Homo sapiens; identical to SEQ ID NO: 135254

SEQ ID NO: 142265 - DNA, 807 bp, Homo sapiens
aggacacctttggattaataatgaaccacactctcttctgaagcaagctgttcgaatcatctgatatttatactgaatgagttactgtaagtacgtattgacagaattacactgtactttcctctagggtgatctgtgaaaatggttcgctattcacttgacccggagaactcctatgaaatcatgcaaaatcaaagaggttccaatcttcgtgttccctttaaggaccactcgtgaaaactgcctcaggcccatcaaagggtatgccatatacgaaaaagccccacgaagtatcctgaaagatgtccaccttaccagaaaccagtgtgtccccattcccgaccgttacaatgggtgacagttgggccaggtgtgccgcaggcccaagcaaatggggcctgggaccaccaagggtcgggtggccccaaaaaggagtgctgaaatttttgcctgcacatgccttaaaaaccgcagagatgtaatgctgaactctaagggttttggatgtagattctctggtcattgagcatatcccaagtgaacaaagcaccctaagatgccgccgccggacctacagagctcatggtcggattaacccatacatgagctctccctgccacgattgagatgactccttacggaaaaggaacagattgttcctaaaccagaagaggaggttgcccagaagaaaaagatatccccagaagaaactgaaagaaacaccaactttatggcacggggagtaaatttcagcattaaaataaatgtaaataaaaggaaaaaaaaaaaaaaaaaaaaagtcgacgc

SEQ ID NO: 142266 - DNA, 710 bp, Homo sapiens
tttcgtatgtctctttgaaatcctttgagcctgcagttttgaaacaaggagaagaaattcataatgaggtcgagtttgagtggctgaggcagttttggtttcaaggcaatcgatacagaaagtgcactgactggtggtgtcaacccatggctcaactggaagcactgtggaagaagatggagggtgtgacaaatgctgtgcttcatgaagttaaaagagaggggctccccgtggaacaaaggaatgaaatcttgactgccatccttgcctcgctcactgcacgccagaacctgaggagagaatggcatgccaggtgccagtcacgaattgcccgaacattacctgctgatcaaaagccagaatgtcggccatactgggaaaaggatgatgcttcgatgcctctgccgtttgacctcacagacatcgtttcagaactcagaggtcagcttctggaagcaaaaccctagaaggagcacaagtctcaggcggaggagaaaaagaagatccggctttttctccttcaacgtttgtcatggggcttaagcaagagcagtggagacttctcttggcccctagattgtagcacccgggtcccaatccaaaacagctaggaaatggtgcccatgaagttttaaatgttttaaaatgaccctgtgttatagtctgatttggtgttaaccaggcccttcttcccccaaaattgtccagat

SEQ ID NO: 142267 - DNA, 2775 bp, Homo sapiens
atggttggtagatgtgagtcataccctgggcccagctgcgtccaccaacagaatacttctaaggagcaccaggaagataaagacatcagcccaaaacgctctaatatgttgctgaagactcattcccacggcctcttcctgtgggtgacacagtgccctggacatgggtggtactgtgtggttgacatagggcctgaagctattttacaacccacagcattcgatttttattttgccaagaacacgttggtaatgggatgtaaatctcccggtgcacacctgattaaacaggcctgtatacgtgaattaaaaaagagggtgagccccttgccatcacggggtgacagggaagcacgccagataaccggagctcagttggctgaagggagctcggtggctgtttttattaacttgagagctaaggtcatgcggcttcttggggccttggtgaggaaatgcatttgcaaagtgtatgggctgtcatacagaaatagagtggatgtttggaagaagagtatcaggtgtagctcaggaccagtaggaaaggtgtccctgccagtggggacagagagcaaaagcaacgggacaaacattgaaggcacaatactgcactgtagaggcctcccatctctgcagccccagcttggatcacaagggaagttactgcacagccaagtatgctgcatttgcaaagatataactggggcttgctgctttcataggaatttttggttggactatcttctaaatttgtctttttcaatacctgcctgtgtgctaccttcagcttgcacaattaaccacccaatgccagcagcaaagaacacatccctggctttgagaagcttccccacggtcctctgggctaacaagaacaggtatggcaagggtacaaagaagccaacttgtagaggggagagagaagaggtaactgacagagtcagagcacgttggaaagtgatacgagaacaggggcttatggttacagccctaccccctttccaaagaaggcgattagatattatttcagatagtttctcactgtgtcctaatttcattttccagcaaccctgtggcagtcctgttctagtcttttccaaggacaaatgtgtttctagagatggagttcatcctgatatttgggggctggcctacgtacagattgctataccagaaggagcagtttgggggagacagtcagattccacagagcatgttttgaaggctattcacgtgatcaaccctaggccatactgcaagcctaaggcggtctctttggcaactcatccttcttttccgaggctccagtgggctttattcagtggcggcattgctagcagcaccgcaaaaacttcagtcggaggacttcagaatttggcctgctctctattgaactacgatgttttaaaactcctttctaaccaagtcatttcagaagcaaaccttgcactgactcagaaggcctgttcagtcttccgtggctctcagcatataggattaccctccttcctcagcctgaattcacggcaccaaaaagaaaaagaacagcataaattggatggtgagcaaataagccggtctgactggagcacagtgaacaatgggatgagtgcaaggagagggcagagaatcggggtcaggaaagggtccatcatggagggccctgtggaccactataagaaactgaggctcagcgaggtaacaaaacctgcccaagacgtcatgcccctggagagcagcaattccggcaatcaagagaacacactctttaccaccatgctgcagtctccctgcttcccatctttggaaattaagatccaagaaggaagaatgagtgacctgagcaaaagaaatgaaaccctaaagggggacagatgtgccttccagtgccagtcacgaattgcccgaacattacctgctgatcagaagccagaatgtcggccatactgggaaaaggatgatgcttcgatgcctctgccgtttgacctcacagacatcgtttcagaactcagagttagggctgattttaccactgggcaaattgcatacatttggatccatgccacgctaaaaactgtttattttggagatctgtcagaggcaagcacatggaagacaaggggattctggtttgaaaaggcaattctcatccagacagattcagatggagaggagcggtgtggattaaaatgcgccgaagtgcctccgagagaaggagagagggtccacaagccagatccatccccatccacacagggaattcggctttccacgttggaaccagaacagttaaccttcaaacccccaaggcttgcaagagatgaatcagtttctcagacagccaaagccgtggcttataactcatccaacccagaaaactggaccgctgacggcagattcgcagggaagcaggccgagcctgatcttttctccgctagaactgctcaacaggtgaagaatctttttccagcactcctgagcccttcgggtcgcggaacagtgcgaagattattccaatgcctcattcggagagggtgtgccgtcgccctgagccccgccgtccatggaggcactgtcccagggtgtgccgtcgccctgagccccgccgtccatggaggcactgtcccagggtgtgccgtcgccctgagccccgccgtccatggaggcactgtcccacgggaccctggggaggaccgcctgcaaggatggcagagatgccacggcaaactcattcttaaactatccaagaagctacaaaggagggttttggagtga

SEQ ID NO: 142268 - DNA, 1356 bp, Homo sapiens; identical to SEQ ID NO: 116174

SEQ ID NO: 142269 - DNA, 374 bp, Homo sapiens
aagcccttaaccattgctgttctaagcaccgtagtaatcagtcgtttgataattctgtttttttgtatttaactacaaacctgttcgtttttcctatttacctgtcaatgttgtaagacttgtttctgaaccccctgtttaaaacaataaggttccccctgctctgaggaagctggaacacttaggagacgtaagatatacacttgttgtatccagttggtggaatcgggggatttgcagaaagaaatagcgtctgagatcataggattactgatgctggaggtaagatggcaaacaaaaacttttatttgggggtaggtttttgagggtttgtaatttgttgagggaaggaaaacttaagtgcccaacctagc

SEQ ID NO: 142270 - DNA, 1101 bp, Homo sapiens
actgtctgtttacttgttctgatgtcggccgagaaagttttattatgaagaggactggctaatcaccaagcttaagggacaagtgagccaagaaagcttatcagaaaaggcctcttctcaggcaaccctaccaaatcagcctgttgagaaagctatcatcatgcaactgggaactctgcttacatttttacacgagctggtgccgacagctctgccatcaggcagctgtgtggacaccttgttaaaggacttgtgcaaaatgtacaccacacttacagcccttgtcagaattttatctccaggtgtgtcagagctccggaggaattccaaaaaatatggaacagctggtgaagctgtctggttctcatctgacccccctgtgttattctttcatttctttacgtacagaataagagtaagagcctgaactatacgggagagaaaaaggagaaacctgctgccgttgccacagccatggccagagttcttcgggaaaccaagccaatccctaacctcatctttgccatagaacagtatgaaaaatttctccatccacctgtctaagaagtccaaggtgaacctaatgcagcacatgaagctcaagcacctcacgagacttcaagatcaaaggaaacatcctagacatggttcttcgagaggatggtgaagatgaaaatgaagagggcactgcatcagagcatgggggacagaacaaagaaccagccaagaagaaaaggaaaaaataaatgaaatgcctgagttaatgtgaactttggggcttctgcttcatttttacccaacaagcaacaatgccccttgtcctgtagtccacaccgatgttggcatcttggttctgaacccactgaattcaactgcaccttcagttagaaggaatcttcttggcagggtctgctactgaaaaatggctggccttaggcaagcccttttgcaaaaagcacagctgaaaagcctgagtttgggagcctgcaccaccccgatgaagctccacgggagcaaatacagagcctccaggcagtgctatgggtcaggctggcttcgttttttcaaggagcctttggtgagttcaattatctggtaaat

SEQ ID NO: 142271 - DNA, 3422 bp, Homo sapiens
tttcgtcgaggtgactgcagagcggctcgcgagttccagatggaatcatgtggaagggcctgtggcagaaagaacttggagatttgaaggactggaagcaattctgcatggctggagcagagtgatgaaagggaggtaggcatgggtcagaacttgcaggacttattttatccttacttaagggttttggactgataaagcaatggaagccactgaagagctttaagatgaggatggcatggagggaagataagtcacataatcagttctgtgatatgagcaacaatggaccagaagattttatctctagcagcagaaaaaacagcagacaaaccgcaagaatttcttcaaaccctgagagaaggtgatttgactaatctccttcagaatcaagcagtgaaaggaaaagttgctggagcactcctgagagccatcttcaaaggttccccctgctctgaggaagctggaacacttaggagacgtaagatatacacttgttgtatccagttggtggaatcgggggatttgcagaaagaaatagcgtctgagatcataggattactgatgctggaggctcaccattttccaggaccattattggttgaattagccaatgagtttattagtgctgtcagagaaggcagcctagtgaatggaaaatctttggagttactacctatcattctcactgccctggctacgaaaaaggaaaatctggcttatggaaaaggtgtactgagtggggaagaatgtaagaaacagttgattaacaccctgtgttctggcagggatgtccctctgactgcagaagaggtggaatttgtggtggaaaaagcattgagcatgttctccaagatgaatcttcaagaaataccacctttggtctatcagcttctggttctctcctccaagggaagcagaaagagtgttttggaaggaatcatagccttcttcagtgcactagataagcagcacaatgaggaacagagtggtgacgagctattggatgttgtcactgtgccatcaggtgaacttcgtcatgtggaaggcaccattattctacacattgtgtttgccatcaaattggactatgaactaggcagagaactcgtgaaacacttaaaggtaggacagcaaggagattccaataataacttaagtcccttcagcattgctcttcttctgtctgtaacaagaatacaaagatttcaggaccagacttcggttgtaaagagctttaaggatcttcaactcctccaaggctcaaaatttcttcagaatctagttcctcatagatcttatgtttcaaccatgatcttggaagtagtgaagaatagcgttcatagctgggaccatgttactcagggcctcgtagaacttggtttcattttgatggattcatatgggccaaagaaggttcttgatggaaaaactattgaaaccagcccaagtctttctagaatgccaaaccagcatgcatgtaagctcggagctaatatcctgttggaaacttttaagactgtacaaaggctgcttaaggcagtgcaggttcatgtggatgttcacagccattacaattctgtcgccaatgaaactttttgccttgagatcatggatagtttgaggagatgcttaagccagcaagctgatgttcgactcatgctttatgaggggttttatgatgttcttcgaaggaactctcagctggctaattcagtcatgcaaactctgctctcacaggattatctgctgtgttgtattcagcattgtttggcctggtataagaatacagtcatacccttacagcagggagaggaggaagaggaggaggaagaggcattctacgaagacctagatgatatattggagtccattactaatagaatgattaagagtgagctggaagactttgaactggataaatcagcagatttttctcagagcaccagtattggcataaaaaataatatctctgcttttcttgtgatgggagtttgtgaggttttaatagaatacaatttctccataagtagtttcagtaagaatagggttggggacctccttccctttctttatgtgttatgtaatacctctcttacattcttaatgaaaaagcgggtaaagccaaaactaaaatggccaacaagacaagtgatagtcttttgtccatgaaatttgtgtccagtcttctcactgctcttttcagggatagtatccaaagccaccaagaaagcctttctgttctcaggtccagcaatgagtttatgcgctatgcagtgaatgtagctctgcagaaagtacagcagctaaaggaaacagggcatgtgagtggccctgatggccaaaacccagaaaagatctttcagaacctctgtgacttaactcgagtcttgctatggagatacacttcaattcctacttcagtggaagagtcgggaaagaaagagaaaggaaagagcatctcactgctgtgcttggagggtttacagaaaatattcagtgctgtgcaacagttctatcagcccaagattcagcagtttctcagagctctggatgtcacagataaggaaggagaagagagagaagatgcagatgtcagtgtcactcagagaacagcattccagatccggcaatttcagaggtccttgttgaatttacttagcagtcaagaggaagattttaatagcaaagaagccctcctgctagtcacggttcttaccagtttgtccaagttactggagccctcctctcctcaggatgtagaggtggagaaaacaaaccactttgcaatagtgaatttgagaacggctgcccccactgtctgtttacttgttctgagtcaggccgagaaggttctagaagaagtggactggctaatcaccaagcttaagggacaagtgagccaagaaaccttatcagaagaggcctcttctcaggcaaccctaccaaatcagcctgttgagaaagctatcatcatgcaactgggaactctgcttacatttttccacgagctggtgcagacagctctgccatcaggcagctgtgtggacaccttgttaaaggacttgtgcaaaatgtacaccacacttacagcccttgtcagatataataagagtaagagcctgaactatacgggagagaaaaaggagaaacctgctgccgttgccacagccatggccagagttcttcgggaaaccaagccaatccctaacctcatctttgccatagaacagtatgaaaaatttctcatccacctttctaagaagtccaaggtgaacctgatgcagcacatgaagctcagcacctcacgagacttcaagatcaaaggaaacatcctagacatggttcttcgagaggatggcgaagatgaaaatgaagaggtcagtgctggcttctgtctggagcccagccactcttcctag

SEQ ID NO: 142272 - DNA, 1396 bp, Homo sapiens
gaggatttatagatcagaatctcagtccaacaaaaggcaacatttcatttgttgcatttccagtttccaataccaactcacctacaaagattttacccaaaaaccttaggaccaataaatgtgaatgttggaccccaaatggatgcaaccagaaggcatcatctttgaagcagagaataaaccctcaccaggcactgaatctgccggcactttcattttggacctctcagcaacctccagaacaattataagcacaccacagagactaaccagttcaggaagtgttctgattgggagtccatatacccctgcaccagcaatggttactcagacacacatagcagaagctactggctgggtccctggtgatagaaaacgggctagaaaatttatagactctgatttttcagaaagtaaacgaagcaaaaaaggagataaaaatgggaaaggcttgagacacttttcaatgaaagtgtgtgagaaagttcaacgaaaaggtacaacatcgtacaatgaagtcgctgatgagctggtgtcagagttcaccaattcaaataaccatttggctgctgattcggcttatgatcagaagaacattaggcgaagagtttatgatgctttaaatgtgctaatggcaatgaacataatttcaaaggaaaaaaaagaaatcaagtggattggcctgcctaccaattctgctcaggaatgtcagaatctggagatagagaagcagaggcggatagaacggataaagcagaagcgggcccagctgcaagaacttctcctacagcaaatcgctttcaaaaacctggtacagagaaatcgacaaaatgagcagcaaaaccagggcccgccggctctgaactctaccattcagctgccattcataatcatcaatacaagcagaaaaacagtcatagattgcagcatctccagtgacaagtttgagtatcttttcaattttgacaacacctttgagatccatgatgacatagaagtactaaagcggatgggaatgtcgtttggcctggagtcaggcaaatgctctctggaggatctgaaacttgcgaaatccctggtgccaaaggctttagaaggttatatcacagatatctccacaggaccttcttggttaaatcagggactacttctgaactctacccaatcagtttcaaatttagacctgaccactggtgccaccttaccccagtcaagtgtaaaccaagggttatgcttggatgcagaagtggccttagcaactgggcagttcctggccccaaacagtcaccagtccagcagtgcggcctctcactgctccgagtcccgaggcgagaccccctgttcgttcaatgatgaagatgaggaagatgatgaggaggattcctcctccccagaa

SEQ ID NO: 142273 - DNA, 1870 bp, Homo sapiens
atgcttagcgttccagtaatggaacacaggcataaatggaagctttacaaactttacaaaaatgtgcatcactgggaaagtaacaggacttgccttaccctgtgtgcaggctataaacgcaggccaatggtacatgtgcgtgacagcagcagaagagaagggcagacgttttgttactttagaagttatttacatggtggaatactgcattggtgattctgtcatatgtgagtttgagcaagcagatggcccagagtgccaaggcatgggggacagaactatcaaaagaggggcttcaggcgctaatgaaaccctggcaatcccttcctggcactgtgtcaagtctgctccccgaattttggcacagtgctccttagccattccaggtgtggctccagtaggcccaagtatagtggctgctcctctagagggcacaggtggtgaaccttggcagtgtctgagtgatgccatctccagtgggtgcagagtgtacaagctgcggggatgcaaccagaaggcatcatctttgaagcagagaataaaccctcaccaggcactgaatctgccggcactttcattttggacctctcagcaacctccagaacagaggtatccagaagaacgcattgttatcacaggaaatgacagctccatgtgtgttactgcccctgaagaccttccagtaggacaaaatgtggaggtggaggacagtgatattgatgatcttgacccccctaaaacagttcaccttgctggtggggagagaaagggtgcagcgtgcggggacctgggctggtgggaaaagcagtcgggttattgttcgtgtgctacaaaggatgaggaattcagtccccaggatccacgggaggagctggctgagaccctggggcccggccttcttcccaagagtccattttccccttggattaacttactttattgtttctaccgtcccatgacttctgagtttatgtgtagacaagtctcccggtgcgggcccagcaggcaggtgacagccgcccttgcgggagtcatccttaaccaagcagtttcagaaatgtttcttgagaaactgtttccggaagtcccggagcctgtgttgcccattgacaagccttgtcggtctcagaagacagactccgggggtctacatccagagacccggctgaggactgaagcccggggtttccaagcggctgccttctccgtcctgcagcaggatgctctcctgaaagcaagtttcagcaagaggctggaaaggcctctcagagagaaggctgagctggcagtgatcagggagcccccgggcatttggcagccgtccacagtaagaccggcagatggagccttcatctggcaagaaactggggaagctggcggtgtcgtcagacaattctgtgggcttgcaggtatcgcccctggtcagcggtgtattcagtcgctgtgccatcccccatgtggctacaagaacaaaagcaccttcttaagcccaagagatacagtggttactcccatgagtccttggacaccttcaccaaacggcactatggggcccacagaattaagtttaaggcttcacaaagataagggaggcctacacgagctacgtggcgagggatctataggagggaaagaaagcaaagattctagagaggacagaaatagttcactaaagcccccacaagttagggagggacaaaattttggagataatacctttagccttagagaagaaatatggaggtatccagaagaaggcattgtcatcacagaggacagccccatgcgtgttgctgcccctgaagaccttccagtggggcaagagatgaaggtggaagacggtgatactgatgattctgactctgtgtag

SEQ ID NO: 142274 - DNA, 396 bp, Homo sapiens; identical to SEQ ID NO: 130913

SEQ ID NO: 142275 - DNA, 498 bp, Homo sapiens
atgggattcgcagaggcatttctggaacatctttggaaaaacttgcaggatccaagtaatcctgccatcatcaggcaggctgctggaaattatattggaagctttttggcaagagctaaatttatttctcttatgattcgggaacaaaggcattctgcgatgttgctctccatggaccattttactcagcctgccaagctgtgttctacacctttgtttttagacacaagcagcttttgagcggaaacctgaaagaaggtttgcagtatcctcagagtctgaattttgagcggatagtgatgagccagctaaatcccctgaagatttgcctgccctcagtggttaacttttttgctgcaatcacaaagatgaagacttgtggatatggatggtggtgatggttgcacaacaatatcaatttattttataccactgaaccgtgcacttcaaaatggttaagatggtaagttttatgttgtgtattttaccataataaaa

SEQ ID NO: 142276 - DNA, 585 bp, Homo sapiens
ttatttgcaaggctctgtgatatgtgtcaaaatttgcaggaagatcaatataatactgataagttgctcaaagtcttttgtcaagtacatgacagaagaacggaattctagcagccagttgatgatctggtcatcctttatgtctggatctaacagctggttcttcaacaactcaaagtcatttgtttcaccctttttgtacttcagcaagacttctgtcacagttccaccaaaccgaacagtttttcttgggggagaattgaaaaaatcattctctaatgcacgcatatttgaaatcccagtcctcgacgcgcccagcgtcttgactgcagaggacgaagcggccgcatctcccgacaaacaacgtgtgaagcagcggtgccgccattgggccgaactaacgcgaccgctgcgcctcaggccggatgcccagctccttccagccacagcctcctttttaggccgtttcctttttctgccctcaatctctgtgaactgaaccttgttaaagtcagtcaacaccagggtggatggtttgccgttgtcacctattttcaggacataacaccctgacttaggagccat

SEQ ID NO: 142277 - DNA, 469 bp, Homo sapiens; identical to SEQ ID NO: 137630
  misc_feature (1)...(469): n = a,t,c or g

SEQ ID NO: 142278 - DNA, 2103 bp, Homo sapiens
atgggcagggctaatgacgatggcagggcgacaagagggacagtgcgtagcgtggcaatctgcgtgctagaaaaccgagcaagcggggaaaagccggtgaaggcgagtatcacccacgaggagcggcaaaagaagaggagccgaagaaaagaacagacaagagaagaagaagggcagagaaaaagaaagaagagagaagagaagcgaaagacaaagggacagaagaagaagaaaggagcaaaggaaggaagagcaaagaagaagagcaagaacaaacgagaggaaaccaaggcaaacacaggcaaatggggccacctcgagctaaaaagcttctgcacagcaggccggcatgtgggggggctctccctgaacggatgcgacagcaatcaggcgtggaggtgctccttgcagcagccgtcggacatgcctgaaccaaggcacaatcgcaaccccatcaggacggcagacgacacggtgatgcggggtaaccagggctggcctccgagcacgatgccagtggacacggctgcctcagaaccggagcggggtaaccgtctgactcgacggaatctgtgtgccggcgacctcttgcgatgcatgtgcctacccatgagtctcacggacccgtattcacccgactggtgtcacatacctttcactgcggttgctaagctgcctgcggtgggtcggcccgtggcctgccggcccacatacagccccagcctctgccacaacccccaacgcccagcgcagttctggctcactcatctgctttgcaatgtgcacctctgtcctgggatccccagagatgtgcacctccatccccgcgtccccacagacgtggacccccgtccccacatccccacagacgtgcacccccatccccacatccccacagacgtgcaccaccacagcccgcacagacccaaccacgagcgccccgcccccccccaaacccagagacgcgcgacaagagagccagccacgaagcacacccgcaacgcacaccccagacgatccgcctgcaaccgaggaacacacacgcacccgcgccgccgtcggaccacagagaggacaacgcaccatgcacgaccacggaaccgaggacaggccacccccaacacgcggcagcccaccgcgggccgacacgaggagacggacggcgccacacggaggcgacagcacggccaaacgcgcggcgagggaggcccaggcgcggcagggcggccaaaacccggcagagagaaagacaagagcccccacacgacaacacgagacgcaccaggagacggccaaagcggcgagacaggacaggcgcaccagcaggaaccagaaaccgaacaagcggacacaaaaagaggcaaccagggacgcgagcaagcaccggaacagccccggcgagccaacaacagcagaccccgactgtcttgtcccgttgtatatcccgtttcggtgttttttacgggcctgatttctctgggggtatattccttctgttctttgcctcttatgtcggattcgacgttgtccacatacggaggacagagacgtggaagtcgcgtgcaaggaagacccaggatacgggagtgctctccccactccgtagagagcgttcctgtcctccagcccatggccgctttccaggactcttcctgtccacccaccggcaagttggcccagcagctttgcgtcctccagaattgtcctgtgagtgactcccgcaggatggagacttttgtgtctggcttccttcacttcgcagcaggcttcgcgggacccgtgtggtggcaccagcgtccagcccttgggagattggcaagtgacagccgtggctccttagccccagacccagtctccttccttgtcgcaatcacgggatgtggaaaaaaggcacaggggtcagcacccttccgtgggttctgtgtgactgatgaaagctgcgtagaggggaccctcaggggcgaagaggccgaagacagcaccgagacctcagtgtcgggcgcgggtgctcccaaagcgcagcgggcccacctcccccggcagaggatcgtgcggcagtcaaagtcgcacacggggcttctgagatgtgcggcccgggcctaa

SEQ ID NO: 142279 - DNA, 667 bp, Homo sapiens
cgctgcttcacacgcgtttgccgggagatgcggccgcttcgccctctgcagtcaagatgctgggcgcgtcgaggactgggatttcaaatatgcgtgcattagagaatgattttttcaattctcccccaagaaaaactgttcagtttggtggaactgtgacagaagtcttgctgaagtacaaaacgggtgaaacaaatgactttgagttgttgaagaaccagctgttagatccagacataaaggtaattaattttgggtttgatcattagcaaaattattgccactttatacagacatagtttgctctttgggtcccattctgttctgcagaacttgctctctccatggtcctcccttactttaatctggtggttctcaaccagggacagttttaccccctagaagacatttggtgatggctgcagatatttttgtcacaactgggaggaaagggtgctactggcatctagtgggtgaatgacagagatgctgctaaacatctcacagtgcacagggcagcctcccataaccaagagtgatccagccccaaatgacaacagtgttgaggctgggaaaccctgctctaatgcttcctttctattagattactacctctttcctccatgctgcatgcaactcttttgtctctttaaagctaaaacaaacc

SEQ ID NO: 142280 - DNA, 807 bp, Homo sapiens
tcacacgcgtttgccgggagatgcggccgcttcgccctctgcagtcaagatgctgggcgcgtcgaggactgggtaagattcaggccgcttccttctgtgcgtctgggaccaaagctcaggaccgctcttagaggagcagattgaaaggatgtggggcaaagctctcttcagcacacagggatcaaaggggaagaaggtgtccagtgggtttgtgcaggtctgcactgagtctcctccagtggtactcctaatgactggcagcatctggcgattgttcctctcaatgatggtgtagcagaagacgaggctggtacttactccttggattccataactattggcggtcctcaactttcctcgtgaggtgtactccaagttgtcccggtggttgctgtccccgttacgggatttatcctgtccgtagttgccccaggttgccaggtggtgtgtcccggtacgggagtatccactccggtagtggtgctcatggagtccgtcgtggtccccttggttaacctcggttactcctcgtctgtatgtggccctcatgtaagccgtggtgtgtcccgtagtaggaaaacagccgtagtgactccagtagccgtggtgtgtccgtagtaggataacaagccgtagtgactcagtagcgtggtgtgtcccgtagtatgggaaacacgacgtagtggactctagtagcgtggttgtcccgtagtaggaaaccaagcgtattgactcagtagccgtggtgtcccgtaagtaggaaacagcgtagtgaccagtagcgtggttgtccgtagtaggaaacat

SEQ ID NO: 142281 - DNA, 776 bp, Homo sapiens
atggctcctaagtcagggtgttatgtcctgaaaataggtgacaacggcaaaccatccaccctggtgttgactgactttaacaaggttcagttcacagagattgagggcagaaaaaggaaacggcctaaaaaggaggctgtggctggaaggagctgggcatccggcctgaggcgcagcggtcgcgttagttcggcccaatggcggcaccgctgcttcacacgttgtttgtcgggagatgcggccgcttcgtcctctgcagtcaagacgctgttcgcgtcgtaggactgggatttcaaatatgcgtgcattagagaatgattttttcaattctcccccaagaaaaactgttcggtttggtggaactgtgacagaagtcttgctgaagtacaaaaagggtgaaacaaatgactttgagttgttgaagaaccagctgttagatccagacataaaggatgacccagatcatcaactgggctgctagaattccgttcttctgtcatgtacttgacaaaagactttgagcaacttatcagtattatattgagattgcctttggttgaatagaagtcaaacagtagtggaagagtatttggcttttcttggtaatcttgtatcagcacagactgttttcctcagaccgtgtctcagcatgattgcttcccattttgtgcctccccgagtgatcattaaggaaggcgatgtagatgtttcagattctgatgatgaagatgataatcttcctgcaaattttgacacatgtcacagagccttgcaat

SEQ ID NO: 142282 - DNA, 3175 bp, Homo sapiens
atggcggcaccgctgcttcacacgcgtttgccgggagatgcggccgcttcgccctctgcagtcaagatgctgggcgcgtcgaggactgggatttcaaatatgcgtgcattagagaatgattttttcaattctcccccaagaaaaactgttcagtttggtggaactgtgacagaagtcttgctgaagtacaaaacgggtgaaacaaatgactttgagttgttgaagaaccagctgttagatccagacataaaggtggtgtgccccgccatgccgatgatcctgagggaggggagggccattgtgggcgagtgtgcctttcatccccttcgtggctttcagttgtgctcaaaccagagtggcctcagcccgaaggttgctaagctgcctgcggtgggtcggcccgtggcctgccggcccacatacagccccagcctctgccacaacccccaacgcccagcgcagcttctggctcactcatctgctttgcaggacaccgtggtttctcatgccaatactggtggaaaaatttccatttgttcgaaaatcagagagaacactggaatgttacgttcataacttactaaggattagtgtatattttccaaccttgaggcatgaaattctggagcttattattgaaaaactactcaagttggatgtgaatgcatcccggcagggtattgaagatgctgaagaaacagcaaatcaaacttgtggtgggacagattccacggaaggattgtgtaatatggttagcagtttattaatgaaagtggagatgaagtttatcataatcaaagggtggaaacagctagtgctgctcatctttggattcgcagaggcatttttggaacctctttggaaaaaactgcagggatccaagtaatcctgccatcatcaggcaggctgctggacattatattgcaagctttttggcaagagctacatttatttctcttattactgtaaaaccatgcctagatcttttggttaactggctgcacatataccttaataaccaggattccgggaacaaaggcattctgcgatgttgcctctccatggacccattttactcagcctgcccaagctgtgttctacacctttgtttttagaacacaagcagcttttgagcggaaacctgaaagaaggcgtctggttcaaggtgtcctctcttctgagtctcagtgatagtaaaggattaggaaaaggcataaagagaccaataagcaacggcgaacagaggctcgtggtaacgcgtacagagatggtacatccctgtcctctcatcaaagtgattcctctcccttttgccaaacttccacagaagccaaataaacagtgtagacactccgtcactcgctacggccacggcggccactcggatcacactccgtcactcactgtggccacagtggccactcagatcacaccccgtcactcgggccacggcagccactgtgatcgcaacctgtcacttgctacagccacagcagccactctgatcacaccccatcacttgctatggccacgatggccccttggatcacactctgtcacttggtgtggccacggtggccactcggatcacactccatcacccactacggccacagcagtcactcggatcacatcccgtcacccactacggccacagcagtcactcggatcacatcccgtcactcactacagccatggcagccactctgattgcattcccgtcactcgctatgcccacggcggccactcagatcacactccatcacttgctatggccacggcagccactcagatggcactctgtcactcactatggccacggcagccacttggatacttggtcaataaaataagaagaaagcgttgtacggatggggtatcgccaagcggtaaggcaccggtttttgataccggcattccctggttcgaatccaggtaccccagccatcttcttcgagtaagcggttcaccgcccggttattggggtatcgccaagcgccaccaaattctgaatgtatcgaatatgttcggcaaattcaaaaccaatttgttggggtatcgccaagcggtaaggcaccggattctgattccggcattccgaggttcgaatcctcgtaccccagccaatttattcaagacgcttaccttgatttcaaatatgcgtgcattagagaatgattttttcaattctcccccaagaaaaactgttcagtttggtggaactgtgacagaagtcttgctgaagtacaaaacggcgattgaaaaacggctggaaaaactggcggttgatccacatcgcgaccgtgcgcagatgctgaaagtcgaaaacgtccagcaggcgtggcagcaatggatcaacaaactgccgcccgcacgtcgtgaggatgaagacgtgaaagagatccgttggatgatagaagagttgcgcgttagttacttcgctcaacaacttggcaagaactctcgggcagaatccatgctgtggtccttccataaagcggctatagaagcggcacgcaccaatatcattcaggcgcaaacccgcgtcgaagcggcacaagccactgaacggcgcattgccgcagatatcgatgacagcgaactgaaagccccgcgtgacggacgcgtgcagtatcgggttgccaagccaggcgaagtgctggcggcaggcggtcgggtgctgaatatggtcgatctcagcgacgtctatatgactttcttcctgccaaccgaacaggcgggcacgctgaaactgggcggtgaagcccggctgatcctcgatgccgcgccagatctgcgtattcctgcaaccatcagttttgtcgccagtgtcgcccagttcacgccaaaaaccgtcgaaaccagcgatgaacggctgaaactgatgttccgcgtcaaagcgcgtatcccaccggaattactccagcagcatctggaatatgtcaaaaccggtttgccgggcgtagcgtggtcattcctgtattccatcaaccagacaatctgcttgcggttggatagcattgaagccaaattgcaagccctggaggctacttgtaaatccttagaagaaaagctggatctggtcacgaacaagcagcacagccccatccaggttcccatggttgccggctcccctctcaggacaacccagatgtgcaacaaagtgcgatggtaa

SEQ ID NO: 142283 - DNA, 2410 bp, Homo sapiens
gatcttttggttaactggctgcacatataccttaataaccaggattcgggaacaaaggcattctgcgatgttgctctccatggaccattttactcagcctgccaagctgtgttctacacctttgtttttagacacaagcagcttttgagcggaaacctgaaagaaggtttgcagtatcttcagagtctgaattttgagtggatagtgatgagccagctaaatcccctgaagatatggcttgccctcagtggttaacttttttgctgcaatcacaaataagtaccagctcgtcttctgctacaccatcatcgagaggaacaatcgccagatgctgccagtcattaggagtaccactggaggagactcagtgcagacctgcacaaacccactggacaccttcttcccctttggatccctgtgtgctgaagaggtcaaagaaattccattgatcctattttatccaggtatggggaagacatgagtgctgaagagctacaggagttcaagaaacccatgaaaaaggacatagtggaagatgaagatgatgactttctgaaaggcgaagtgccccagaatgataccgtgattgggatcacaccaagctcctttgacacgcatttccgaagtccttcaagtagtgtgggctccccacccgtgttgtacactgcaacccagtcccctctgacggcagaaatttgcgactgagatgtgacatttgggattccccatcacttgtcatgccctcagcacccagcttgtgccattgggcattgatggcattgaactaaagcgagtgcctgcctcggctgtggcaacttccaggttcgactgaatcaagcatctgaagactgggtttttttgttgatgttgctccccttaccgaccaaatgaagactatcatgtgcaatcttttacagaggggttgatgatacatttggaaggatttgcttggtcaatatgaacattttttggggtaacagctttttgacacaattactgggcaaattctaatataggcagcagactgttttacgggttgctgttttaacatgggtttttgtcagatccatggtcttaggacttgactgatgagctttcagtgaagaatcctctaagataaaacttctatttaaagactttaactaggaaagtgtttattttgggctacattgttcaccttctgctgtattggtatttgtctgttggggatttcaaggggagtgtaggagaagacagaagggaaagctgaggagctgggcccgacatggtctgggacacagagttggagctggcactgaagatctccaagggacttcagagaccaataaaagcccatagggaagagagagaggatatagggaaacacgaatcccgatgtgtaatatactttggcacagcgaaaaaatggattttaaaagacaaaaatgggaggtcccgggtagatgttatttcacacagactgaaagtgagttcgggcttgtgtaaaacacatgagattggatttgaccccttggctctcaagtgtccccttagatctagaactgctccttggtggccattagatcgagtcagttttgatctgcatcacttagttattgggaatttctttgttggaaacaggaaaatttttttagattatttggtgtacggttttgctcacaacaataggtggaagttgctagtgcagtcttggtctgatggctgtgtgcatcgcacattcggcttggtgaaatccttctctaaagcctctttttgtatttttataactaaacagaggaagtcttcagaagacctcgctttaaaacaaatttgtgcaaacactgctagagtcattttgaagctcaagcattttcactttgtttcttacatgtgtacttttttgtttacttatgaaaatggccatctttaagcatatttattttctgccactttatttaaaggcaagcaatattttcttgatcataaatattttgtaatgaaatacttcctcttttccagggctttgtatgcacttgtataattacattgatggcaatgtagagtttgaatttcagtctgtaaatacttttttggaaaatagaaatttttattgctttaaagttttggatatgggtggttttcttttccgggtttggtggaaagtaatttgagaactttaaggttgtctttttaactgctggcaaaatgttgattttttaatattagataaaacgagtaaacgaaattccccagaaattagtagtaagtggggtctttgtgggttgggaagtagttttaatgtagaaagacatttacatataagtctgtttaatttcaaaggagtttgtgaaaaaaaatccatggtgaaaatgaaacaatgacatggttaatctggaacttacgttcttataccaataaaaggtacctcaat

SEQ ID NO: 142284 - DNA, 1139 bp, Homo sapiens; identical to SEQ ID NO: 122759

SEQ ID NO: 142285 - DNA, 2361 bp, Homo sapiens; identical to SEQ ID NO: 120356

SEQ ID NO: 142286 - DNA, 2664 bp, Homo sapiens; identical to SEQ ID NO: 131466

SEQ ID NO: 142287 - DNA, 969 bp, Homo sapiens
atgatcaaaaccctcagcaaaataggcatagaagggacataccttaaggtaataaaagccatctatgacaaacccacagccaacattatactgaatggggaaaagttgaaagcattcctcctgagaactggaacaacacaaggatgcccattttcaccatttctattcaacacattatcagaagttctagcgagagcaatcaaacaagagaaagaaatcaagggcatccaaatgggtaaagaggaagtcaaactgttgctttttgctgaagatatgaccgtatacctagaaaaccctaaagactcatccaaaaaactcctagaactgcctctgctgctgatacccaggcaaacagggtctggagtggacctccagcaagctccaacagacctgcagctgagggtcctgactgttagaaggaaaactaacaaacagaaaggacatccacagcaaaaccccatctgtacgtcaccatcatcaaagaccaaaggatattatccaggagaacttccccaacctagcaagacaggccagcattcaaattcaggaaatacacagaatgccacaaagatactcctcgagaagagcaactccaagacacataattgtcagattcaccaagttgaaatgaaggaaaaaattttaagggcagccagagagaaaggtcgggttacccacaaagggaagcccatcagactaacagcggatctctcagcagaaactctacaagtcagaagagagtggggaccaatattcaacattctgaaagaaaagagttttcaacccagaatttcatatccagccaaactaagcctcataagtgaaggagaaataaaatcctttacagacaagcaaatgctgagagattttgtcaccaccaggcctgccctaaaagagctcctgaaggaagcactaaacacggaaaggaacaacccgtaccagccactgcaaaaacaggccaaatcgtaa

SEQ ID NO: 142288 - DNA, 1326 bp, Homo sapiens; identical to SEQ ID NO: 121593

SEQ ID NO: 142289 - DNA, 2835 bp, Homo sapiens; identical to SEQ ID NO: 121594

SEQ ID NO: 142290 - DNA, 1677 bp, Homo sapiens; identical to SEQ ID NO: 137900

SEQ ID NO: 142291 - DNA, 3529 bp, Homo sapiens
ttaggtttttctcttctctttctgagaaactccctctcttccttccaccctcccttgcaagggggcttttccacagtcttcagaaggcagcagaaaatgttgcagtgtgatggttacaagactggcatatatttcagtattgtttgtaatgcctgaaatatttatcaaaatatacccatgacatcttctgccctcattcgataatccttgtggagcagggaatagtaatggtggcaccgaggcaaaggccccctttgcagtcactgggagtggaattggaagtggactttggtgatgttcagcaggtggatgcacagtccttggggatttatgggatgtgaggggtaaggttccagagaggggccaaggatggctcatgggtgtctggtgggacatgtgcctttcacccagaagaggcagcttgtccaagtgcgtggacactgtgttctgtagccccaggtaacttttcaagtccccaaaaccccagctggcacctccaggagaaaaaagcgccccaaactctaaagctaaaggcctctgcacatgattgcctgctagttcttcttggctctggatgagcagaagctgtctttggatgcatttgtagggtttttttggatagcttttcttgtaactgaagtactcagtaaaaaattctgtggttttgctgggtttccccactccgtccttcaccgttaggccagatcctttgtgtccaatcacatttctgtatggctgttcattcatcaaacataggtcctttgttaaattcaatttgcaaggtgctgtagtaatatctttagagagtaaagatgaaggggtcaaggactgagaggagatgcttgggcacacacgtttgtgttgggttgctttcgcctccttgtggggagctgaggggagttgctggaggtggtaatgacactggcctggtcctggggtctcttcctggctagaattatccaaactcaggtgtttaaagctttcaatctttttgtgttgattcttagatctagctgggccttctgctggacccatggtgacgaactgtgggcccttgtctccagaaagccaaaataacatcctggattctgtgaccatgcacccagcacatttccgcctccaggcctgtgccctggccgactcctcctccaggagctgtttctcagtatccttgcccacccccatcctgcccttggcctcgctggctcgttctaccccttcctgtcttggctggaacatcatctccatggaaaggcttttcctatcctccgtgttgcttttctccttttcatctccctgcccgtttccttcatagaggtaattgcttatccacctttgaccttgtagtcctccctccactggaaatgccagttctggctttgtcttaaggaccacctggacaccaagaaactccctcttccctcctatctgtctgaccaggcaaataaccctgatagagttttcgtttagacttgacaagagcactgcaaaaggcaattcttcagaaccgtggcaatcctgatgcttgatggccattggttccagtgctttttggtgctgtgctggagaagcaccattataaagcgttgctatggtgttgaattctgtctctttgaggggaaaagtcctctggtgaatgtagtgtttgttgactctgaaccagtatgagaatttctgattgagagtcttgggcagtatggccattttcacaatattgattcttcctatccatgagcatggaatgttcttccatttgtttgtgtcctcttttatttcattgagcagtggtttgtagttctccttgaagaggtccttcacatcccttgtaagttgtattcctaggtattttattctctttgaagcaattgtgaatgggagttcactcatgatttggctctctgtctgtctgttattggtgtataggaatgcttgtgatttttgcacattgattttgtatcctgagacttcgctgaagttgcttatcagcttaaggagattttgggctgagacgatggggttttctaaatatacaatcatgtcatctgcaaacagggacaatttgacatcctcttttcctaattgaataccctttatttctttctcttgcctgattgccctggccagagcttccaacactatgttgaataggagtggtgagagaggacatccctgtcttgtgccagtcttaaaagggaatgcttccagtttttgcccattcagtatgatattggctgtgggtttgtcataaatagctcttattattttgagatatgtcagatatgtcccatcaatacctagtttattgagagtttttagcataaagggctgttgaattttgtcaaaggccttttctgcttctattgagataatcatgtggtttttgtctttggttctgtttatatgatggattacgtttattgatttgagtatgttgaaccagccttgcatcccagggatgaagccaacttgatggtggtggataagctttttgatgtgctgctggatttggtttgccagtattttattgaggatttttgcatcgatgttcatcagggatattggtctaaaattctctttttttgttgtgtctctgccaggctttgatatcaggatgatgctggcctcataaaatgaattagggaggattccctctttttctattgattggaatagtttcagaaggaatggtaccagctcctctttgtacctctggtagagttcagctgtgaatctgtctggtcctggactttttttggttggtagactattaattattgcctcaatttcagaacctgttattggtctattcacagattcaacttcttcctggtttagtcttgggagggtgtatatgtccaggaatttatccatttcttctaggtgttctagtttatttgcatagaggtgtttatagtattctctgatggtagtttgtatttctgtgggattggtggtgatattccctttatcattttttattgcatctatttgattcttctctattttcttctttattagtcttgctagcagtctatcaattttgttgatcttttcaaaaaaccagctcctggattcattgatttttttgaagggtttttgtgtctctatcttcttcagttctgctctgatcttagttatttcttgtcttctgctagagatggggttttggtgtggatgtcctttctgtttgttagttttccttctaatagtcaggaccctcagctgcaggtctgttggagtttgctggaggtcctctccagaccctgtttgcctgtgtatcaccagcggaggctggccctcgctgtctgaggacaatgtccttactgcaatggagtaagctagagtccaggcagaacacagcagcttcgctgaactttgcatcctcatcgcctcttgaatgcttcccctgctcttgtccttacttgaagctctaacttcctgtttgggattgtcccaagagttcaccgatctccctgcctgcctccattctctccactgaaaccctgtccaccagctgccatcactagag

SEQ ID NO: 142292 - DNA, 993 bp, Homo sapiens
atgaaacttactgatggtggttcagaagtcaatgggaatgcatatagctatgttcaatcaagaaaccagagaagtctctcctctgctggtgatacccaggaaacagggtctggagtggacctccagcaaaatccaacagacctgcagctgagggacctgattgttagaaggaaaactaacaaacagaaaggaatagcatcaacatcaacaaaaaggacatccacaccaaaaccccatctgaaggtcaccaacatcaaagaccaaagactaaaccaggaagaatttgaatgtctgaatagaccaataacaggttctgaaattgaggcaataattaatgtcctaccaaccaaaaaaagtccaggagcagatggatttacagctgaattctaccaaagaaccaaagacaaaaaccacatgattatctcgatagatgcagaaaaggccttcaacaaaattcaacagcccttcatgctaaaaactctcggggaactaggtattgatggaatgcatctcaaaataataagagctatttatgacaaaccctcagcgaatatcattctaaatgggcaaaaactggaagcattccctttgaaaactgacacacgacagggatgtcctctctcaccactcctattcaacatagttttggaagttctggccggggatttccgtcaagagaaagaaataaagggtattcaattaggaaaagaggaagtcaaattgtctctgtttgcagatgacatgattgtgtatttagaaaaccccatcgtctcagcccaaaatctccttaggctggtaagcaacttcagcaaagtctcaggatacaaagtcaatgtgcaaaaatcacaagctttcctacacaccaataacagacaagcagaaagtcaaatcatgagtgaactctcactcacaattgctacaaggagaataaaatacctaggaatccaacttacaagggatgtgaaggacggacctcttcatggagaactatga

SEQ ID NO: 142293 - DNA, 1287 bp, Homo sapiens; identical to SEQ ID NO: 121595

SEQ ID NO: 142294 - DNA, 1122 bp, Homo sapiens; identical to SEQ ID NO: 121596

SEQ ID NO: 142295 - DNA, 678 bp, Homo sapiens
tcagtagtcattcagaagaaggttgttcagtttccatgtagttgagcggttttgcgtctgtttcttaatcctgagttctagtttgatttttgttataatttctcctcttttacatttgctgaggagtgctttacttccaactatgtggtcaattttggaataagtgcgatgtggtgctgagaagaatgtatattctgttgatttggggtggaaagttctgtagatgtctattaggtccacttggtgcagaactgagttcagttcctggatatccttgttaactttctgtctcgtgggtctgtctaatgttgacagaggggtgttaaagtctcccattattattgtgtgggagtctaagtctctttgtgagtctctaagggcttgctttatgaatctgggtgctcctgtattgggtgcatatatatgtaggataattagctcttcttgttgaattgctccctttaccattatgtaatggccttctttgtctcttttgatctttgttggtttaaagtctttggtctttgatgatggtgacgtacagatggggttttggtgtggatgtcctttctgttcattggttttccttctaacagtcaggaccctcagctgcaggtctgttggagtttgctggaggtccactccaggccctgtttgcctgggtatcagcagcggagg

SEQ ID NO: 142296 - DNA, 1059 bp, Homo sapiens; identical to SEQ ID NO: 120359

SEQ ID NO: 142297 - DNA, 924 bp, Homo sapiens; identical to SEQ ID NO: 125289
  misc_feature (1)...(924): n = a,t,c or g

SEQ ID NO: 142298 - DNA, 1485 bp, Homo sapiens
ctatacaatcatgtcatctgcaaacagggacaatttgacttcctcttttcctaattgaatgccctttatttccttctcctgcctgattgccctggccaggacttccaacactatgttgaataggagtggtgagagagggcatccctgtcttgtgcccgttttcaaagggaatgcttccagtttttgcccattcagtatgatattggctgtgggtttgtcacagatagctcttattattttgagatacgtcccatcaattcctaatttattgagagtttttagcatgaagggttgttgaattttgtcaaaggccttttctgcatctattgagataatcatgtggtttttgtctttggttctgtttatatgctggattacatttattgatttgcgtatattgaacctgccttgcatcccggggatgaagcccacttgatcatgttggataagctttttgatgtgctgctggattcggtttgccagtattttattgaggatttttgcatcaatgttcatcaaggatattggtctaaaattctcttttttggttgtgtctctgcccggctttggtatcaggatgatgctggcctcataaaatgagttagtgaggattccctctttttctattgattggaatagtttcagaaggaatggtaccagctcctccttgtacctctggtagaattcgtctgtgaatccatctgatcctggactctttctggttggtaagctactgagtattgccacaatttcagagcctgttattggtctgttcagagattcaacttcttcctggtttagacttgggagggtgtatgtgtcgaggaatttatccatttcttctagattttctaatttgtttgcatagaggtgtttgtagtcttctctgatagtagtttgtatttctgtgggattggtggtgatatcccctttatgattttttattgtgtctatttgattcttctctcttttcttctttattagtcttgctagcagtctatcaattttgttgatcctttcaaaaaaccagctcctggattcatcaattttttgaagggttttttgtgtctctatttccttcagttctgctctgattttagttatttcttgccttctgctagcttttgaatgtgtttgctcttgcttttctagttcttttaattgtgatgttagggtgtcaattttggatcttcctgctttctcttgtgggcatttagtgcgatgggattttgttgtggatgtcctttttgttgatgttgatgctatttttttctgtttgttagttttccttctaacagtcaggtccctcagctgcaggtctgttggagatggctggaggtctactccagacactgtttgcctgggtatcaccagcagaggctcttcatctgatccgacaacaagtgatgttggctctactttcaaattgtaactggactcaaagcattcctcatttattccactgtcttgtccccaagccaccat

SEQ ID NO: 142299 - DNA, 1167 bp, Homo sapiens; identical to SEQ ID NO: 125291

SEQ ID NO: 142300 - DNA, 1020 bp, Homo sapiens
tcatatcctttgcccacttttcgatggggttgttttttttcttgtaaatttaagtttcttatagattctggatattagccctttgtcagatagatagattgcacaaattttcttccattctgtaggttgcgtgttcactctgatggtagtttcttttgctgtgcagaagctctttagtttaattagatcccatttgtcaattttggcctttgttgccattgcttttggtgttttagtcatgaagtctttgcccatgcctatgtcctgaatggtattgcttaggttttcttctatggtttctatggttttaggttttacctttaagtctttaatccatcttgagtcaatttttgtagaagttgtaaggaaggggtccaatttcagttttctgcatatggctagccagttttcccaacaccatttattaaatagggaatcatttccccattgcttctttttgtcaggtttatcaaagatcagatggttgtagatgtgcggcattatttccgaggcctctgtcctgttccattggtctatatatctgttttggtgccagtaccatgctgttttggttactgtagccttatagtacagtttgaagtcaggtagcctgatgcctccagctttgttcttcttgcttaggattgtcttggcaatgcaggctcgtttttggttccatatgaaatttaaagtagttttatctaattggagttcttgtgccatggttttcagctgcatcaggtcctttaaggacttctctgcattggctattctagttagccattcgtctaatcttttttcaaggtttttaacttctttgcgttgggttccaacttcctcctttagctctttggtctttgatgatggtgatgtacagttggggttttggtgtggatgtcctttctgtgtgttagttttccttctaacagtcaggatcctcagctgcgggtctgttggagtttgctggtggtccactccagaccctgtttgcctgggtatcagcagcggaggcattgccat

SEQ ID NO: 142301 - DNA, 1596 bp, Homo sapiens
atgacccacagacgctctgaaggaagcggactgctcctgcaggacccaggagacaccccaaacactgtgagtgccccaactgtggaagtgggaaagggagaccatcctctcccaaacacatcccccaccggggaagctgaagtcctcaccatagtccagactttcatcagtgccatttcaaatgatgatagctcatataaaatggtttccttcagccctgtagaaacatttctacaacctccgctggtgatacccaggcaaacacagtctggagtggacctccagcaaactccaacagacctgcagctgagggacctgactgtcagaaggacaacgaacaaacagaaaggaatagcatcaacatcaaaaaaaaaggacatccacaccaaaaccccatctgtaggtcaccaatatcaaagaccaaacgtagataaaaccacaaagatggggagaaaccagagcagaaaagctgaaaattctaaaaaccagagtgccttttctcctccaaaggatcacagctcctcaccagtaatggaacaaagctggatggagaatgactttgacgagctgacagaagtaggcttcagaagcctggcagagacacaacaacaacaaaaagagaaatttagaccaatatccctgatgaacatcgatgtgaaaatcctcaataaaatactggcaaaccgaatccagcagcacatcaaaaagcttatccaccatgatcaagttggcttcatctctgggatgcaaggctggttcaacatatgcaaatcaataaacgtaatccatcacataaacagaaccaatgacaaaaaccacatgattatctcaatagatgcagaaaaggcctttgacaaaattcaacagcccttcatgctaaaaactctcaaaaaactaggtattgatgggacgtatctcaaaataataagagctatttatgacaaatccacagccagtatcatactgaatgggcaaaaactggaagcattccctttaaaagacaggacaagacaaggatgtcctctctcaccactcctattcaacatagcattggaagttctggccagggcaatcaggcaagagaaagacataaagtgtattcaattaggaaaagagaaagtcagattgtccctgtttgcagaggacatgattgtatatttagaaaaccccatcgtctcagccccaaatctctttaagctgataagcaacttcagcaaagtctcaggatacaaaatcaatgtgcaaaaatcacaagtattcctatacatcaataacagacaaagagagagccaaatcatgaatgaattcccattcacaattgccagaaggagaataaaatacctaggaatccaacttacaagggatgtgaaggacctcttcaaggagaactacaaaccactgctcaaggaaataaaagaggatacaaacaaatggaagaatatgccatgctcatggataggaagaatcaatatcatgaaaatggccatactggccaaggtaatttatagattcaatgccatccccatcaagctaccaatgactttcttcacagaattggagaaaactactttaaagttcatatggaaccaaaaatga

SEQ ID NO: 142302 - DNA, 456 bp, Homo sapiens; identical to SEQ ID NO: 133289

SEQ ID NO: 142303 - DNA, 728 bp, Homo sapiens
ccggaacagcctgggccccgccgccagctcctccctgggcgcgcgtccggccacctagagaagtgtggcgcgccgacctgctcacaccccagggaggaggccccgcgactggcgtctccggcggggaagaatgtgacagtcccgtggggggaaacccagggatctggaaggcttggggtcacaggagaaccagagttgctgggattgggcggcgcgggggccctggcgaggctgataagcagcctctgctggtgatactcaggcaaacagggtctggagtggacctccagcaaactccaacagacctgcagctgagggtcctgactgttagaaggaatactaacaaacggaaaggacatccacaccaaaaccccatctgtacatcaccatcatcaaagaccgaaggcagatcaatgagacagaaagttaacaaggatatccaggaattgaactctgctctgcaccaagtggacctaatagacatctacagaactctccaccccaaatcaacagaatatacattcttctcagcaccacatcacacttattccaatattgaccacatagttggaagtaaagcactcctcaacaaatgtaaaagaacagaaattgtagcaaactgtctctcagaccacagtgcaatcaaaccagaactcaggattaagaaactcactcaaaactgctcaactacatggaaactgaacaacctgctcctgaatgactactgg

SEQ ID NO: 142304 - DNA, 517 bp, Homo sapiens; identical to SEQ ID NO: 116822

SEQ ID NO: 142305 - DNA, 1045 bp, Homo sapiens
atgagcagactctatgagcagagaatggccctcagctggcagcaagcaagaaagcagggatctcagtcgtacagctgcaaggaacagtatggaaagatagaccaacaaccacaaccatgttctgtccaggaaactttgcattcagtcaaaagtgttacaaagttcagctggaagttttcttctccctgtggtcttttcccagttcctctggcatccctccccaaggatccgcgtgagacagaaatggctttcctggggactgagagagcccacagggctctttttgctgcttcttctaccccgtactttgttcggctctctaaattcttctcagctccaggcaaaagccaagatactcatttatgtagacatcagacctggggacttatgattgaaatgggaaatgcagaatgttggaatcatattcatttcatgtcaactacatgtgaagagaaacagaagtcctttaaaggggtcaacagacacctcatgcaggagagctccggctggcatctggcaggtgcccctctgggacgaagcttcccagaggaaggaaaaggcagcaatctttgctgttctgcagcctctgctggtgatacccaggcaaacagggtctggagtggaactccaacaaactccagcagacctgcagcagaggggcctgactgttagaaggaaaactaacaaacagaaaggagtagtatcaacatcaacaaaaaggacatccacacagaaaccccatctgaaggtcaccaacatcaaagaccaaaggattacaactccttgccaggaatgggaacaaaactggatggagaatgagtttgatgaattgacagaagtaggcttcagaaggtgggtaataacaaaatcctccaagctaaacaagcatgctctaacccaatgcaaggaagctaataaccttgataaaaggttagaggaattgctaactagaataactagtttagagaagaacataaacgacctgatgaagctgaaaaacacagcccaagaatttcatgaagcatacacaagtatcaatagctga

SEQ ID NO: 142306 - DNA, 1734 bp, Homo sapiens
ttaatcaatgcctagaggagatcctgtggagagggcttttgagtagcattttacttcattcattcctttggggtcagcctccagatggactcctggggctcttttagaggaagtgttcagcatattggaagaatccaggtcagcacaggaatgcgtcacaggcactgctaaatctacatctgctactttcacagagacctgccctttcagaattcccagtttctcactgagttcattcctttctatttgaagagccttgtacagcttctctaaccgctccaattttatttgaaagaccttataatttttatcacgaatagttttcttttccgtttcctgcttgaaggctgtaaaaagttcattggtttttgccatggtagtctggaattcttcaaacttatccatataaaggaaaagctgctctttcagttgtgcttcttcttgtttcatttcttcatatttgtgcctcgattctgttgcttcttttaataaaaactctctctctctctgatgtctttcatcagcttcttttatcagctgtgctgtttgttgaagtctggcatctacaagctgttgtcgtaattccttatgtttgaacgctttattaatttgctcttccctcagtgcatactggtcagtgagcttctttagcttttctcccatttccatgttctcctgctgcagtttggcattgtgtatttcatgctgttccagctgggcttgagtttcagttaaagtaatttggaaatgtgcagttacttctttaagaacttcttcctcctcttttttctgctgcatatgttcctcccaactcctgttctttgttataaagtcacggccttcttcatcttccaataaatgtttattacttgtggcactgcaatttgagtcttgatgttgaagaatatcatgtgattcagagttacacaacatatctgctttctctcttaacccacaaagtccagcttcttccattgtgctattcacaaactcccagtaggggccgactgacacctcaaacagccaggtgtccctcagagacaaagcttccagaggaacgatcaggcagcaacatttgctgttctgcaatatttgctgttctgcagcccctgctggtgatacccaggcaaacatggtctggagtggacctccagcaaactccaacagacctgcagctgagggtcctgtttgttagaaggaaaactaacaaacagaaaggacatccacaccaaaaccccatctgtatgtcacaatcatcaaagaccaaagcaaggcaggccagcattcaaattcaggaaatacagagaatgccacaaagatactcctcgagcagagcaactccaagacacataattgtcagattcaccaaagttcgaatgaaggaaaaaatgttaagggcagccagagagaaaggtcgggttacccacaaagggaagcccatcagactaacagtggatctctcggcagaaactctacaagccagaagagagtgggggccaatattcaacattcttaaagaaaagaattttcaacccagaatttcatatccagccaaactaagcttcataagtgaaggagaaataaaatcctttacaaacaagcaaatgctgagagattttgtcaccaccaggcctgccttacaagagctcctgaaggaagcactaaacatggaaaggaacaaccagtaccagccacttcaaaaacatgccaaattgtaaagaccatcaaggctag

SEQ ID NO: 142307 - DNA, 1294 bp, Homo sapiens
atggaggaagatctacgaagcaaatggaaagaaaagaaagcagaggttgcaatcctagtctctgatgaaacagactttaaaccaacaaagatcaaaagagacaaagaaggccagtgcataatgagaataaaatacctaggaatccaacttacaagggacgtgaaggacctcttcaaggagaactacaaaccactgctcaatgaaataaaagaggatacaaacaaatggaagaacattccatgctcatgggtaggaagaatcaatatcgtgaaaatggccataccgcccaagcctccgctggtgataccccagcagacagggtctggagtggacctccagcaaattccagcagacctgcagctgagggtcctgactgttagaaggaaaactaacaaagagcaaggacatccacaccaaaaccccatctgtacgtcaccatcatcaaagaccaaagaagctaaaaaccttgaaaaaagattagatgaatggctaactagaataaacagcatagagaacaccttaaaggacctgatggagctgaaaaccagggcacgagaactacgtgacgcatgcagaagcttcagtagccaattcgatcaagtggaagaaagagtatcagtgattgaagatcaaatgaatgaaatgaagaaagaagagaagtttagagaaaaaagagtaaaaagaaatgaacaaagcctccaagaaatatgggactctgtgaaaagaccaaatctgcatctgattggtgtacctgaaagtgacggggagaatggcatcaagttggaaaacactcttcaggatattatccaggagaacttccccaatctagcaaggcaggtcaacattcaaattcaggaaatacagagaacgccacaaagatactcctcgaggagaggaactccaagacacataattgtcagattcaccaaagttgaaattaaggaaaaaatattaagggcagccagagagaaaggtcgggttacccacaaagggaagcccatcagactaacagcggttctcttggcagaaactctacaagccagaagagagtgggggccaatattcaacattcttaaagaaaagaattttcaacccagagtttcatatccagccaaactaagcttcataagtgaaggagaagtaaaatcctttacagacaagcaaatgctgagagattttgtcaccaccaggcctgccttacaagagctcctgaaggaagcgctaaacatggaaaggaacaaccgataccaactactgcaaaaacatgccaaattgtaaagaccatccaggctag

SEQ ID NO: 142308 - DNA, 814 bp, Homo sapiens; identical to SEQ ID NO: 117237

SEQ ID NO: 142309 - DNA, 2957 bp, Homo sapiens
atggtcagagcaggaagaggaaagggtaaaatttatttcctcctggaggactggcataaacgaaaggcaggtgtttatagaagaacagctgcattatgcaggaaggacagtgactacccttactttgcaacaagtgcaaaagatgccacaaatgtggcagcagcctttgaggatggggttcaaaaaattcttgtgactgtggatatgtcagatcacttgatgaacacaggcatgcctccgctgctgatacccaggcaaacagggtctggattggacctccaacaaactccaacatacctgcagctgagggtcctgactgttagaaggaaaaataacaaacagaaagaaatagcaccaacatcaacaaaaaggacatctacaccaaaaccccatcagtacatcaccatcatcaaagaccaaagaatatacattcttctcagtacaacaccacacctattccaaaattgaccacatagttggaagtaaagcagtcctcagcaaacgtaaaacaatagaaattataacaaactgtctcccagaccacagtgcaatcaaactagaactcaggattaagaaactcactcaaaaccacaaaactacatggaaacagaacaacctgctcctgaatgactactgggtacataacaaaatgaaggcagaaataaagatgttctttgaaaccaacaagaacaaagacacaacatacaagaatctctgggacacagttaaggcggtgtgtagagggaaatttatagcattaaatgcccacaagagaaagcaggaaagatccaaaattgacaccctaacatcacaattaaaagaactagagaagcaagagcaaacacattcaaaagctagcagaaggcaagaaataactaagatcagagcagaattgaaggagatagagacacaaaaaaccgttcaaaaaatccatgaatccaggagctggttttttgaaaagatcaacaaaattgatagaccactagcaggactaataaagaagaaaagagagaagagtcaaaaagatgcaataaaaaatgataagttggatatcaccaccgatcccacagaaacacaaactaccatcagagactaccataaacacctctacgcaattaaactagaaaatctagaagaaatggataaattcctcgacacatacactctcccaagactaaaccaggaagaagttgaatccctgaatagaccaataacaggctatgaaattgaagcaataattaatagcttaccaaccaaaaaaaagtacaggaccagacggattcacagccgaattctatcagaggtacaaggaggagctggtaccattccttctgaaactattccaatcaatagaaaaacagggaaccctccctaactcattttatgaggccagcatcatcctgataccaaagcctggcagagacacaaccaaaaaagagaattttagaccaatatccctgatgaacatcgatgcaaaaatcctcaataaaatactgacaaaccgaatccagcagcacatcaaaaagcttatccaccatgatcaagtgggcttcatccatgggatgcaaggctggttcaacatacgcaaatcaataaatgtaatccagcatataaacagaaccaacgacaaaaaacacatgattatctccatagatgcagaaaaggcctttgacaaaattcaacaacccttcatgctaaaaactctcaataaattagggacatggatgaagctggaaaccatcattctcagcaaacgatcgcaaggacaaaaaaccaaacaccggatgttctcactcatagtaaatattatccctaccataaagatactaattaagcaaaacatgacagcaatggaaactctctgtccaatatttaagttagaaggtgataccatggataaccctattgcaaatagaagagtgaggacagcagttcccacaagtgtggtgtgcctccacgtgggcacagagccagaagcaagactgccacatgggcctatgatcacggcacaaagtccttttggacagtgcctccctggagttgtggggcagttcaggaagagagaggatctcaagaaagaaggacatactaaactcctgtcaaaaaaggaagccaggcctcagactgggctcaggacttgggctctggattcaggcaccaaaggcacagatgagggagagccaccgctgctgatacccaggcaaacagggtctgcagtggacctccagcaaattacaacagacctgcagctgagggtcctgactgttagaaggaaaactaacaaacagaaaggacatccacaccaaaaccccacctgtacgtcaccatcatcaaagaacaaagaaaaagagggaatcctccctaactcattttatgaggccagcatcatcctgataccaaagcctggcagagacacaaccaaaaaagagaattttagaccaatatccctgatgaacatcgaagcaaaaatcctcaataaagtactggcaaaccgaatccagcagcacatcaaaaaccttatccaccatgatcaagtgggcttcatccatgggatgcaaggctggttcaacatacgcaaatcaataaacgtaatccagcatataaacagaaccaatgacaaaaaccacattattatctcaatagatgcagaaaaggcctttgacaaaattcaacaacccttcatgctaaaaactctcaataaattaggtattgatgggacgtatctcaaaataataagagctatttatgacaaacccacagccaatatcatactgaatgagcaaaaactggaagcattccctttgaaaaccggcacaagacagggatgccctctctcaccactcctattcaacatagtgttggaacttctggccagggcaatcaggcaggagaaggaaataaagggtattcaattaggaaaagaggaagtcaaattgccctgtttacagatgacatga

SEQ ID NO: 142310 - DNA, 3212 bp, Homo sapiens
  misc_feature (1)...(3212): n = a,t,c or g
gcactcacagctcagcaaggcctactgcctttataaactccacccctgcggcaggtcatagctgaataaaaggcagcagaaacttcttcagacttaaacatccctgtctgacagccctgaagagagcagtggttctctcagcaaggcatttgaaaaaaaaggggnncccnctttgnaagaaatggacagactgcctcctcaagcgggtccctgacccccaggtagcctgactgggaaacccctgccagtaggggctcacggacacctcaaacaggcaggtgcccctccgggatgaaccttccagaggaaggatcaggcagcaatatttgctgttctgcaatatttgctgttctacaatatttgctgttctgcagcctccgctgctgataacccaggcaaacagggtctggagttgacctccagcaaactccaacagacttgcagctgagggtcctgactgttagaaggaaaactaacaaacagaaaggaatagcatcaacataaacaaaaaggacaactcataccaaaactccatctgtaggtcaccatcatcaaagacgaaaggtagataaaaccacaaagatcggggagaaaccagagcagaaaagttgaaaattctaaaaataagagcacctcttctcctccaaaggaaagcagctcctcgccagcaaaggaacaaagctggacggagaatgactttgacaagttgagagaagaaggcttcagaagatcagtaataacaaacttctccgagctaaaggagcatgttcgaacccatcgcaaagaagctaaaaaccttgaaaaaagattggacgaatggctaactacaatagacagcacagagaagaccttaaatgacctgatggagcagaaaaccatggcacaagaactatgtgaaaaatgtgcaagcttcagtagctgattcaatcaactggaagaaagggtatcagtgattgaagatcaaatgaatgaaatgaagcgagaagagaagtttagagaaaaaaagatgctggaagttctgcccagggcaatcaggcaggagaaagaaataaagggtattcaattaggaaaagaggaagtcaaattgtccctgtttgcagataacatgactgtatatttagaaaaccccatcatctcagcccaaaatctccctaagctgataagcaacttcagcaaagtctcaggatataaaatcaatgtgcaaaaatcacaagcattcctatacaccaataacagacaaacagagagccaaatcatgagtgaactctcattcacaattgcttcaaagagaataaaatacctaggaatccaacttaaaagggatgtgaaggaactcttcaaggagaactgcaaaccactgctcaaggaaataaaagaggacacaaacaaatggaagaacattccatactcatggataggaagaatcaatatcgtgaaaatggccatacagcccaaggtaatttatagattcaatgctatccccatcaagctacccataactttcttcacagaattggaaaaaaaaactactttaaagttcacatggaatgaaaaaagagcccacattgccaagacaatcccaagccaaaagaacaaagctggaggcatcacactacctgatttcaaactgtactacaaggctacagtaaccaaaacagcatggtactggtaccaaaacagagatatagaccaatggaacagaacagagccctcagaaataatgctccatatctacaactatctgatctttgacaaacctgagaaaaacaagcaatggggaaaggattccctatttaatatatggtgctgggaaaactggctagccatatgtagaaagctgaaactggatcccttccttacaccttatacaaaaattaattcaagatggattaaagacttaaatgttagatctaaaaccataaaaaccctagaagaaaacctaggcaataccattcaggacataggcatgggcaaggacttcatgtctaaaacaccaaaagcatatggcaacaaaagccaaaattgacaaatgggatctaattaaactaaagagcttctgcacagcaaaagaaactaccgtcagagtgaataggcaacctacagaatgggagaacatttttgcaatctacttatctgacaaagggctaatatccagaatctacaaagaactcaaacaaatttacaagaaaaaagcaaacaaccctattaaaaagtgggcaaaggacatgaacagatacttctcaaaagcagacatacatgaggctgatgaacatatgaaaaaaagctcaacatcactgatcattagagaaatgcaaatcaaaatcacgctgagataccaacttgcaccagttagaatggcaattactaaaaagtcaaaaaacgacatgctgactggaacaagacaagaatgcccacttttactgctgtttttcaatatagtagtggaagtaatgtctggagcaattagacaagagaaagaaataaagggcatccaaattgaaaagcctccgctggtgatacccaggcaaacagggtctggagtggacctccagcaaactccaacagacctgcagctgagggtcctgaccgttagaaagaaaactaacaaacagaaaggacatccataccaaaaccccatctgtacgtcaccaccatcaaagaccaaaggtgtgaacgccatgctgaggaaagtggccgtagcggctgcgtccaagccgcacgtggagatccgccaggacggggatcagttctacatcaagacatccaccacggtgcgcaccactgagatcaacttcaaggtcggagaaggctttgaggaggagaccgtggacggacgcaagtgcaggtttttcgatatgcttcgtgatctgctcaagaacgttgatcttaaagggttcgagcctgatgtacgtattttgcttaccaaatacagcaatagtaatggctctcagtccccgtggatggaggagcaaattcgggatgcctggggaagcatggttctaaaaaatgttgtacgtgaaacggatgaagttggtaaagtgccgcaagccaaaggcaacaatgtggttatcacaagtcttatgacaaacagaggcttcttcgaggagggggaggcaacatttgcgccaagcttcttaatgaacatcaaaggcaataaaacatccgttgtcaaaaacagcatcctggagcaaggacagctgacagtcaactaa

SEQ ID NO: 142311 - DNA, 556 bp, Homo sapiens
ggaattccagagcccggagctttctggggcctcgtgtttggcctgggagtggggcttctgcgtatgatcctggagttctcatacccagcgccagcctgtggggaggtggaccggaggccagcagtgctgaaggacttccactacctgtactttgcaatcctcctctgcgggctcactgccatcgtcattgtcattgtcagcctctgtacaactcccatccctgaggaacagctcacacgcctcacatggtggactcggaactgccccctctctgagctggagaaggaggcccacgagagcacaccggagatatccgagaggccagccggggagtgccctgcaggaggtggagcggcagagaactcgagcctgggccaggagcagcctgaagccccaagcaggtcctggggaaagttgctctggagctggttctgtgggctctctggaacaccggagcaggccctgagcccagcagagaaggctgcgctagaacaaaagctgacaagcattgaggaggagccactctggagacatgtctgcaacatcaatgctgtcc

SEQ ID NO: 142312 - DNA, 606 bp, Homo sapiens; identical to SEQ ID NO: 137765

SEQ ID NO: 142313 - DNA, 352 bp, Homo sapiens
ccaggagtaagaggagcccagggtggtccctctatccccaggcagtgtgaagagtctgctattggtcctaaatttgcttggatcatctcttcctttcactggaagcaaggcatgttcaacatggaggctccttcttcccttttctttgtcaacatgtgtgcagtaaagaagcagacaacctggggccggccagacagaggattcatctggcagccattcccagagcccctggaactctggcccaaggctctctgactgactccttcccagatcttctcggattagcggctgaagactgacgctgcccgatcgcctcggaagccccctgcacccaggtgatataaacagccat

SEQ ID NO: 142314 - DNA, 938 bp, Homo sapiens
tgattcttcagttacttcaggccatctgggcatatacgtgcaagtcacaggggatgcgatggcttggcttgggctcagaggcctgacattcctgccgtcttatattaataagaaaaataaaacaaaatagtgttgaagtgttggggtggcaaaaatttttggggggtgatatggagagagaatgggcgatgtttctcagggctgcttcyagcgggattaggggcgccgtgggaaccttccactgtgagagttacccgaagctcggcatccgtgatggtctagggggcttcaaccgaggcgatcgggcagtgtcagtcttcagccgctaagccgagaagatctgggaaggagtcagtcagagagccttgggccagagttccaggggctctgggagtggctgccaggtgagatgaacagtccgattttcggtggggtcccacacagatgggacgtggcttaggaggaataccgtgctgtgggcattccttggcccagtggcagatttccagcatgtgtagcaagctccagcatcccaaagctgaagacactgaagctgatcccttcagcatcccaaagctgaagacactgaagctgatcccttcagcatcccaaagctgcggcaaccagccagttatctgcacaccgttgcaggcgagatcaatttccatactctgccccggctggcgacaggcaatgactctgtcggcaagctgctgcatctcctggcactgtgtttcccagaaaatttcaccaaaagcgccatacggtaaatcccctgccgctcggaagcggcggaacaagcgttcggcatcatcctgctcaaccagtgcattcaataatggttgggacttttttaagaaaaccttccaattggccccgttgtagggaaaaatgtttgaaaaagttattttccggcctaatgaaatacaaaattccat

SEQ ID NO: 142315 - DNA, 2259 bp, Homo sapiens
atggaataccaggcgtccgaggtgatcgggcagcgtcagtcttcagccactaagccaggaagatctgggaaggagtcagtcacagagccctgggccagagttccaggggctctgggagtggctgccaggcagatgcaccccaagtcaataatcacattcagagagataaatggggagtacactggggctgtggattttcccaggctaggagtccgtgcttctgaggaaacagcgctcagagagctgaagatgagcaaggagctggcagcaatggggcctggagcttcaggggacggggtcaggactgagacagctccacacatagcactggactccagagttggtctgcacgcctacgacatcagcgtggtggtcatctactttgtcttcgtcattgctgtggggatctggtcgtccatccgtgcaagtcgagggaccattggcggctatttcctggccgggaggtccatgagctggtggccaattggagcatctctgatgtccagcaatgtgggcagtggcttgttcatcggcctggctgggacaggggctgccggaggccttgccgtaggtggcttcgagtggaacgcaacctggctgctcctggcccttggctgggtcttcgtccctgtgtacatcgcagcaggtgtggtcacaatgccgcagtatctgaagaagcgatttgggggccagaggatccaggtgtacatgtctgtcctgtctctcatcctctacatcttcaccaagatctcgactgacatcttctctggagccctcttcatccagatggcattgggctggaacctgtacctctccacagggatcctgctggtggtgactgccgtctacaccattgcaggtggcctcatggccgtgatctacacagatgctctgcagacggtgatcatggtagggggagccctggtcctcatgtttctgggctttcaggacgtgggctggtacccaggcctggagcagcggtacaggcaggccatccctaatgtcacagtccccaacaccacctgtcacctcccacggcccgatgctttccacattcttcgggaccctgtgagcggggacatcccttggccaggtctcattttcgggctcacagtgctggccacctggtgttggtgcacagaccaggtcattgtgcagcggtctctctcggccaagagtctgtctcatgccaagggaggctccgtgctggggggctacctgaagatcctccccatgttcttcatcgtcatgcctggcatgatcagccgggccctgttcccagacgaggtgggctgcgtggaccctgatgtctgccaaagaatctgtggggcccgagtgggatgttccaacattgcctaccctaagttggtcatggccctcatgcctgttggtctgcgggggctgatgattgccgtgatcatggccgctctcatgagctcactcacctccatcttcaacagcagcagcaccctgttcaccattgatgtgtggcagcgcttccgcaggaagtcaacagagcaggagctgatggtggtgggcagagtgtttgtggtgttcctggttgtcatcagcatcctctggatccccatcatccaaagctccaacagtgggcagctcttcgactacatccaggctgtcaccagttacctggccccacccatcaccgctctcttcctgctggccatcttctgcaagagggtcacagagcccggagctttctggggcctcgtgtttggcctgggagtggggcttctgcgtatgatcctggagttctcatacccagcgccagcctgtggggaggtggaccggaggccagcagtgctgaaggacttccactacctgtactttgcaatcctcctctgcgggctcactgccatcgtcattgtcattctcacacgcctcacatggtggactcggaactgccccctctctgagctggagaaggaggcccacgagagcacaccggagatatccgagaggccagccggggagtgccctgcaggaggtggagcggcagagaactcgagcctgggccaggagcagcctgaagccccaagcaggtcctggggaaagttgctctggagctggttctgtgggctctctggaacaccggagcaggccctgagcccagcagagaaggctgcgctagaacagaagctgacaagcattgaggaggagccactctggagacatgtctgcaacatcaatgctgtccttttgctggccatcaacatcttcctctggggctattttgcgtga

SEQ ID NO: 142316 - DNA, 422 bp, Homo sapiens
tatttcgtcttggtcacggccggcggcggacagagccgcggaggaaccgcgagaccccagggcccagagcaggtccagccacccgtctggctccgtagtccgcgaagtctgcagtaaaggagccgcgtgggaccggggccgaagtccctagggcctggcaccgcgtgcccctctctcgggccctcggcttgggggtctcgcagcgccctgccgtcgtgcaccccacactgcccccatttctacaggggcccacctggtcaccacaccctcttggtccacccgcggatctcagcgtgtggctgacctctggccagcatggtgcagccgcagacgtccaaagctgaaagcccagccttggcagcgtctccgaatgcccagatggatgacgttattgacaccctgacctccctgcgcctcaccaa

SEQ ID NO: 142317 - DNA, 735 bp, Homo sapiens
caaagtccagtcaaattctttattatacaacgtgagtttactgacttgaacagaaagagggagcaagagaagcattctaggaaacaggtgtctaaaaagaatccaaagttcaagcaccttcctattctagcagcatccgccctgatccagcatggcggcaagagcttctgccagttcacagcctgactacacggcaggcgcctttccggaaccgcccgctgggtagattaaatttctccggcgccctgtaatgacacacacacaaaaaaaacccgggcgcgccttgtaagagaaaagaatttgaagtgagtatttaaacttattttataaaagtacttccctaattgttagtgtgttattatacagaagagaaatgtgattcactagaagaactcacaggagtcagtatatggccatacttgtggcaagctcttttatggcaaaagaatacaaagcagtgtcagcaaagggaaaaggtgcttgggaagcagtctggaggaacccaggtagaagcttccaagagtcgtcccccagtggagtcacacaggatgcactgaattccccttgtgacaagttatactcttcccaaatgtagagacacaatgcgggacagcctcagccaggttctccagagatgtgagtcagcaattcttttttaattgcttttcatttcaaatgaatgctacaccaaaatgtattttcttggcaagcctagctcttctgcctccagagctc

SEQ ID NO: 142318 - DNA, 499 bp, Homo sapiens
ctggtcgggatgagtggtggagggacagagacccctgtgggttgtgaggccgccccgggcggtggcagcaagaagagggactccctggggactgcgggctcagcgcacctcattatcaaggatcttggagaaattcattcaaggcttttggatcacagaccagttattcaaggtgaaactcgttattttgtaaaagaatttgaagaaaaacgtggtcttcgagaaatgcgagttcttgaaaatttgaagaacatgatccatgaaacaaatgaacatactcttcccaaatgtagagacacaatgcgggacagcctcagccaggttctccagagattgcaagcagctaatgactcagtctgtagactccaacagagggaacaggaacgaaaaaaagattcatagtgaccactttagtagctagttgagaaacagcatatgctccagtgggacaacttcatgaaggagcaacccaacaaaagggctgaagtggatgaagagc

SEQ ID NO: 142319 - DNA, 525 bp, Homo sapiens
tgcccacctcacagcaagcgtggcggcccaacactaggttttttaaaaactgtgactatcagtgttttaaaaattgcccggtaactctagacttcaaaagtgggataagtaatgataaaccaataataaacttaggagaagcatagtctgctttagttatattgttatgccatattatggtcagtaacacgagtaaaggcctaattcatctgctttctaaattgggttcctgtaccttttcctagaaaagccctacatgtatataccttagttaccagctgcacttctcccattaccttatttttaggaaggttatagagatggaatagatgctggcaaagcagttactcttcaacagggcttcaatcaaggttataaggaaggtgcagaagtcattttaaactatggacgactccgaggaacattgaggtaatttttaaagtgtaaatgctgaatcattttaacctcaatactactggaggatgtttctgtataaataaagtgtttaaactgaaaaaaaaaaaa

SEQ ID NO: 142320 - DNA, 1164 bp, Homo sapiens
  misc_feature (1)...(1164): n = a,t,c or g
atggtgaaggtcgtgccggccacgcgaggaaatctgcctcgctcacaactcacaggcacacatcaacactgccaaccgagggagcccaaaatcaccgcaagcgaaaggctccggcggcggccacgggccacagcccgcctccgcgcacacgcagcccctcccgagcctccactcgccgtcttcgccccgccttcggaccggaaggagttgttggcgcttccggtggcctgcgaccccgtaattgcctcggtgatgtcgtgggttcaagcagcctccttgatccagggccctggagacaaaggggacgtgtttgacgaagaagcagacgagtcgctcctggcgcagcgggaatggcagagtaacatgcaaagacgagtcaaagaaggttatagagatggaatagatgctggcaaagcagttactcttcaacagggcttcaatcaaggttataagaaaggtgcagaagtcattttaaactatggacgactccgaggaacattgagtgctttgctctcctggtgtcaccttcataataataattcaactttgatcaataaaataaacaatcttctggatgcagttggccagtgtgaagagtatgtgctcaaacatctgaaatcaatcactccaccgtcccatgttgtagatttattggactccattgagggatatggaccctttggtcatgtagttccagctgagaaaaaggattgatgaagctaaagatggaaagactctgtggaaaataatgctgagtttaaccaaaactggtagccaagagcccatagtggggatagattgttccatatgtagaaatgttgtagaacacaggagcatgcacattcaggaaaacccaagccccacatggattttggaacagacagccagttttagttaaacagctgggcctatcagtagatgtattacaacacctcaaacaactataaaattatccttcccttttctaatgaaaataatgttcagaacatttggtttccctaccaatcgaaatttgtactggttttctgcatcaaaccacctcaactgtagggttaccccntttatggaagtttgaaattancacactattgttcttcaaaattacacaccctattaaatgtaatataagcctttaaaaaaaaaaccaaaaaaagggcggccgct

SEQ ID NO: 142321 - DNA, 735 bp, Homo sapiens
tcaaagtccagtcaaattctttattatacaacgtgagtttactgacttgaacagaaagagggagcaagagaagcattctaggaaacaggtgtctaaaaagactccaaagttcaagcaccttcctattctagcagcatccgccctgatccagcatggcggcaagagcttctgccagttcacagcctgactacacggcaggcgcctttccggaaccgcccgctgggtagattaaatttctccggcgccctgtaatgacacacacacaaaaaaaacccgggcgcgccttgtaagataaaagaatttgaagtgagtatttaaacttattttataaaagtacttccctaattgttagtgtgttattatacagaagagaaaagtgattcactagaagaactcacaggagtcagtatatggccatacttgtggcaagctcttttatggcaaaagaatacaaagcagtgtcagcaaagggaaaaggtgcttgggaagcagtctggaggaacccaggtagaagcttccaagagtcgtcccccagtggagtcacacaggatgcactgaattccccttgtgacaagtcatactcttcccaaatgtagagacacaatgcgggacagcctcagccaggttctccagagatgtgagtcagcaattcttttttaattgcttttcatttcaaatgaatgctacaccaaaatgtattttcttgccaagcctagctcttctgcctccagagct

SEQ ID NO: 142322 - DNA, 499 bp, Homo sapiens; identical to SEQ ID NO: 142318

SEQ ID NO: 142323 - DNA, 723 bp, Homo sapiens
ggcacgagtgaagacaaggggtaacaccccaaaatatggactcattttccactccaccttcattggccgagcagctgccaagaacaaaggccgcatctcccgatacctggcaaacaaatgcagtattgcctcacgaatcgattgcttctctggtatgggtgggggggcgttggcaggtgtgagaaggggctgggtggctgggtggggaggcttgcaaccatagcttccacaatgatggcaatatttttcgtcaacagcagttcacctagtgagtgttgagactctgggtctgagtgaagctgagggtagagggaacacagggttggggtagtttctctctttgggctgacaggctttgtcacccacacacatccagaggtgcccacgagtgtattcggggagaagcttcgagaacaagttgaagagcgactgtccttctatgagactggagagataccacgaaagaatctggatgtcatgaaggaagcaatggttcaggtcagttgggctttgctgggtgtggagtggcatagctagctgttggaggtgatgaactgtctgagcctgaccttgtagaatggaggcaaaaaaactgatttaatgagcctgatccaataaagccagaaaggagtcctcagagcaccagaagtcttcaggcccttttagcacttttctttgaccaggcagaggaagcggctgctgagattactaggaagctggaga

SEQ ID NO: 142324 - DNA, 5027 bp, Homo sapiens
atggggtttcaccatgttggccacgctggtctcgaacacctgacctcaggtgacaggctgggaaggagatcctcaagcaagcgggctctcaaagccgaggggaccccaggcaggcgcggagctcagcgaagccagaaggagcgcgccgggggcagcccaagcccggggtctccccggaggaagcaaacagggcgcaggagacacagagaagagctgggggagcaggagcggggcgaggcagagaggacctgcgagggcaggagaaagcgcgacgagagggcctccttccaggagcggacagcagccccaaagagggaaaaggagattccgaggagggaggagaagtcgaagcggcagaagaaacccaggtcatcctccttggcctccagtgcctctggtggggagtccctgtccgaggaggaactggcccggatcctggagcaggtggaagaaaaaaagaagctcattgccaccatgcggagcaagccctggcccatggcgaagaagctgacagagctcagggaggcccaggaatttgtggagaagtatgaaggcgccttgggaaaggggaaaggcaagcaactatatgcctacaagatgctgatggccaagaaatgggtcaaatttaagagagactttgataatttcaagactcaatgtatcccctgggaaatgaagatcaaggacattgaaagtcactttggttcttcagtggcatcgtatttcatctttctccgatggatgtatggagttaaccttgtcctttttggcttaatatttggtctagtcataatcccagaggatgtctacgtgatccctgaggaaccctcagttatgctgcaggagctggctggcaaggccccactggatgacaagtttatgtacttctcttccaacactggatcctacggtctaggttttgaccaaggctacaattatcttgaggctgaactgaagaagatccgcttccaagctcactcacatggctactggcagatctcagaagatacaatttcaagcttactcacgtggcttctggcaggcctcagaaaatctgcttccaaccttacttatgtggctgttcccaaggttcagggctatatcaagtactctgcactcttctatggctactacaacaaccagaggaccatcgggtggctgaggtaccggctgcctatggcttactttatggtgggggtcagcgtgttcggctacagcctgattattgtcattcgatcgatggccagcaatacccaaggaagcacaggcgaaggggagagtgacaacttcacattcagcttcaagatgttcaccagctgggactacctgatcgggaattcagagacagctgataacaaatatgcatccatcaccaccagcttcaaggaatcaatagtggatgaacaagagagtaacaaagaagaaaatatccatctgacaagatttcttcgtgtcctggccaactttctcatcatctgctgtttgtgtggaagtgggtacctcatttactttgtggttaagcgatctcagcaattctccaaaatgcagaatgtcagctggtatgaaaggaatgaggtagagatcgtgatgtccctgcttggaatgttttgtccccctctgtttgaaaccatcgctgccctggagaattaccacccacgcactggactgaagtggcagctgggacgcatctttgcactcttcctggggaacctctacacatttctcttggccctgatggatgacgtccacctcaagcttgctaatgaagagacaataaagaacatcactcactggactctgtttaactattacaactcttctggttggaacgagagtgtcccccgaccacccctgcaccctgcagatgtgccccggggttcttgctgggagacagctgtgggcattgaattcatgaggctgacggtgtctgacatgctggtaacgtacatcaccatcctgctgggggacttcctacgggcttgttttgtgcggttcatgaactactgctggtgctgggacttggaggctggatttccttcatatgctgagtttgatattagtggaaatgtgctgggtttgatcttcaaccaaggaatgatctggatgggctccttctatgctccaggcctggtgggcattaatgtgctgcgcctgctgacctccatgtacttccagtgctgggcggtgatgagcagcaacgtaccccatgaacgcgtgttcaaagcctcccgatccaacaacttctacatgggcctcctgctgctggtgctcttcctcagcctcctgccggtggcctacaccatcatgtccctcccaccctcctttgactgcgggccgttcagtgggaaaaacagaatgtacgatgtcctccaagagaccattgaaaacgatttcccaaccttcctgggcaagatctttgctttcctcgccaatccaggcctgatcatcccagccatcctgctgatgttcttggccatttactacctgaactcagtttccaaaagcctttcccgagctaatgcccagctgaggaagaaaatccaagtgctccgtgaagttgagaagagtcacaaatctgtaaaaggcaaagccacagccagagattcagaggacacacctaaaagcagctccaaaaatgccacccagctccaactcaccaaggaagagaccactcctccctctgccagccaaagccaggccatggacaagaaggcgcagggccctgggacctccaattctgccagcaggaccacactgcctgcctctggacaccttcctatatctcggccccctggaatcggaccagattctggccacgccccatctcagactcatccgtggagacagggcctgggcctgggcctgggcctgcgcctgcgcctgcgcctgccctgggaacgggttccggcagacgctgaggttgcgttgacgctcgcgccccggctcccgttccaggtgctgttgcacgtgtctgtttgagcacgcaggtcggctacacgcatgctggcgctgaaaggaagtggaggagatcagtctgctgcagccgcaggtgggaggagtccgtgctcaacctggggcaaattccacagcatcagttcgtctggtggccttttgtccctttgcctcatcccaggttgccttggaaaatagccaacgccgtgtctgaaaggggttgttcatgaggacctccgcctgctcttggaagacccacctgccgtccaaaaagaagaaaagtactcttggggagttgggggatcccaaagattggtgccgcaatacaggaaggagttagggtacaacttgccagactggaaggaatcatagctgagattcctgcgaggagttcgtctgcactttccacaaatctgggttgaaagggtctgaaccgattctgtcagctttgtaaagcacaagctggggcttgggacacagctattcccggtgccaaaagttaagtttaatgtgaacccgggtggacaatatgatcatccagtccattagcctccctggaccaagctggataaaggacatcaataccttctctaatgccgtgtcaagggagtggtacggggtaatcactttccggagcttggttgaagatcatcaaccgacaatgccacatactgccgtcttgcccagttttattggaaaccgaaggagacttgaatgaggacaagcatggagaagctggaggagctgacaatggatggggcccaaggctaaggctattctggatgcctcacggtcctccatgggcatggacatatctgccactgacttgataaacatcgagagcttctccagtcgtgtggtgtctttatctgaataccggccagagcctacacacttacctgcgctccaagatgagccaagtagcccccagcctgtcagccctaattggggaagcggtagggtgcacgtcttcatcgcacatgcttggcagccttcaccaacctgggccaagtattccagcattccacagtgcaagatcttgggggctgaaaaggccctgttcagagccctgaagacaaggggtaacaccccaaaattatgggactccattttcccactccacccttcattgggccgagcagctgcccaagaactaaaggcccgcatctccccgataccctggcaaacaaatgcagtattgccctcacgaatccgattgcttctctggctttgtcacccacacacatccagaggtgcccacgaagtgtattcggggagaagcttcgagaacaaagttgaagagcgactgtccttctatgagactggagagataccacggaaagaatctggatgtcatgaaggaagcaatggttcaagcaagaggcagaggaagcggctgctgaggattactagggaagctggagaaacaggagaagaaacgcttaaagaaggaaaagaaccgggctggcttgcactttgcccctcgcgtcttcaggaaaccagcagttagttcctccagaggagttgttgaggaagacgagtgaaaacccccaaaaaggaaggaaaaagccaaaagccccccaggaggtttccttcagggagaatgggaattgggaagaccccattctatcttcttttctcccaaaaccccaaggaaaaagaaatctttttcccaaggaggagttgatgagttagcgatccttgaagagacccgctggcagcacccagttattcccaagaggaagaagtctacacccaaggaggaaacagttaatgaccccttggaaggcaggccacaaaaagtggctccaagaaaaaggaggaaattctccaaaggaggagccggtcaagcagtgggcctgaagagccggttggcaagagcagctccaagaagaagaaaaagttccataaagcatcccaggaagattagaatgcaaatggacattctctgggaggtggggcataccatagcccaaggtgctcatttcccaccctgtgcccgtgttccccaataaaaacaaattcacaagaaaaaaaaaaaaaaaaaaaaaattcctgaggccgcaagggaattc

SEQ ID NO: 142325 - DNA, 461 bp, Homo sapiens
ttgcttttaatttttttaaatttattttaaagtcagggtctcagtatgttgtgcaggctagtcttgaattcctgggctcaagtattccttcagcctcagcctccctgctgtgtagctgggactaaacatgcatgccaccaagctgggattcgaagactggacggctccccggcggctcagcggcggggcgcgagcgctgcccatgcagcccgtggcggcgtttccccggcggcgctaccgcagcgggaaggcggagcaggctcgaggcctggccgaattgcgggcaggcggtatgctagcccgccactcggctgcgcggcacctgttgcggaggactactgagggggcatctggccgcaagctcaccggaggcgcctccccaactgaagatctcggtccatctcagggtggcctctgactctccgacccggcgctggtgcaggctgcatgagaagctctgg

SEQ ID NO: 142326 - DNA, 544 bp, Homo sapiens
gtgatgtcaatatttttattaggtatggcctctggtgttttcttagtccatttgggttgctatagcaaaataccaaagatactggacaggtaataaacaacagacatttattgcccacagttctggagactggaagtccagtatcaagatgcggcagattcaatgtctggtggggacccactttctcattcatagacagagccttccctctgtgtcctcacactgtggaaggagcaagcgagctctctggaatcctttttgtaggagtgctcatcccattcatgaggctccactctcatgacctcatcacctcccagaggctccacctgaaactcatttgatttggagatttaaagagtagctgtagggcatgttgtacaacttttagaaactttccgaaatgttagctgcatttcattatttaaccctccacttccatcttccaatcatctcttcggaacatgctgtggtgggattcgaagactggacggctccccggcggctcagcggcggagcgcgagcgctgcccatgcagcccgtggcg

SEQ ID NO: 142327 - DNA, 356 bp, Homo sapiens
taatttttttaaatttattttaaagtcagggtctcactatgttgtgcaggctagtcttgaattcctgggctcaagtattccttcagcctcagcctccctgctgtgtagctgggactaaacatgcatgccaccaagctggcgctaccgcagcgggaaggcggagcaggctcgaggcctggccgaattgcgggcaggcggtatgctagcccgccactcggctgcgcggcacctgttgcggaggactactgagggggcatctggccgcaagctcaccggaggcgcctccccaactgaagatctcggtccatctcagggtggcctctgactctccgacccggcgctggtgcaggctgcat

SEQ ID NO: 142328 - DNA, 1779 bp, Homo sapiens
atgacaactaaaggcaacgtgggatcctggatgggatcctgggacagcaagggaacattattggaaaaatctccagcttgctcagtagtcccccaacaatgccacactactctggccacatggactctggtgaaccaactcaaagcactgcagccaggtgcacgaccctgctccaatcatacatgtgatgacagggtcccagtgtgggaaggagaagaatgtcccagcctgacccaaggcccacacagcagctctgtcggctgggaaggcctgcaggctgcaaggccgcgcgaatgccccgggccagccccaaccactgtccctaggccagcggcgtctcttactgggattcgaagactggacggctccccggcggctcagcggcggggcgcgagcgctgcccatgcagcccgtggcggcgtttccccggcggcgctaccgcagcgggaaggcggagcaggctcgaggcctggccgaattgcgggcaggcgctctgaggtgggagtaggaggacgtcgcattgacgattgggcagggtcctgcgtaagggagcacacgaccctggaagtagcgagcaaccggattggcggtttccttcgcaaacgtcttgccttctggggcctggcaattggtctttccaagtgtcggaagcgacggggatatggtctggaaacatctggttttgaacatctggtattgaagcgctgggaggcaaaacgtctgccccgcgcgcccatgcggcgagtgtcggtccgtgcccctgctcaaggacagctcgggccacgtgcgccccggtccccagaaggcctggctccggactgtgctgccctggggcgtcactgggcaaggagagcagtgggtcggcgtcgaggggaggggacctgggcttcggagcggttgctccgggtgggcactggccgcgcaacccctctcccgcgcagagacgctagctccaccaattggaggaaaatactgggcacctgtcaggtagttaaaaacgttagcatggtgctggacttaagactcagctctcaacatgggcagttatgtgggacccattccccactacccttgccaaggccccaggtttctaaagggctagcagaaaacagagagacagaggggagagaaagagagagaggcaaagcaagagtcaaaaagagaaagaaagaagaaagagaaagaaagatagaagaaaaaaacagtgtgccctattcctttaaaagccagggcaaacattccctccaaggcaaagatgccccaaagatgtattctggagtattcagcccagtcagagaatatgtacctgtttccttgtcagacttgaagaaaattgaaatagacctaagtaaattctcagataaccttgatggctatgttaatgttttgcagtatccccatagacccaaagtccaacaaggactccaaaaggttgttgaggacctaaaagcccaaggcctaataaaaccatggactagcccctgcaatactccaattttaggagtacagaaatctaatggacagtggagaatcgaagctgtaaaactacgaatcattcttcagatggagccacagattcagtccatgactaagatctaccacagacccctggaccagcctgctagcccatgctccgacattgatgacatcaaaggcacccctcacagggaaatctcaactccacaacccctactacaatacaattcagcaggaaacaaagtgatcattggccaacctccccaacagcacttgggatttcctgtcgagaagggggactga

SEQ ID NO: 142329 - DNA, 367 bp, Homo sapiens
ggcacgaggatggaataaggtttccccaacagaactgcgcttcccaagaatgggaataagaatgggggtgaggccagcatggtgcgggggtgtctagagagagcagaaacctgaggctgtcccaatggcatgccacagggggaacgcctgagccgctttggactccgcacagagaccacaggcactgtcaccttccgcttgcactgtctgcagcagtccaggtgagtgacttggccctctgcctcagggcacctttagccctgaggggtggagacagccgtaaccatgtggctggcctccctgcagggccttcatggaatcgagctcccttcagaaaaggatgcggagtgtgttggacccgctggaa

SEQ ID NO: 142330 - DNA, 479 bp, Homo sapiens
cccaaggctatgagtatgacaatctctacgtccacttctttgtagaattgccaactgctcactggtcaagcccagcattccagcagctctcaggagtaacacagacctgcaccaccaagtccctggcaatggacaaggtggctcacttctcctacccattcacgtttgaagccttcttcctccatgaggatgaatcttctgatgcactcccggagtggcctgtgctctactgtgaggtcctctcgctggacttctggcagaggtaccgtgtggaaggctatggggctgtggtgctgcctgccactccagcgacaatgacgtggccttggcactgacttcctgacagtctctccatgtgcttcatgctcctctgattggactcagggtgagaagctgtatggcaaaattggctcatagcatatgtgtattgaatgaatcagcattcagtttggaataaaagcatctgtcttttactgtga

SEQ ID NO: 142331 - DNA, 2414 bp, Homo sapiens
gggccgcgagttcgtctggagcactgacaccggggaggcagagtatctttttcgggaccccgtgcgcaacttgcgcctccgagggcacctgcaaagaatcacatggggcaactttcttcattatcagcctgctgccgagctcgggaaggacctcatagacttggccacttttaggcctcagccaactgccagtggacaccgcccagaggaagacgaagaggaggagattgtgattgggtggcaggagaagctctttagccagtttgaagtagatctgtaccaaaatgaaacagcctgtcagagtcctttggattatcagtaccggcaggagatcctgaagctggagaattcgggtggcaagaaaaaccgacgaatctttacctacactgactctgatagatacaccaatttggaggagcactgtcagagaatgaccactgcagccagcgaggtgccttcattcttggtcgagcgaatggcaaatgtcaggcgtcgccggcaggacaggcgagggatggagggcggcatcctcaagtcacgcatcgtcacctgggagccctcagaagagtttgtcaggaacaaccacgtcattaacacccctcttcagacaatgcacatcatggcagacctggggccctataaaaagcttggctataagaagtatgaacatgtcctgtgtactctgaaggtggatagcaatggtgtgatcacagtaaagcctgacttcacgggcctcaaaggaccctacaggattgagacggagggggagaagcaggagctgtggaaatatacgatcgacaatgtttccccccacgcacagccggaggaggaggagcgggaacggcgagtgttcaaggatctttatggccggcacaaggagtatctcagcagcctcgtaggcaccgactttgagatgactgtcccaggtgccctccggctctttgtaaatggagaggtcgtttcagcccaaggctatgagtatgacaatctctacgtccacttctttgtagaattgccaactgctcgcgagcttactatatttggtctttggctttcagactggtcaagcccagcattccagcagctctcaggagtaacacagacctgcaccaccaagtccctggcaatggacaaggtggctcacttctcctacccattcacgtttgaagccttcttcctccatgaggatgaatcttctgatgcactcccggagtggcctgtgctctactgtgaggtcctctcgctggacttctggcagaggtaccgtgtggaaggctatggggctgtggtgctgcctgccactccaggctcacacaccctgacagtctccacgtggagacctgtggagcttggcacggtggctgagctgaggaggtttttcattggcggttctctggaactggaggacctctcctatgtacggataccaggatccttcaagggggaacgcctgagccgctttggactccgcacagagaccacaggcactgtcaccttccgcttgcactgtctgcagcagtccagggccttcatggaatcgagctcccttcagaaaaggatgcggagtgtgttggaccgtctggaagggttcagccagcagagttccattcacaatgtgctagaggccttccgtcgagcccggcgccgcatgcaggaggcccgggaaagccttccgcaagaactaatgggccccttttgaaaccttggcttcttacctaacagcagccctggcccacagtgcaagaggacaagatgggggatatctgaggccagtgctctcctgcctcttcgtctttctgattaggagaccacgttggtcttgttgaggaaccaggaaaagctggggaaatttcccggctgggcccctcttgccttaggcctttttgcagggtcttctcccctacccctgtggaaaataaaagccagagaccctgtggccccccccctttatatttgcagccactgtccaatgggcatccacagcaaggcaggctttttgaatctgaaagctgtttgggggtgaccccccaaagtgaagtctggcccttgacctcacttttctggcttgtcctcaaagtagcaggggatctgcctgttcctcccacccctttaaaaatgggagcctttcatccttcccaagacccaaagaaggaaggaaggtgggccggtgagagggtcttaaatccccagcctgtgaagtctcagcctctttcccagggaagcctcaatctactgcttggggcttgcttgaggttgagatatgagttatttcttgagtaagtgaaggctgaaggcagtgctgagtcctttctgctagctgggtggtatcttttactgtgtttttttgtttgtttgttttttttgttttttgttacataaaccccttttattttgaaaaaaaaaaaaaaaagggc

SEQ ID NO: 142332 - DNA, 1281 bp, Homo sapiens; identical to SEQ ID NO: 119783

SEQ ID NO: 142333 - DNA, 684 bp, Homo sapiens
tcacgtggtttctgtctttggttctgttatatgatggattacgtttattgatttgtgtatgttgaaccagccttgcatcgcagagatgaagccaacttgatcttggtggataagctttttgatgtgctgctggattcggtttgccagtattttattgaggatttttgcatcgatgttcatcagggatattggtctaaaattctctttttttgttgtgcctctgccaggctttggtatcaggatgatgctggcctcataaaatgagttagggaggattccctctttttctattgactggaatagtttcagaaggaatggtaccagctcctctttgtacctctggtagaattcggctgtgaatccatctggtcctggactttttttggttagtaggctattaactattgcctcaatttcagagcctgttattggtctattcagggattccacttcttcctggtttagtcttgggagggtgtatgtgtccaggaatttatccatttcttctagattttctagtttatttgcatagaggtgtttatggtattctctgatggtagtttgtatttcttgtgtccaagtgatctcattgttcaattcccacctaggagtgagaacatgcagtgtttggttttctgtccttgtgatactttgctgagaatgatggtttccagcttcatccat

SEQ ID NO: 142334 - DNA, 636 bp, Homo sapiens
tcaccgatttctgcttttgtttctggctcccgggtctgtctgttctgtttctttctttctttctttctttctttctttctttctttctttctttctttctttctctttctttctctttctctctctctctttttctctttctttctgtctctctctctttccttccttcctttctttttctctctctttctctctctctctttctttctcttttctctctcctttctgtctctcctttctttctctcttttctttctttctctttcttctgtctttctctctctcctcttctctcctcttctcttctcttctcttctcttctcttctcttctcttctcttctcttcctcctcctcctcctcctctctctctctctcttgttctttctctcttttttattctcagaatctgtgctgtgggaaggatcagtggcaggactgcagacccctgccctctcctctgctttaaacagggcagttcttcctgtgtcctgctccatgatagaccagctgtgtgaccctggcaagtacttcatctctttatgcctgtttctacacctgcgagtgagaacatgcggtgtttggttttctgtccttgtgatagtttgctgagaatgatggtttccagcttcatccat

SEQ ID NO: 142335 - DNA, 484 bp, Homo sapiens
atggatgaagctggaaaccatcattctcagcaaactatcgcaaggccaaaaaaccaaacatcgcatgttctcactcataggtgggaattgaacaatgagaacacttggacagaggaaagggaacatcacacactggggcctgttgtgggccagcaggaaggctggaatctcagtcctacgaccaaaagaaactctattctaacaggccaaatcagtctggaagaagatcttaagcttcaggatatgactgcacagaatgtcggatgggatcttttggctttgcttctatatctctatgcacttatgttggctggttttatattgggctgtatggttcaaactacagactaccagattgagccgatggctcacagattctctgcctgtgtcgtatggctattgccaggggatgaacgagggttgctcttcgcaattcaagactgtctttcctaccctcttcagtgcctcttgatgttaaaaccag

SEQ ID NO: 142336 - DNA, 666 bp, Homo sapiens; identical to SEQ ID NO: 141216

SEQ ID NO: 142337 - DNA, 603 bp, Homo sapiens
atggatgaagctggaaaccatcattctcagcaaagtatcacaaggacagaaaaccaaacactgcatgttgtcactcataggtgggaattgaacaacgagatcacttggatacagagcggggaacatcacacactggggcctttcaggggctggggggctgggggatggatagcattaggagaaatacctaatgtaaatgatgagttgatgctgcagcaaatcaacatgggtgcagcccttgtagctcctgtcaccacagggttggagttgagtgcctttagcttttccaggctcaggatgcaagctgccggtgctggatcattctcaggtctaaagggcagtgatcctcttcccacagcttcactaggcagtgccctgaaaacaaccctttttgctgcacatggttatgtgcttcacatgatcactactgcagcagaatggtctatgtcattttccttctttggttttttcctgacttacattcgtgattttcagaaaatttctttacgggtggaagccaatttacatggattaaccctctatgacactgcaccttgccctattaacaatgaacgaacacggctactttccagagatatttga

SEQ ID NO: 142338 - DNA, 519 bp, Homo sapiens
ctacagaagactgagatttctctcgatgagagtaatgtactctgcacactgcacaaagaaaaaccaccgctttgcactcttgatattgacgtcaattctttgactcagtaggagtccatctgccttgtactttacctgttccacactttccaggcttgtccagccagctatctgatgacagttgtcaggattggcttctgggatgagagagtcccgggatgtgcttggtctaagattcacccccttgctcctctggattgtgcattccagagcgtgggcattagtggagtctgcagtgatgtcaacatgggagtgttgggtgggagatgagaggggtactggtgtgaaattggctggggcccacacagagctgccaacaggccctggtgtgtgatattcccctccctgtgtccatgtgttctcattgttcaactcccacttatgagtgagaacatgtggtgtttggttttctgtctttgtgatattttgctgagaatgatggtttccagcttcatccat

SEQ ID NO: 142339 - DNA, 381 bp, Homo sapiens
tcatgaggtgtccacctccatgacccagaaaccttccactaggcccaacctgtcaataccaccacactggggatcaaatttcaacatgagatttggtggggatgaacaaaccgtagccacaccgtagcagtgggaagctatgagtgagaacatgcggtgtttggttttttctccttgtgatagtttgctgagaatgatggtttccagcttcatccatgtccggtggaattcggctgtgaatccatctggtcctggacttttttcggttggtaagctattaattattgcctcaacttcagagcctgttattggtctattcagagattcaacttcttcctggtttagttttgggagggtgtatgtgtcgaagaatttatccat

SEQ ID NO: 142340 - DNA, 1395 bp, Homo sapiens; identical to SEQ ID NO: 125221

SEQ ID NO: 142341 - DNA, 3169 bp, Homo sapiens
atgaacattgatgcaaaaatcctcaataaaatactggcaaacccaatccagcagcacatcaaaaagcttatccatcatgatcaagtgggcttcatccctgggatgcaaggctgcttcaatatatgcaaatcaataaatgtaatccagcatataaacagaaccaaagacaaaaaccacatgattatctcaatagatgcagaaaaggcctttgacaaaattcaacaacgcttcatgctaaaaactctcgataaattaggtattgatgggacgtatctcaaaataataagagctatctatgacaaacccacagccaatatcatactgaatgggcaaaaactggaagcattccctttgaaaactggcacacgacagggatgccctctctcaccactcctattcagcatagtgttggaagttctggcccgggcaatcaggcaggagaaggaaataaagggtattcaattaggaaaagaggaagtcaaattgtccctatttgcagatgacatgattgtatatctagaaaaccccattgtctcagcccaaaatctccttaagctgataagcaacttcagcaaagtctcaggatacaaaataaatgtacaacaatcacaagcattcttatacaccaataacagacaaacacagagcaaaatcatgagtgaactcccattcacaattgcttcaaagagaataaaatacctaggaatccaacttacaagggacgtaaaggacctcttcaaggagaactacaaaccactgctcaaggaaataaaagaggatacaaacaaatggaagaacattccatgctcatgggtaggaagaatcaatatcgtgaaaatggccatactgcccaacgtaatttatagattcaatgccatccccatcaagctaccaatgactttcttcacagaattggaaaaatctactttaaagttcttatggaaccaaaaaagagcctgcatcgccaagtcaatcctaagccaaaagaacaaagctggaggcatcacgctacctgacttcaaactatactacaaggctacagtaaccaaaacagcctgggacatggatgaagctggaaaccatcattctcagcaaactatcgcaaggacaaaaaaccaaacgccgcatgttctcactcataggtgggaaatgaacaacgagaacacctggacacaggaaggggaacatgacacaccggggcctgtcactggataccaacatgagcatgaaacatactccacaaaggagctgttcaacaaggggtcccatgatttcagggccactagtccagaaaaggatattcagtcacggtgcaaaagaagagggtatatgaggacctctttgaagggagctgagagtgagtatcctgatcccaccagcaggaaggaggacatcctgcccttagcaaaacatgctggaatgggtttacagtgggtccgaggacatattctagtgaaagaccaaagccttgccagtcctctaggcacagtcgttatctccctggacaaatgtgtacaagtcactataagataccaagttaaaggaattcacatcattatatctcccagaggacaaagcctagaactttctacattcaagtcagtgaatattggggagtggggaatccatgaattcattatgtggatcaacaaaattgatagactgctagcaagactaataaagaaaaaaagagacaagaatcaaatagacgcaacaaaaaatgataaaggggatgtcaccaccgatcccacagaaatacaaactaccatcagagaatactacaaacacctctacgcaaataaactagaaaatctagaagaaatggataaattcctagacacatacaccctcccaagactaaaccaggaagaagttgaatctctgaatagaccaataacaggatctgaaattgtggcaataatcaatagcttaccaaccaaaagagtccaggaccagatggattcacagccgaattctaccagagatgcagaaaaggtctttgacaaaattcaacaacccttcatgctaaaaactctcgataaattaggtattgatgggacgtatctcaaaataataagagctatctatgacaaacccacagccaatatcatactgaatgggcaaaaactggaagcattccctttgaaaactggcacacgacaaggatgccctctctcaccactcctattcaacatagtgttggaaattctggccagggcaatccggcaggagaaggaaataaagggtattcaattgggaaaagaggaagtcaaattgtccctgtttgcagacgacatgattgtatatctagaaaaccccattgtctcagcccaaaatctccttaagctgataagcaacttcagaaaagtctcaggatacaaaatcaatgtgcaaaaatcacaagcattcttatgcaacaataacagacaaacagagagccaaatcatgagtgaactcccattcacaattgcttcaaagagaataaaatacttaggaatccaacttacaagggacatgaaggacctcttcaaggagaactacaaaccactgctcaaggaaataaaagaggatacaaacaaatggaagaacattccatgctcatgggtaggaagaatcaatatcgtaaaaatggccatactgcccaaggtaatttatagattcaatgccatccccatcaagctaccaatgactttcttcacagaattggaaaaaacgactttcaagttcatatggaaccaaaaaagagcccgcatcgccaagtcaatcctaagccaaaagaacaaagctggaggcatcacgctacctgacttcaaactatactacaaggctacagtaaccaaaacagcatgggacatggatgaagctggaaaccatcattctcagcaaactatcacaaggacaaaaaaccaaacaccgcatgttctcactcataggtgggaattgaacaatgagaacacatggacacaggaaggggaacatcacacaccggggcttgttgtgcggaggagtccagaccctgagcagaacttcaaggctgtcaggtgtttggaccttcctgatcttcaagctcgtttttggctgtcctcacatttcatttcaaaccagccttccttcagtcccttagatgagataagccacgctctttcctgccttggggacttggcacaag

SEQ ID NO: 142342 - DNA, 2831 bp, Homo sapiens
ttagtaacgcagatcattgccagcttcactcatgttaattcgtggctcaggtccgcagtaagatataccttgtctgcatcccacggcacaatggaagtgagcgtctggcctgccatgggtgtacggggtgtgtggtgcaatatttgtgagcatcatgtacctgcaactctcattaattaaaaagacagctggtacccttccccactccccccgccccacaacagtccctggtgtgtgatgttccccttcctgtgtccgtgtgttctcattgttcaactcccacctatgagtgagaacatgcggtgtttggttttttgtccttgtgatagtttgctgagaatgatggtttccagcttcatccatgtccctttctcgtggctgcttggcggtgggggtggggaggtgactggtttggatttatcatagttgttaaagctctggctgcgtcggttgttagcagtagttgaccctccgcgtgttttggcctcgctgcctgcagcggataccctcgcggtaggacctggaagtctagagatctttttctgacccagagtgaagcggatgattttgctttgagatgagtccttggatgatgcactggactgcatttcagcttgtgcttttgactgctgatgtggcgctggctggtgaggctggcacggggcttggggagtgactggcacctgctgctgaggggtgccagcctggcactgggagggggccccggccacctgggatacggcgggcggcagaggtgaggagaggtgctgcttctggggctgctgctgctgctgcttgtatcgggagaggctgaagaagaggcctagaatggccttgaggtttccattcctgatctcttctgcagacagcccctggatgtttattcccttagctgccaggaaattcaagcaggcatctatgttttcaatcatcccggaatctcttattgcaaaatcaaaaatagtacactcgatatttattctgggaagtgtcacggaggtgggctgacgaggtaggttaagatttttcagcaatagtccagcaatatggcactttagacttgcagggcaacttccatgggctgtgttgcagcctttgtctcccatatcctgaagtatttccccaccaaggagagccagggagttagaaaaatcaaaacaaatgccaaacaacctttctgttgtggagttcctgctggtaggaagcctcttgtcttctgctttgcatgtcatgggctctcctactggactggatggagttgctcctgtcccttcacctactaagaagcggaacttggcacctcttgtcctttctgagaaggattccacttgccctgacatgcttaggtgatcacgttctaaactgccaattatgcctcctctgacaatgacctgaatgtaggatatacccactaactcacagccagtgagttcttccagagcaggctgtccagtcttggtgaagtggctgggctccacgctcacacctgttgagcttgactcggcagtaacattcccttcagtgtccgtctgagacctgttcctgcagccagtgccgaagacctcagagggcaccaagggctgataaaggacagggcccaggtgtcctgattcgtatcctggtgctcttatttccagcgtcacttcccagactaccctgtacaggaaaggtgcaaccgtggcagtgttgggatggttgtattgctgctggggctgaggtagctgaacactgacggtattgcttcctgtggtctgggtggtcccgacagacccactgacagtctggctgctgatgctgtggttcagggtggtccctcctgggccttttccttctgaggacgccaggctggaagaggaactggagtgtctgccgtccagctggggcttctgctgggggagtcctgagctcagcttcccactccggctccgctccccttccttggaaggcgctggggcacttggggatttcccgggcatgcttttcattcctggttttggtattccactgtgggaaggggccatgggctccttcttggcactgttgagcttcccccctttggggatgaagctggcaatcttggaggacttttttggcatctcgggcacagctgctccactggggtcttcttttggctcctccttgaggtccagcctctccgtcacagaggctctcttggcaaggtccttgcttttctccttatccttctcccgctgttgtttctccttctctttctcattgcctttcagagaactcttcttgttggtcagtgcccggctaaaagtcctctgggcaatgcccttgagtgcaatcttggggctgctggaagcagggcccacggtggtgagcatgcgactggcggcctccagctcctcgctctcttcgaagctgggcagagtctccagccgctcacagcttgtgtcccgggaccccggcccctcacctgcctttgagccccctttactgttgaaaagtttcagcttttccagcatggacttctgattgttgggggccggcttcatggcttcaggtgtgggcctgggggcctcaggcccaggaggcttgaccgagagcatggataccgtggcactgtgcttcacgctgagggatttgctgcgccaaggcttggtggctgcaccgggctgcgggatggccgaggaggtactgcaattagtaggggtggagctgctgccgctctccaaggaagcaggtgcattgtcactcattccggggtgggaggaggctgaacttgccaaaggctctgcagagacagaagagaggaggcctgaatcatacttgttgacctgcactgaagaccagggagggtcagccat

SEQ ID NO: 142343 - DNA, 1779 bp, Homo sapiens
atggagcagctctcaccgatggccagctcctaccactctgaccacgctgctgtctccctggccatcttctttgactacaaaggaataaaactaggtatcaagctggcggctgttcccagtgccttgcccacccctgccgggccgtcggactcggcggggcccctgtggcatccctgtccagtccctgtcaccacccagtttttccctctggacccaggaattcaaagtaagcaaggaggtccgctgctccagttggctgcaaataattacaaccttaagcccaagcagcactttgggtcctggtttgggaccatgaagcggctcgggacatggatgaagctggaaaccatcattcttagcaaactatcacaaggacaaaaaaccaaacaccgcatgttctcacacatagagttaaataatgattacacattgaaaaaagtaatgaagccgctgatcacttcaaacacggtaactgatgaaatcgagcgcgcgaatgttttcaaaatgaacggcaaatggtacttgttcactgattcacgcggttcaaaaatgacgatcgatgagaataaaatacctaggaatccaacttacaagggacgtgaaggacctcttcaaggagaactacaaaccactgctcaaggaaataaaagaggatacaaacaaatggaagaacattccatgctcatggataggaagaatcaatatcgtgaaaatggccttactgcccaagcttccacaacctccaccctcaggcatataaggctataccgcaccctgcttcccttgggaaaacctgatataatcaggacaataacaatgctggtaaactcttcaaagccaacaggaacccagctttgggttgtcagcagccagtatgttcaaagacagatggcttcagattctaagggaatgaacacctgtagtatggtcaaagccaggaaatattcaaagcctctgctggtgacacccaggcaaacagcatctggagtggacctccagcaaactccaacagatcttcagctgagggtcccgactgttagaaggaaaactgacaaacagaaaggaaatccacaccaaaaccccatccatatgtcaccatcatcaaaaaccaaaggacacagttcctcaccagcaacggaacaaagctggatggataatgactttgacgagctgagagaagaaggcttcagacgatcaaattactctgagctatgggaggacattcaaaccaaaggcaaagttgaaaactttgaaaaaaatttagaagaatgtataactagaataaccaatacagagaagtgcttaaaggagctgatggagctgaaaaccaaggctcgagaactacgtgaagaatgcagaagcctcaggagccgatgcaatcaactggaagaaagggtatcagtgatggaagatgaaatgaataaaatgaaggacatggatgaagctggaaaccatcattctcagcaaactatcacaaggacaaaaaaccaaacactgcatgttctcacttataggtgggaattgaacaatgagaacacttggacacaggaaggggaacatcacacactggggcctgttgtgggacttggaaaattgccttttttcatggctccaattctggtggctccaagtcagaagtctgcgtgtgaggaccactgccatggctgtgcttatggatggaaaaatacacccatgaaggaacgcttgctgccaatgaagtttaaaaaatttattgttcctcctttaacctggactttcggacttgaaagccctgtttag

SEQ ID NO: 142344 - DNA, 1730 bp, Homo sapiens
ctggttttaacttcatatcgctgacagaggcactgaagaggatagcaaagacagtcttgaaatgccaacaccacccttccctcatctccaggcagtggccacatggtgcggagagagaatctgtatgcttgggggaaggagagctcagccattctgggactttgcattggaactcagtgtggccagcaccaagtagaactctgccagtgcccttaggtgtttctcctaatgctatctctcccccagtccaccaccccccaacaggccccggtgtgcgatgttccccgccttgtgtcctgtgtccaagtgttctcattgttaaattcccacctatgagtgagaacatgaggtgtttggttttttgtccttgtgatagtttgctgagaatgatggtttccagcttcatccatgtccctgttgtttcctgactttttaatgattgccattctaactggtgtgagatggtatctcattgtggttttgatttgcatttctctgatggccagtgatgatgagcattttttcatgtgttttttggctgcataaatgtcttcttttgagaagtgtttcttcatatcctttgcccactttttgatggggttgtttgtttttttcttgtaaatttgtttgagttcattgtagattctggatattagccttttgtcagatgagtaggttgcgaaaattttctcccattttgtaggttgcctgttcactctgttggtagtttcttttgctgtgcagaagctcttcagtttaattagatcccatttgtcaattttggcttttgttgccattgcttttggtgttttagacatgaagtccttgcccatgcctatgttatcaggctcgaaccctttaagatcaacgttcttgagcagatcacgaagcatatcgaaaaactgcagtgcggaggtgtagtcaaacaactcagcaggcgtgggaacaatcagcacatcagcagcacatacgacattaatcgtgccgatacccaggttaggcgcgctgtcaataactatgacatcatagtcatgagcaacagtttcaatggccagtcggagcatcaggtgtggatcggtgggcagtttaccttcatcaaatttgcccattaactcagtttcaatacggtgcagagccagacaggaaggaataatgtcaagccccggccagcaagtgggctttattgcataagtgacatcgtccttttccccaagatagaaaggcaggagagtgtcttctgcatgaatatgaagatctggtacccatccgtgatacattgaggctgttccctgggggtcgttaccttccacgagcaaaacacgtagccccttcagagccagatcctgagcaagatgaacagaaactgaggttttgtaaacgccacctttatgggcagcaaccccgatcaccggtggaaatacgtcttcagcacgtcgcaatcgcgtaccaaacacatcacgcatatgattaatttgttcaattgtataaccaacacgttgctcaacccgtcctcgaatttccatatccgggtgcggtagtcgccctgctttctcggcatctctgatagcctgagaagaaaccccaactaaatccgctgcttcacctattctccagcgccgggttattttcctcgcttccgggctgtcatcattaaactgtgcaatggcgatagccttcgtcatttcatgaccagcgtttatgcactggttaagtgtttccatgagtttcat

SEQ ID NO: 142345 - DNA, 3994 bp, Homo sapiens
atgggtatccgaagaaccaaagatctcccggtctaccgccgccagaagacccggattctgatacgcctcgtgctggagcatcacgccatcgatatggtgcatgggtgctttggcctctgccagcgacttgaggccaacgagtttttgcggcccgctggtactttggcgaatcgcatcttccacatcgctattcctgtgaccgagctttatacggtgcaggaagaggataaaaccgtggagcggaaacgaagttttatccatttttggttacctgagtcattgatggttgatggcaatcagaagcgggaggaccccccccatcaaaaattgagtgaaggatatgaacatacacttgctcaaagtgaagatattgatgcagccgacaaacatatggaaaatatgctcatcatgtcctttggtgggacgtggatgaagcttgaaaccatcattctcagcaaagtatcacaaggacaaaaaaccaaacatcgcatgttctcactcatagacaaagtcttgctctgtcacccaagtcgactttatcttaaagcccaccatgagtgtacagatcagaaagtctaccaagctgtgacagatgacctgccggccgcctttgtggatggcaccaccagtggtggggacagcgatgccaagagcctgcgtatcgtggaaagggagagtggccactatgtggagatgcacgcccgctatatagggaccacagtgtttgtgcggcaggtgggtcgctacctgacccttgccatccgtatgcctgaagacctggccatgtcctacgaggagagccaggacctgcagctgtgcgtgaacggctgccccctgagtgaacgcatcgatgacgggcagggccaggtgtctgccatcctgggacacagcctgcctcgcacctccttggtgcaggcctggcctggctacacactggagactgccaacactcaatgccatgagaagatgccagtgaaggacatctatttccagtcctgtgtcttcgacctgctcaccactggtgatgccaactttactgccgcagcccacagtgccttggaggatgtggaggccctgcacccaatgaaggaacgctggcacattttccccagcagtggcaatgggactccccgtggaggcagtgatttgtctgtcagtctaggactcacctgcttgatccttatcgtgtttttgtaggggttgtcttttgttttggttttttattttttggtctataacaaaattttaaaatatatattgtcataatatattgagtaaaagagtatatatgtatataccatgtatatgacaggatgtttgtcctgggacacccaccagattgtacatactgtgtttggctgttttcacatatgttggatgtagtgttctttgattgtatcaattttgttttgcagttctgtgaaatgttttataatgtccctgcccagggacctgttagaaagcactttattttttatatattaaatatttatgtgtgtgcttggttgatatgtatagtacatatacacagacatccatatgcagcgtttcctttgaaggtgaccagttgtttgtagctattcttggctgtaccttcctgccctttcccattgctactgatttgccacggtgtgcagcttttactcgccaccttccggtggagctgcctcgttcctttgaactatgccctcacccttctgccctcacttgatttgaaagggtcgttaactctcccttacaggtgctttgactcttaaacgctgatcttaagaagctctcttcatctaagagctgttactttttcagaagggggggtattattggtattctgattactctcaattctaattgttatatatttgagcccatacagtgtattaggttgaaccatagaaactgctattctcgtaggtcaaaagggtctagtgatggaagttttggagataagaacttaatcttattaggaactcctaaaatttttctcatcccatgccccgttttaaattggcagttttccctctgactcttctgtgttaaaacatgaaactataaatttagtaattatcatgccttgctctttttaatctatatgaccgatgcaagcccctcttcttaaccgattcttggctttgagcccataaacacaggtctccctgtctccaactccagtaaggccctcctcagcctcaccttacggaatccaaaggaactgggggtttgttagggttctttctctaaatgtaggagggcccagatcccatcacaaagttttttcattcttccttgtccaccatgatctttccatcacagtctttggatatggtctggccatggcaaagtgggaacagagttggggcgggcaatggacaggaggagctttccttgggcctgactcggtgtgcgggccacttcggcactgcttaatccagatattcttgttaactaagcattgtgcttcccaggtggtctgaagtcaggtactctctctctcaacacctgtagttgaatatgatttggtcagttgctcgttgtaacttggagaaattcctataaagtaagatctccttgcctcttccatccattgttggcacccccttgcaaaaggaaaagaacagcaaaagtcaggagcagtaatctgagaaagttaactccaggataggtaggtttctattgttatagctagatgtaaatctttagttccaagaagtgatagagtttctgctttaataatttgttgataagtttacataaacagaaataaaagatactatctttaccgtagtagttcaggccaagattatgcttagttttagttctccaggtagttactttgtgccatgtcctattgatcagtgacactgccagaggcccataccggcaagaggaagaggacgtcattttgtaaagtttaacttcttagcgaactgatgtgccacccagtcacagagtggagttgtgaattcatgtagaggtggcaaacctctacctggtgttgatgagagaataatccttgggcagtctgggaaaaattaaggaaggcatctcccttcttactcatgggagattcaactatagagagttgaaacctaaacccgccttccttttatagaagctggactagagacggactgaccatcagctctgaactgtggctttttttgttcacctatgatgccatgtaccaaattcagaagctatccgttaataatttgttttataattgagtagtacaagcgaggaaaaaatacggaggataaccactatttttgtgcaaataatatgaaagtgaagtaaaagcaatagaagaaatttctataggatctgggtttagagtgtgtatcacttattaattataccttggcccttttcagggaaaataacaaccacccttacctgatagttgggaaaagaagattggggttattttggccatatccattttagctggaagtgacatttaaaagcaccctggcatcactagtaatagtgtattttgctattctgcccttgtaatcggtgtccctgtaaaacaatccccacagattactttcaggaaataagatgtatttctctaccgtaaggggccagggtttaattttctcctttttttgagatttcttagaaaaaatgctgcttgcacatgttggttcttgaaaccttagctagaagaatttcaggtcataccaacatgtggatagggctatagctgttcagaggtctcctgggggaggcttaaaacgggggaaacactggttttcacacgatgctccacatgggctgtctttaaaagactccaaaacttttttttgtcctctttgttatgcttggaagctccccccccatcaccacagtgtgtccgagtctttgcaaagaaacctttagatgtggttcatagatatatgaatacgtatctgtgtaaaacagtgagtgtgcagtgtgtaaatactttaaattattatgctagaaaaataaagttacataccttgcaaaaaaa

SEQ ID NO: 142346 - DNA, 781 bp, Homo sapiens
gctttctgtacagatgaatatttggaaaaactttccatttgatcgcgcctaaaatcttcatttagtcttcgattttgctctctcagaaagtcgatttctgcagccatttcgatacaattttagttgtagagctttcaccacctttaccttcctctgaaagacagagagcttgctgtgcgggaaaacaaaactaagccaacgctcggttggttgtcaagcgctccagcggtgcaatctgcatcctactcacgcggcatctacagccccgccacgcttctttccaccgcgccccagacgagtccctggccctggtgagagactgaagattgctggggactccacgttcaaccgaatcccacgctggtgggaagaggacgcggtcgatacaggcgtcccgcgggtcactctgggtctcgtcgggccacctaggagagagccgagggagcttgacggcagcctgagagcggcgttctacgcggagcggcgggggttggagaggacaacgccaagacggctgggaagccccaggccagcagcggaagtccactcggcccgccctgcgactttgaaaccggtgccccggaccactccttggagacggtggcgcctcttgcgtcatcacgcgggcgttggaggttacgccatcgcgcgtcctagagtcctagcacgctattggctggctgtcaagcatctgggaccacgatcccactcgggttgccggtctggttatcgggctgggaccacgggcccaactgttttgtccatcagacttttcgcgtga

SEQ ID NO: 142347 - DNA, 378 bp, Homo sapiens
atgaatcaaatagacacaataagaaatgataaaaggggtatcaccactgatcccacagaaatacacactaccatcagagaatactataaatacctctatgtaaatataccagaaaatctagaagaaatggataaattcctggacacaaacaccctcccaagactaaaccaggaagaagttgaatccctgaatagaccaataacaagtttggaaattgaagcagtaattaatagcctaccaaccaaaaaaagcccaggaccagaccgatttacagtcgaattctaccagagggacatggatgaagctggaaaccatcattctcagcaaactaacacaggaacagaaaaccaaacaccatatgttctcactcataagtag

SEQ ID NO: 142348 - DNA, 624 bp, Homo sapiens
atgtggcacatatacaccgtggaatactatgcaaccataaaaaaggatgagttcatgtcctttgcaggcacatggatgaagctggaaaccatcattctcagcaaactaacacaggaacagaaaaccaaacaccgcattttctcactctcccatgctcccccaagcctagccatagaaactagaatcctcttcccaagatacagaaaatgtggaagtgactttgaaatgggtaacaggcagaggtttgtacttcctagagacttggagagctcagaagacaggaagatgtgggaaagtttggaacttcctagagacttgttgaatggctttgaccaaaatgctgatagtgatatggacaataaagttcaggctgaagcgatctcaatggagataaagaacttgttgggaactggaataaagggcagtacagaaggaaatgtgagatcaaagcccccacacagaatccacactggtgcactgcctagtggagctgtgagaagatggccaccatcctctagaccccagaatggtagatccaccaacagcttgcactgtgtgcctggaaaagatgcagatactcaacgccagctcatgaaagcagccaggaaaggggttgtatcctga

SEQ ID NO: 142349 - DNA, 354 bp, Homo sapiens
atggaatactatgcagccataaaaagggatgaattcatgtcctttgcagggacacggatgaagctggaaaccatcattctcagcaaactaacacaagaacagaaaaccaaacactgcatgttctcactcataagattgactgccagggcagaagcagatttattgcaaccagataaaaccagttggcacaattcaaacacctgggcaactctgccttatcttgctaggcataggaagaaagctccggcagttaagattccttactgtttacaaaaatcagatggaaacagagttgaccttgatggtatcaagccctcacagtatagatttcagagtaataagccaatgaattaa

SEQ ID NO: 142350 - DNA, 510 bp, Homo sapiens
atggaatactatgcagacataaaaaaggatgaagtaatgtcctttgcagggacatgggtgaagctggaaaccatcattctcagcaaactaacacaggaacagaaaaccacacactgcatgttctcactggtttatgatccaaagaaaaggcagtggtcacagatacatgaaacgacaaggccaaattcagataatcgacgccagggtggcagagaaagattggccagtaccaatgacaagggaagtatggctatggaatctgccaaggagactcgctactgtgcagtgtgcaatgactatgcttcaggctaccattatggagtctggtcctgtgagggctgcaaggccttcttcaagagaagtattcaagtacttgggcccaacagagagggaaacctggaaactcacattagtgatcaatgcctaacaattcgcagctatgaagaagaagaagaggaagaagaagaagaagaagaggaagaggaagaggaagaggagaaagaggaatag

SEQ ID NO: 142351 - DNA, 546 bp, Homo sapiens
atggagtactatgcagccatgaaaaagaatgagttcatgtcctttgcagggatatggatgaagctggaaaccatcattctcagcaaactaacacaggaacagaaaaccaaacaccccatgttctcacccataagcattttgggtgactcaaagtttcctcttttaaaaacactggccattaaatattctcatgaacaagaatattatttacctgtgcaagtaaaaacactgcccattaaatattcccttgaagaagaatattatttacctgtgcaagggggtattcttaggtgttcttctaatgtaaaatcgcagaaggttaaggagcttgcacaaattccacagcgagtgtttgagtgtgtgtatgtggtggtggtgggggatggtattcaaattcaggacttcttacataagttaaaggatgctttttatatcccgtgttgtaggtatagcaatatggcagtgtggaggaatccacatcatatccttgttatgtatgcgtccccaagcccaggaatacagactgatgaagagccaccaatttga

SEQ ID NO: 142352 - DNA, 764 bp, Homo sapiens
gtctccagacaaggctagatgaccactcactgagaaggtataaaggggctttggatattgaatataaggggcagctgatgtcagccagaaaactgaaactggaccccttccttacaccttatgcaaaaattaactcaagatggattaaagacttaaacataagatgtaaaaccataaaaaccctagaagaaaacctaggcaataccattcaggacatagacatgggcaaagacttcatgactaaaacaccaaaagcaatggcaacagaagtcaaaattgacaaatgggatctaattaaactaaagagcttccacacagcaaaagaaactatcatcgaggtgaacagggacatggatgaagctggaaaccatcattctcagcaaactaactcagaaacagaaaaccaaacaccgcatgttctcactctaaaacaagaaatagggaatgataagccagatgccaaccaatcacataagaaaaatggagaggagaaagaatgtttcaaaaagagaggagaagtattccacatgctagtcctactgagctttcattttccagaatcagtccacaggcccttgtctgcaacccttgaggtctcaggcaagctggctgcctcctgggtgctccactcctcaagtccctccctgtggaatgtcctgtccactttgctcgacaatgatgattggtatgatgtcgattgctatgatggtgatgatgatgatgatgatgatgacgacaatgtgaccacaaggctcaattactga

SEQ ID NO: 142353 - DNA, 1178 bp, Homo sapiens
atgatctatatcagcggtcctcaaacctggcagtacatcaaatataacctgagggacttatttaaaattcagatgtcaggctctattccagacctactaaatcagcctccaggccattggtgttcttatcaaactgcacttttgatgctcttgcacaatggtgtacacaagcagtcattggaaagcaggtttagcaaatatattggtcagggctttgctgaactttccagctttccaaaatgtccaagttccttcagtcttcttcatgtgccgtgcgagatgtacaagacgacactgatggagccgaaaatcacacagaaatacagagactctgcacaaggcatcccccattctaaatctcctgtgtttcacaaggcatcttggtgtcattctgtgtatcagactgtgctggcttttctccatttacccaatggatccatttaccccgtggatccattctctttctttctgctccctggaagactgattccgatggattgcatcacttgggctcccctcacctctgactttccactggatttgaccgatgggagccataagcaagagacaggagacacacgtggagtgcttttaaagagtggagagtttaataggcaagaaagaagggagaagaaagaaggaagaagctcccttgtacagagacagagggagcgggactccaaagccaagagaggaaaccccgagtgcgacagaaacgtggctgcttatatgcgggtggaagaggtggtgtctgatttgcatagggctcaggggattggtttgaccagggacattgatgaagctggaagccatcattctcagcaaactaacacaggaacagaaaaccaaacactgcatgttctcactcaaaaggtcggccggcctgccccttaccagccgcaggaccagccgggagaaggctggaggcgggtcccactgcctgagggcctgggtgcagcctcactgccccacaagcagaaccaacgcctgcgagctccttaacaatgcgcggtgtgggccacctgcgagctccttaacaatgcgcggccccatgccggacctactgtgttccgacagaatccgcggcatagaatcagccctgcgcctccagagcccaatcctaatgcccccacctggaaggggcttctgttgtcctgggaccagcttcagaatggcag

SEQ ID NO: 142354 - DNA, 2595 bp, Homo sapiens
atgcggttacttcacttaatatgtatcaccataattctcttctcagaaagtttattcagtcaggctgttaggatcaacagctataggagaaaggaaggatgccagattgggaagaagagagggactatggtgccgtcacaacaagaattagaaaaaacaactttaaatttcatatggaaccaaaaaagagcccgtattgccaagacagtcctaagtaaaaagaacaaagctggaggcatcatgctacctgacttcaaactacattacaaggatacagtaacaaaaacagcaggggacatggatgaagctggaaaccatcattctcagcaaactaacgcagggacagaaaaccaaacactgcatgttctcactcgatacaactccttaccagcaaaggaacaaaactggatagagaatgagtttgatgaattggcagaagtaggcttcagagggagaaagtgggaaagatctaaatttgacaccctaacatcacaattaaaagaactagagaagcaagagcaaacaaattcaaaatctagaatacaagaaataactaagatcagagcagaattgaaggagatagagacacagaaaacccttcaaaaaatcattgaatccagaaagattatcaaaatagatagaactccagctagactaataaagaagaaaagagagaagaatcaaatagatacactaaaaaatgataaaggggatatcgccaatgatcccacggaaatacaaactaccatcacagagtactgtgaacagctctatgcaaataaactggaaaatctagaagaaatggataaattcctcaacacatacaccttcccacaactaaatcagggaagaagtcgaatccctgaagagaccaataacaagttctgacattgaggcagtaattaatagcctatcaatcaaaaaaaaagtccagtaccagacagactcacagccaaattctaccagaggggaaaatctgggcaataccattcaggacacaggcatgggcaaagacttcataactaaaacaccaaaagcaatggcaacaaaagccaaaattgacaaatgggatctaattaaactaaagagcttctgcacagcaaaagaaactatcatcagagtgaacaggcaacctacagaatgggagaaaatttttgaaatctatccatctaacaaagggctaatatccagaatctataaggaacttaaacaaatttacaagaaaaaaacaaatgaccccatcaaaaagtgggcaaaggatatgaacagacacttctcaaaagaagacatttatgcagccaaaaaacacatgaaaaaatgctcatcatcactgggacatggatgaagctggaaaccatcattctcagcaaactaacacaggaacagaaaaccaaacaccgcatgttctcacttctgattccagatgatggtaattctcttacccgacgaatgttgctgattgggatatctgtgaagacacctgtaggaactggtgccattccaggacctgtgggaggcacaacagctgccggagcctatgggaggaaagaaaaagctcttagtaactgtgattcaatcttagcgctagctctagctaaaatgagtgaaaaccaaatgtcaatggagagcttctttgaaaaggggaaagacccaatgaggagacagcagaagactctaacactaacaaaaaagaaaaatgcatttaaaagaaaataccaagagtcctacttaaattatgggttcattgcaacagtgagagcatcattcttagtggctaactgcattgttaaagctaagaagccctttactattggggaagagttgatcctgcctgctgctaaggacatttgttatgaacttttaggagaggctgcagttcaaaaggtgccacatgttcctcttccagtcagtaccataactagaccaattgatgaaatagcagaggatatcgaggcacaatttttagagaggattaatgagtcactgtggtacacaatccagattgacaagtctaccattgctgacaacaaggcaacaatgcttgttttcgtgcaatatatttttcaagaggatgtgcacgaggatgttttctttcaagagagtttgagagctacttcccaaccgctaaagaccccccaaactggcaaggaatgggtccatgacccatttgtggataagccaagtgaatcgactttgtctatgctagaagaggatcaactgcttgagattgcaaatgacggtagccttaaaagtatgtttgagaaaacttcaaatcttcatatagtctgtattaaagtcaaggcagaatatcctgagattgccacaaaagcactgagaaggctgcttgcatttccatgggtagcagctgtggatagggaatgtcaatggggctccagggatgtggagatgcggaggctgttggaccctaaggcaggattcagtctgctgggggttggcaactgccactgcttaaggactttggagtttgtaggactcagcatgagctccctctgtggagcaatgctgttatgtggtctccgggcagctccctatattagtctcagggaccacaaaggtcaagggactctcctatag

SEQ ID NO: 142355 - DNA, 1665 bp, Homo sapiens
atggttatggacatacgctttggtgtgactgtgttccctgcattcggaaatgccttcctaggggcacagccaagtcactcggcaaagggctcaggacacaggtgcaaggaagtgtatattaggagcagcagtgcagccgccaccggcttccgacagctatttcgggcttctgtgtattgtggcactcagctgagtacagatgctcccaaatcctgtggtttgccccggtgtgccacagacttttctgtttctgtgtgtgccatgctcgtgctgcacggcagctcagcagcaggtctgctcctctgtgctgaactgaagggagccgagtgctcgccctccgtccgggccggagctcagatcgtcctgcctcacgtacaagaagtaaccagttctttggccttcagactccctgtttcactggggacatggatgaagctggaaaccatcattctcagcaaactaacacaggaacagaaaaccaaacaccgcatgttctcacttctcagagcagatgagcccagtgaccttgaggcccttgaagatggtggaaccaggagacatgaggggccttggcctggaaacacaactcgaagggaaatcactcatctggaaaacgtgtttggacccataccacaccgtggcaaatacctggcctgtggacaggacaaagccaaagccgcccagcgccgtgtgatgcggccacagagaacacgagcctcgggagagaggagcctggggctggaaaacaagggccctggggtgaagggcacagatcgggaggtccctggacttccacttgttgagctggactcaagccggatcgcctggaggatattctcagggcacagcggctgcctgcgcctgagcagtgctgaggagatgccaaggtcaggcatcagctttcagagaatgcagctgcgtcagagatggagacacgcagagccacgtgtcgtggagaatctaaggaagttcgctggcgccagcagcgggaaaaggccctggcttgatgaggggaactcgcagccttgcagcgcggggcttctgctgctgcctggcctggagaccccactcagtcacaccatcaccatccagcaagcccaaggcacccagaaggataaagatcgctcccaggacctgaggacaaaagcagacattttgggggcacgggagaacaaactgccgccgtgtctccacaccctgtgtgtcctgaacaccgctgggaagccgtcagcagacgctccgcaggccaccggggcgatcggggcactaaaggccaagcaggcttcacacactgccaaagtccaggtgaccagagagtatgaccggacacaaaggtgggacaagccgtttctcattgttactgagaagcaactcacggcctccgtgcacctgatggagagtaacccggcaaccccaaagggacaagacaaggccattgcagagaagccctcttgccccagcttaaacatccggaaactagtggctaagtctgtgagtccagataatgttccttgctggggtggtaaaagcatcctcagtctgaaaagaagcagtgccagcctctatccatgggacatgcaggcccaggaggcctctcaggttctgctgatcactggcctcaggcacgactcagcagatgtggtccagcggccatgcagtcagtga

SEQ ID NO: 142356 - DNA, 678 bp, Homo sapiens
ctgttggtgggactgtaaactagttcaaccattgtggaagtcagtgtggcgattcctcagggatctagaactagaaataccatttgacccagccatcctattactgggtatatacccaaaggattataaatcatgctgctataaagacatatgcaccaagtatgtgtacctgcggcactattcacaatagcaaacacttggaaccaacccaaatgtacatcaatgatagactgggttaagaaaatgtggcatatatacaccatggaatactatggcagccataaaaaaggatgagttcatgtcctttgcagggacatagatgaagctggaaaccatcattctcagcaaactaacacaagaacagaaaaccaaacaccgcatgttttcactctactggaagtcctagccagagcaatcagaaaagagaaagaaatacagagcatccaaattagtaaagaggaagtcaaactgttgctgtttgctgatgatacgattatttacttagaaaaccttaaggcctcctccagaaagctcctagaactgataaaagatttcagcaaagtttctggacacaaaattaatttacacatatcagtagcacttctgtacaccaacagcgaccaagtggagaatcaaatcaagaactcaaccccctttacaatagctgcgaaaaattaa

SEQ ID NO: 142357 - DNA, 1407 bp, Homo sapiens
atggtgggtgaagacgctgatctgccctgtcacctgttcccgaccatgagtgcagagaccatggagctgaggtgggtgagttccagcctaaggcaggtggtgaacgtgtatgcagatggaaaggaagtggaagacaggcagagtgcaccgtatcgagggagaacttcgattctgcgggatggcatcactgcagggaaggctgctctccgaatacacaacgtcacagcctctgacagtggaaagtacttgtgttatttccaagatggtgacttctacgaaaaagccctggtggagctgaaggttgcagcattgggttctgatcttcacattgaagtgaagggttatgaggatggagggatccatctggagtgcaggtccactggctggtacccccaaccccaaataaagtggagcgacaccaagggagagaacatcccggctgtggaagcacctgtggttgcagatggagtgggcctgtatgcagtagcagcatctgtgatcatgagaggcagctctggtgggggtgtatcctgcatcatcagaaattccctcctcggcctggaaaagacagccagcatatccatcgcagagtggaggaaaatccagtacatggctcgtggagagaagtctttggcctatcatgaatggaaaatggccctcttcaaacctgcggatgtgattctggatccagacacggcaaacgccatcctccttgtttctgaggaccagaggagtgtgcagcgtgctgaagagccgcgggatctgccagacaaccctgagagatttgaatggcgttactgtgtccttggctgtgaaaacttcacatcagggagacattactgggaggtggaagtgggggacagaaaagagtggcatattggggtatgtagtaagaacgtggagaggaaaaaaggttgggtcaaaatgacaccggagaacggatactggactatgggcctgactgatgggaataagtatcgggctctcactgagcccagaaccaacctgaaacttcctgagcctcctaggaaagtggggatcttcctggactatgagactggagagatctcgttctataatgccacagatggatctcatatctacacctttccgcacgcctctttctctgagcctctatatcctgttttcagaattttgaccttggagcccactgccctgaccatttgcccaataccaaaagaagtagagagttcccccgatcctgacctagtgcctgatcattccctggagacaccactgaccccgggcttagctaatgaaagtggggagcctcaggctgaagtaacatctctgcttctccctgcccaccctggagctgaggtctccccttctgcaacaaccaatcagaaccataagctacaggcacgcactgaagcactttactga

SEQ ID NO: 142358 - DNA, 3309 bp, Homo sapiens
  misc_feature (1)...(3309): n = a,t,c or g
gatggttttccatactggaacccaaaggtaaagacactcaaggacagacatttttggcagagcatagatgaaaatggcaagttccctggctttccttctgctcaactttcatgtctccctcttcttggtccagctgctcactccttgctcagctcagttttctgtgcttggaccctctgggcccatcctggccatggtgggtgaagacgctgatctgccctgtcacctgttcccgaccatgagtgcagagaccatggaactgaggtgggtgagttccagcctaaggcaggtggtgaacgtgtatgcagatggaaaggaagtggaatacaggcagagtgcaccgtatcgagggagaacttcgattctgcgggatggcatcactgcagggaaggctgctctccgaatacacaacgtcacagcctctgacagtggaaagtacttgtgttatttccaacatggtgacttctacgaaaaagccccggtggagctgaaggttgcagcattgggttctgatcttcacattgaagtgaagggttatgacgatggagggatccatctggagtgcaggtccactggctggtacccccaaccccaaataaattggagcgactccaagggagagaacatcccagctgtggaagggcccgtgaatgtatatggagtgggcctgtatgcagtaccaccacctgtgatcatgacaggcacctctggtgggggtgtatcctgcatcatcacaaattccctcctcggcctggaaaagacagccagcatatccatcgcagacccctttattcaggggggcgccccagcccgtgnattngnaggccctgggcnagggaccctggcntattttngggtggctgnttcttggcaaggagccagttacttcttgtggagacaacagaaggaanaaattggtctgtccagggagacagaaagagagcgagagatgaaagaaatgggatacgntgcaacagagcaagaaataagcgctaagaggagcctccaggaggaactcaagtggaggaaaatccagtacatggctcgtggagaggagtcttcgtccgataccaaaaagtcagccctgatgctcaaatggaaaaaggccctcttcaagcctggtgacaaaatgcttcagatgagggtttcaccttgtaaaataaattggatgtattcaaaaatatactgcagaaaaggggagctcattaagttcataagcggtcgagtgaagattgaaaataaacctctgagtataaagcatcagtgggcanaatcaatgtggggagggaaacaacaaaaatgtanaaagaggatccttgttgcttcttggggccgcatcagggtattgggtaaggcanatactgaccttactttcatttcccctctggtcactagacccctggggctttcaccaatgacattgatgagagaatcacattcagggcaggctagggacacggggttctggaaggacctcctcagcatggcccaagccttgcatgctgtggctcttaaatccaggaaaaatggcagaccccatggacacctcctcaaactctctgcagcagatgtaattctgtatccagacatggcaaatgccatcctccttgtttctgaggaccagaggagtgtacagcgtgctgaggagccccatgacctaccagacaaccctgagagatttgaatggcgttactgtgtgcttggctgtgaaagcttcatgtcagagagacactactgggaggtggaagtgggggacagaaaagagtggcatattggggtatgtagtaagaacgtggagaggaaaaaagtttgggtcaaaatgacaccggagaacggatactggactatgggcctgactgatgggaataagtatcgggctctcactgagcccagaaccaacctgaaacttcctgagcctcctaggaaagtgggggtcatcctggactatgagactggacatatctcgttctacaatgccacggatggatctcatatctacacatttctgcacgcctcttcctctgagcctctgtatcctgtattcagaattttgaccttggagcccactgccctgaccgtttgcccaataccaaaagtagagagttcccccgatcccgacctagtgcctgatcattccctggagataccactgaccccaggcttagctaatgaaagtggggagcctcaggctgaagtaacatctctgcttctccctgcccagcctggagctaagggtctcaccctccacaacagccagtcagaaccataaagctacaggcacacactgaagcactttactgatattcattcaattattccataggacagttgtttgagtttggtgccaccttattggcccctttatacagataaggaaactggggtgtagaaaagtgtattgactttacaaagcagacaggaatagtgaacaacagagctgggatctgaacaacaatgactaacattaatggagaatttaaaacgttctgagttgctgtgttaatgaacctttggtgggtgtcactcctttaatcctcacaacaccctgtcaggtagtctcatttggcaagtatggaagcagaggcagggcaacattaagtagcttacataactcacacggtaatttgtgcagttgggagatgttcagcttcagtcccctggccaattgcccgttcttttccagcctgatttttcctgcatgggaagagcccacatgtagccctgaggttcccttcccaggacagctccaggatcgagatcactgtgagtggttgtggagttaagacccctatggactccttcccagctgattatcagagccttagacccagcacaccttggattggcttctgcagagntctggtgagagataacgtgcagttcccacagggcatggacttgaaagagactagaggccacactcagttaataatggggnacagatgtgttcccacccaacaaatgtgataagtgatcgtgcagccagagccagccttccttcagtcaaggtttccaggcagagcaaataccctagagattctctgtaatattggtaatttggatgaaggaagctagaagaattacagggatgtttttaatcccactatggactcagtctcctggaaaaggatctgtccactcctggtcattggtggatgttaaacccatattcctttcaactgctgcctgctagggaaaactgctcctcattatcatcactattattgctcaccactgtatcccctctactgggcaagtgcttgtcaagttctagttgttcaataaatttgttaataatgctgactcttc

SEQ ID NO: 142359 - DNA, 2879 bp, Homo sapiens
atttgctttctctttttcctttcttccggatgagaggctaagccataatagaaagaatggagaattattgattgaccgtctttattctgtgggctctgattctccaatgggaataccaagggatggttttccatactggaacccaaaggtaaagacactcaaggacagacatttttggcagagcatagatgaaaatggcaagttccctggctttccttctgctcaactttcatgtctccctcctcttggtccagctgctcactccttgctcagctcagttttctgtgcttggaccctctgggcccatcctggccatggtgggtgaagacgctgatctgccctgtcacctgttcccgaccatgagtgcagagaccatggagctgaagtgggtaagttccagcctaaggcaggtggtgaacgtgtatgcagatggaaaggaagtggaagacaggcagagtgcaccgtatcgagggagaacttcgattctgcgggatggcatcactgcagggaaggctgctctccgaatacacaacgtcacagcctctgacagtggaaagtacttgtgttatttccaagatggtgacttctatgaaaaagccctggtggagctgaaggttgcagcactgggttctaatcttcacgtcgaagtgaagggttatgaggatggagggatccatctggagtgcaggtccaccggctggtacccccaaccccaaatacagtggagcaacgccaagggagagaacatcccagctgtggaagcacctgtggttgcagatggagtgggcctatatgaagtagcagcatctgtgatcatgagaggcggctccggggagggtgtatcctgcatcatcagaaattccctcctcggcctggaaaagacagccagcatttccatcgcagaccccttcttcaggagcgcccagccctggatcgcagccctggcagggaccctgcctatcttgctgctgcttctcgccggagccagttacttcttgtggagacaacagaaggaaataactgctctgtccagtgagatagaaagtgagcaagagatgaaagaaatgggatatgctgcaacagagcgggaaataagcctaagagagaggaaaaaaatccagtacttgactccagatgtaattctgtatccagacatggcaaatgccatcctccttgtttctgaggaccagaggagtgtacagcgtgctgaggagccccatgacctaccagacaaccctgagagatttgaatggcgttactgtgtgcttggctgtgaaagcttcatgtcagagagacactactgggaggtggaagtgggggacagaaaagagtggcatattggggtatgtagtaagaacgtggagaggaaaaaagtttgggtcaaaatgacaccggagaacggatactggactatgggcctgactgatgggaataagtatcgggctctcactgagcccagaaccaacctgaaacttcctgagcctcctaggaaagtgggggtcatcctggactatgagactggacatatctcgttctacaatgccacggatggatctcatatctacacatttctgcacgcctcttcctctgagcctctgtatcctgtattcagaattttgaccttggagcccactgccctgaccgtttgcccaataccaaaagtagagagttcccccgattcccgaccttagtgcctgatcattccctggagataccactgaccccaggcttagctaatgaaagtggggagcctcaggctgaagtaacatctctgcttctccctgcccagcctggagctaagggtctcaccctccacaacagccagtcagaaccatatagctacaggcacacactgaagcactttactgatattcattcaattattccataggacagttgtttgagtttggtgccaccttattggcccctttatacagataaggaaactggggtgtagaaaagtgtattgactttacaaagcagacaggaatagtgaacaacagagctgggatctgaacaacaatgactaacattaatggagaatttaaaacgttctgagtgctgtgttatgagctttggtgggtgtcactcctttaatcctcacaacaccctgtcaggtagtctcatttggcaagtatggaagcagaggcagggcaacattaagtagcttacataactcacacggtaatttgtgcagttgggagatgttcagcttcagtccctggccaattgcccgttcttttccagcctgatttttcctgcatgggaagagcccacatgtagccctgaggttcccttcccaggacagctccaggatcgagatcactgtgagtggttgtggagttaagacccctatggactccttcccagctgattatcagagccttagacccagcactccttggattggctctgcagagtgtcttggttgagagaataacgttgcagttcccacagggcatgtgactttgaaagagactagaggccacactcagttaataatggggcacagatgtgttcccacccaacaaatgtgataagtgatcgtgcagccagagccagccttccttcagtcaaggtttccaggcagagcaaataccctagagattctctgtaatattggtaatttggatgaaggaagctagaagaattacagggatgtttttaatcccactatggactcagtctcctggaaaaggatctgtccactcctggtcattggtggatgttaaacccatattcctttcaactgctgcctgctagggaaaactgctcctcattatcatcactattattgctcaccactgtatcccctctactgggcaagtgcttgtcaagttctagttgttcaataaatttgttaataatgctgactcttc

SEQ ID NO: 142360 - DNA, 2935 bp, Homo sapiens
  misc_feature (1)...(2935): n = a,t,c or g
acgcgtccgcttcggaatgagagactcaaccataatagaaagaatggagaactattaaccaccattcttcagtgggctgtgattttcagaggggaatactaagaaatggttttccatactggaacccaaaggtaaagacactcaaggacagacatttttggcagagcatagatgaaaatggcaagttccctggctttccttctgctcaactttcatgtctccctcttcttggtccagctgctcactccttgctcagctcagttttctgtgcttggaccctctgggcccatcctggccatggtgggtgaagacgctgatctgccctgtcacctgttcccgaccatgagtgcagagaccatggagctgaggtgggtgagttccagcctaaggcaggtggtgaacgtgtatgcagatggaaaggaagtggaagacaggcagagtgcaccatatcgagggagaacttcgattctgcgggatggcatcactgcagggaaggctgctctccgaatacacaacgtcacagcctctgacagtggaaagtacttgtgttatttccaagatggtgacttctacgaaaaagccctggtggagctgaaggttgcagcattgggttctgatcttcacattgaagtgaagggttatgaggatggagggatccatctggagtgcaggtccactggctggtacccccaaccccaaataaagtggagcgacaccaagggagagaacatcccggctgtggaagcacctgtggttgcagatggagtgggcctgtatgcagtagcagcatctgtgatcatgagaggcagctctggtgggggtgtatcctgcatcatcagaaattccctcctcggcctggaaaagacagccagcatatccatcgcagaccccttcttcaggagcgcccagccctggatcgcggccctggcagggaccctgcctatctcgttgctgcttctcgcaggagccagttacttcttgtggagacaacagaaggaaaaaattgctctgtccagggagacagaaagagagcgagagatgaaagaaatgggatacgctgcaacagagcaagaaataagcctaagagagaagctccaggaggaactcaagtggaggaaaatccagtacatggctcgtggagagaagtctttggcctatcatgaatggaaaatggccctcttcaaacctgcggatgtgattctggatccagacacggcaaacgccatcctccttgtttctgaggaccagaggagtgtgcagcgtgctgaagagccgcgggatctgccagacaaccctgagagatttgaatggcgttactgtgtccttggctgtgaaaacttcacatcagggagacattactgggaggtggaagtgggggacagaaaagagtggcatattggggtatgtagtaagaacgtggagaggaaaaaaggttgggtcaaaatgacaccggagaacggatactggactatgggcctgactgatgggaataagtatcgggctctcactgagcccagaaccaacctgaaacttcctgagcctcctaggaaagtggggatcttcctggactatgagactggagagatctcgttctataatgccacagatggatctcatatctacacctttccgcacgcctctttctctgagcctctatatcctgttttcagaattttgaccttggagcccactgccctgaccatttgcccaataccaaaagaagtaagangagttcccccgatcctgacctagtgcctgatcattccctggagacaccacttgaccccggggcttagctaatgaaagtgggggagcctcaggctggaaagtaacatctctgcttctccctgcccaccctgggagctgaaggtctccccttctgcaacaaccaatcagaaccataagctacaggcacgcactgaagcactttactgatattcattccattattccatatgacagttgttttgagtttcgtaccaccttattgtccccttatacagataaggaaactggggtgcagaaaggtgaattaactttacaaagtagacatgacaagtgaacagcagagctgggatctaaacagcaataactaacattaacagagaatttaaaatgttcttagtgctgtgttataagctttggtggatgtcactcctttaatcctcacaacaccctgtcgggtagtcatattttgcaagtatggaagctgaggcagggcaacatgaagtaacttacataattcatacagtaatttgtgcagttgggagatgttcagccttagtccctggctaattgcctgttcttttccagcctgattttttttcccacaggaagagcccacatgtagccctgaggtttccttcccaggacagctgcagggtagagatcattttaagtgcttgtggagttgacatccctattgactctttcccagctgatatcagagacttagacccagcactccttggattagctctgcagagtgtcttggttgagagaataacctcatagtaccaacatgacatgtgacttggaaagagactagaggccacacttgataaatcatggggcacagatatgttcccacccaacaaatgtgataagtgattgtgcagccagagccagccttccttcaatcaaggtttccaggcagagcaaataccctagagattctctgtgatataggaaatttggatcaaggaagctaaaagaattacagggatgtttttaatcccactatggactcagtctcctggaaataggtctgtccactcctggtcattggtggatgttaaacccatattcctttcaactgctgcctgctagggaaaactgctcctcattatcatcactattattgctcaccactgtatcccctctacttggcaagtggttgtcaagttctagttgttcaataaatgtgttaataatg

SEQ ID NO: 142361 - DNA, 3471 bp, Homo sapiens
atgacaccggagaacggatactggactatgggcctgactgatgggaataagtatcgggctctcactgagcccagaaccaacctgaaacttcctgagcctcctaggaaagtgggggtcatcctggactatgagactggacatatctcgttctacaatgccacggatggatctcatatctacacatttctgcacgcctcttcctctgagcctctgtatcctgtattcagaattttgaccttggagcccactggcctgaccgtttgcccaataccaaaagtagagagttcccccgatcccgacctagtgcctgatcattccctggagataccactgaccccaggcttagctaatgaaaaaaactcagatggagaaagtgatgctggctcacacctggctgacacctcaatggcttccagggccaaggcccagagagtgaatataccaggccacctggaggcaggctttcctgagagcacctcccgcttccttttcctgctggcttttaacttttgccccgggggccacagccagctttctcacttggtagcagtggcctcttgtgcctttttctccaagatcacccaggctgaagctcctgaggggactcacatcagttatcttgctgctccagaagggtgggagatggcagttttcccaagctccggtctccccagatgtctgctcaccctcattctcctccagctgcccaaactggattcagctccctttgacgtgattggacccccggagcccatcctggccgttgtgggtgaggacgccgagctgccctgtcgcctgtctccgaacgcgagcgccgagcacttggagctacgctggttccgaaagaaggtttcgccggccgtgctggtgcatagggacgggcgcgagcaggaagccgagcagatgcccgagtaccgcgggcgggcgacgctggtccaggacggcatcgccaaggggcgcgtggccttgaggatccgtggcgtcagagtctctgacgacggggagtacacgtgctttttcagggaggatggaagctacgaagaagccctggtgcatctgaaggtggctggccttggggctaagcccctcattgaaatcaaggcccaagaggatgggagcatctggctggagtgcatatctggagggtggtacccagagccccaggtgcagtggagaacttccaagggagagaagtttccatctacatcagagtccaggaatcctgatgaagaaggtttgttcactgtggctgcttcagtgatcatcagagacacttctacgaaaaatgtgtcctgctacatccagaatctccttcttggacaggagaagaaagtagaaatatccataccagcttcctccctcccaaggctgactccctggatagtggctgtggctgtcatcctgatggttctaggacttctcaccattgggtccatatttttcacttggagactatacaacgaaagacccagagagaggaggaatgaattcagctctaaagagagactcctggaagaactcaaatggaaaaaggctaccttgcatgcagttgatgtgactctggacccagacacagctcatccccacctctttctttatgaggattcaaaatctgttcgactggaagattcacgtcagaaactgcctgagaaaacagagagatttgactcctggccctgtgtgttgggccgtgagaccttcacctcaggaaggcattactgggaggtggaggtgggagacaggactgactgggcaatcggcgtgtgtagggagaatgtgatgaagaaaggatttgaccccatgactcctgagaatgggttctgggctgtagagttgtatggaaatgggtactgggccctcactcctctccggacccctctcccattggcagggcccccacgccgggttgggattttcctagactatgaatcaggagacatctccttctacaacatgaatgatggatctgatatctatactttctccaatgtcactttctctggccccctccggcccttcttttgcctatggtctagcggtaaaaagcccctgaccatctgcccaattgctgatgggcctgagagggtcacagtcattgctaatgcccaggacctttctaaggagatcccattgtcccccatgggggaggagtctgcccctagggatgcagacactctccattctaagctaatccctacccaacccagccaaggggcaccttaaggaatatctcagctcatctgttttcctttcctctaacccctctcctccatagccttctgaggcttcacctgctagctttacccagtctgtttcttcctgttgggtggcaattaattaatcctgtgaaggttacattgctgctgctagagagggtggggattgcaccttccaaatctgtttctgtaccaatatttgggggatggaggggtgactcaaactgcttctagtgttctcctaatcccttaagactagaacctataggaaactacttggagcaaactcaaaggacagattagggatcgagattgggtcaggttagcatggggttgtggttgaaatatcttggtatccaggataagggtatgtggaaaaacaggctttaggcaagtggaaaattcaaaatgtgctgtgaaaggacaatctcaggctgaaatcccataaaggaacttggagggaatattatgatggagggaagtgaggtgaatccaggcacatgatgaacacctggctcatccatagagttttcacagcctatatcgcaaattttctaagccacgtcctataggacagaggagactggccccacttctatgggtctgagctgtggaaaagggagagcagagaggaactgagatgagcagggatgaagggtcaggcagaaagcgtgatagaggagagaatttttgacaaaactcaaaagttgtttgcacagctgttctttgtaccctgttccttcctctgcgccctcctgtttctcccttgcctggaagtcattccaccctcaatttgttgatccacaagtttccagttgtcctcttctttttgttatagcatctctctatttcaaagacattcctagaagtcatccttcagtgatatcaccacttgctcagtcaccatctcaaccttatgtcacctcagccctcatctcaatgcccaaaccccttacacacaccttcagttagcttcaactgcctccgtttccacactgtgcacctttcactttccctacccagctttcctacatgctgcctctcctcagggtcccctgaatgctgcatcattgtgttcagtgcagctggactgattgcacctgtgtatttgcccctgagcactttcctttacacatgtggcttgtcttgccaatagactccaggcttacaccttccatttccatcgtattctccagtttccaggatagatgttgctcatcgtctttacctaataaataagtttgtctgattgctg

SEQ ID NO: 142362 - DNA, 509 bp, Homo sapiens
gcatggaaagtctttatttgagccccttagctgatgtggaatcagaagagcaaaaaggtcatcttcagagtggcctgggctgggtccttttctctccaggatagaaaagtggtggtcactttatccctagtagacatgctgctgggctttatcgccccagcattcccatcccctccagagccccttgtcactccagaccagcgagtgtgggcctttatctggactctgcttcctccctggggacaccaggtcttggagcaagagaacttggcaggctctccccatggcagtcttattcctcctcctgttcctatgtggaactccccaggctgcaggtaaggggcaagaggtacgggattccttagctatttgcaaggttggggagggactactgctctttctcctaggagcctggcgaaggcatctgactcaagaagatagaattaccccaaccaacctcatcctgcctctgacactagggaagacccagaggcaacgagggtccaggt

SEQ ID NO: 142363 - DNA, 730 bp, Homo sapiens
cgttccaggacgctgaggaccacctcctcccctaacgcacagcccaacgatcctaaaagtaaaaaccctgagtttctgagtcaagactgagctggtggggtggggaccgagtaggcgtggatggggagcccagcggtccccagcggagaaaatgggtgagacgcctggggccgcggtctccagaattcgcctgggagggagagtggcgctacggcgccatgtccgtggggagccgcttcgggctccggattgtccgctggggcccgacgcttgggtcccgacgcgcggttcgcactttccaggtttcttccccagggaacagagcttgagcggggggccacccccccgtcctaccggagttctgaggtgcggtcaggcgcggagagcggacgcccagcgccagattctgtgggctccggagttcaggcccactgagccgcagctgagcacaggcggggcaggaaaaaggatgaggtaagtttgttcctgtcaattgggaaccccctcaaccacttccattccccaaatacctgcgctgctaccgatgcctcttggagaccaaggagttagggtgccttctgggatctgacatctgcctcaccccagctggcagcagctgcatcactctccacaaaaagaacagcagcggttctgacgtcatggtgagtgactgccgaagtaaggagcagatgagtgattgttcaaatacccgaacttctccggtgtctgg

SEQ ID NO: 142364 - DNA, 1477 bp, Homo sapiens
atgcagaccttcccagttgctggggcgctggaccctgctatactggacacaaggccccgccttctttgtttcgtcactcggttgcttaccctcaggtatcccttaactctagaattcgcctgggagggagagtggcgctacggcgccgccttcctggggagccgcttcgggctccggatgtccgctggggcccgacgcttgggtcccgacgcgcggttcgcactttccaggtttcttccccagggaacagagcttgagcggggggccacccccccgtcctaccggagttctgagaccagcgagtgtgggcctttatctggactctgcttcctccctggggacaccaggtcttggagcaagagaacttggcaggctctccccatggcagtcttattcctcctcctgttcctatgtggaactccccaggctgcagacaacatgcaggccatctatgtggccttgggggaggcagtagagctgccatgtccctcaccacctactctacatggggacgaacacctgtcatggttctgcagccctgcagcaggctccttcaccaccctggtagcccaagtccaagtgggcaggccagccccagaccctggaaaaccaggaagggaatccaggctcagactgctggggaactattctttgtggttggagggatccaaagaggaagatgccgggcggtactggtgcgctgtgctaggtcagcaccacaactaccagaactggagggtgtacgacgtcttggtgctcaaaggatcccagttatctgcaagggctgcagatggatccccctgcaatgtcctcctgtgctctgtggtccccagcagacgcatggactctgtgacctggcaggaagggaagggtcccgtgaggggccgtgttcagtccttctggggcagtgaggctgccctgctcttggtgtgtcctggggaggggctttctgagcccaggagccgaagaccaagaatcatccgctgcctcatgactcacaacaaaggggtcagctttagcctggcaggcagcggttctgacgtcatggtgagtgactgccgaaagtaaggagcagatgaagtgattgttcaaaatacccgaacttctccggtgtctggcttctggatattctctcaaatactgcttcctggatttctgcaatgacccttcaaaacagagggctctatactccttagtgtgactgcagcaaactttggtgtaaaattccaccagtttccagccaccttcctgacttctatctgggcttggccaggacttctagtccctcataccagccctccttgcctccgtccagccactggaccccagccttggctcttcctcttggttgacgcccttcagcacacttactgctactctgtacccccagccctactgcccaccaggtttccgctcttgtcccctagtccctggatgtttctcccaaataaatttgtgtggtaaactgtaaaaaaaa

SEQ ID NO: 142365 - DNA, 692 bp, Homo sapiens
ctcccgggtcgacgatttcgtctggtagtgagctcagaccctgcagtgggatggggtgctctctgctaggtgctgaccccgcacaggtatggggtgctgtctgccaggtgctgaccccgcagagatccgttcttccccctctccttcctggtcaacagctggctcccagggatgctggatgacctctttcagtccatgttcctgtgcgccctgctgctcttctggctgtgcgtgtaccacgggattcgtgtccagggagaaagaaagtgtttaactttctatttgcctaaattcttcattgttggactattgtggttggcttctgttacgctaggaatatggcaaacggaatgaaggtcttcttcatggtggtggcagcggtgtacattctgtacctcttgttcttgatagtgcgggcgtgttccgagctacgtcacatgccttatgtggcaccaccagccgagttcttatctttctatggcctgttgaacttctatctctacaccttggcctttgtatattctccatcgaagaatgccctctatgagtcccagctgaaagacaatcctgccttctccatgctgaatgactcggatgatgatgtgatttatgggagtgactatgaggaaatgccgctgcagaacggccaggccatccgggccaagtacaaggaggagtcagatagtgactga

SEQ ID NO: 142366 - DNA, 415 bp, Homo sapiens
cgagcgatgggcatctctcgggacaactggcacatgcgccgtaaaaccgggggcaagagaaagccctaccacaagaagcggaagtatgagttggggcgcccagctgccaacaccaagattggcccccgccgcatccacacagtccgtgtgcggggaggttgtactcgtaaaacaaggatcatcgatgttgtctacaatgcatctaataacgagctggttcgtaccaagaccctggtgaagaattgcatcgtgctcatcgacagcacaccgtaccgacagtggtacgagtcccactatgcgctgcccctgggccgcaagaagggagccaagctgactcctgaggaagaagagattttaaacaaaaaacgatctaaaaaaattcagaagaaatatgatgaaaggaaaaagaatgccc

SEQ ID NO: 142367 - DNA, 346 bp, Homo sapiens; identical to SEQ ID NO: 130533
  misc_feature (1)...(346): n = a,t,c or g

SEQ ID NO: 142368 - DNA, 657 bp, Homo sapiens
atggggcctctttccagccagcgccgagtgatgggcatctctcaggacaactggcacaagcgccgcaagactggcagcaagagaaagccctacgacaagaagcggaagtatgagttggggcacctggctgccaacaccaagattggcccccaccacatccacacagtccgtgtgtggggaggtaacaataaatacggtgccctgaggcgggacatggggaatttctcctggggttcagagtgttgtactcgcaaaacaaggatcactgatgttgtctacgatgcgcccaatagcaagctggtccgtaccaagaccctggtggagaactgcttcgtgctcactgacagcacaccgtaccaccagtggtatgagtcccactatgcgctgcccctgggctgcaagaagggagccaaactgactcctgaggaagaaaagactttaaacaaaaaacgatctaaaaaaattcagaagaaatacgatgaaagggaaaagaatgccaaaatcagccgtctcctgggggagcagttccagcagggcaagcttcttgcatgcgtcgcttcaaggctgggacagtgtggccaagcccatgtctatgtgccagggggcaaggagatggagttctatcttaggaaaatcaaggcccggaaaggcaaataa

SEQ ID NO: 142369 - DNA, 747 bp, Homo sapiens
tcccggtgaattcacgcgtgcgccacgcgtacggcgccgagcgatgggcatctctcgggacaactggcacaagcgccgcaaaaccgggggcattagaaagccctaccacaagaagcggaagtatgagttggggcgcccagctgccaacaccaagattggcccccgccgcatccacacagtccgtgtgcggggaggtaacaagaagataccgtgccctgaggttggacgtggggaatttctcctggggctcacagtgttgtactcgtaaaacaaggatcatcgatgttgtctacaatgcatctaataacgagctggttcgtaccaagaccctggtgaagaattgcatcgtgctcatcgacagcacaccgtaccgacagtggtacgagtcccactatgcgctgcccctgggccgcaagaagggagccaagctgactcctgaggaagaagagattttaaacaaaaaacgatctaaaaaaattcagaagaaatatgatgaaaggaaaaagaatgccaaaatcagcagtctcctggaggagcagttccagcagggcaagcttcttgcgtgcatcgcttcaaggccgggacagtgtggccgagcagatggctatgtgctagagggcaaagagttggagttctatcttaggaaaatcaaggcccgcaaaggcaaataaatccttgttttgtaattcccccatgtaataaaggtggtttattgctttgctcccacaatatatgttgcctgaaaaa

SEQ ID NO: 142370 - DNA, 1259 bp, Homo sapiens
cccaggaccttgggccccgtcctagtgacgacggagaagagggccgctgccgctgcagtggctcgtgggtgagagcaagtgaagaccgccgcagcatcaggggcctggactcaactcctccccagagtcggaggtgttgcgccatgcccggggtggccaattcaggcccctccacttcctctagggagactgcaaacccctgttccaggaagaaggtgcattttggcagcatacatgatgcagtacgagctggagatgtaaagcagctttcagaaatagtggtacgtggagccagcattaatgaacttgatgttctgcataagtttacccctttacattgggcagcacattctggaagtttggagtgtcttcattggctgctctggcatggagctgatatcacacacgtaacaacgagaggttggacagcatctcacatagctgcaatcaggggtcaggatgcttgtgtacaggctcttataatgaatggagcaaatctgacagcccaggatgaccggggatgcactcctttacatcttgctgcaactcatggacattctttcactttacaaataatgctccgaagtggagtggatcccagtgtgactgataagagagaatggagacctgtgcattatgcagcttttcatgggcggcttggctgcttgcaacttcttgttaaatggggttgtagcatagaagatgtggactacaatggaaaccttccagttcacttagcagccatggaaggccaccttcactgtttcaaattcctagtcagtagaatgagcagtgcgacgcaagttttaaaagctttcaatgataatggagaaaatgtactggatttggcccagaggttcttcaagcagaacattttacagtttatccagggggctgagtatgaaggaaaagacctagaggatcaggaaactttagcatttccaggtcatgtggctgcctttaagggtgatttggggatgcttaagaaattagtggaagatggagtaatcaatattaatgagtgtgctgataatggatcaactcctatgcataaagctgctggacaaggccacatagagtgtttgcagtggttaattaaaatgggagcagacagtaatattaccaacaaagcaggggagagacccagtgatgtggcaaagaggtttgcccatttggcagcagtgaagctgttagaggagctacagaaatatgatatagatgacgaaacgaaatggtggatccgggaattcaggggcaat

SEQ ID NO: 142371 - DNA, 2683 bp, Homo sapiens
atgccatcgacaacaatcttagcccccatcacagcagcaatccgaacccaggtactcccctccataatccccgagtcgatgaccgtcgtgaatctccagcgcatttccgcccccccaccacacgcgcagcagtacgttttgcagtaccaccatcggcggtcgcacatatccagcaccctagcagcccggtctgcgggtgcgtgcctctctcggtgtaccctcccggctgactaccgcgtagcggttgtcatttcctcgcctcccagcacccactcgcgcaatcgtattcaattaccggtcatcagcccatgcacaaccccgtgctgcactcgccctagtgactattgtacagcccaagtgtctaccaaaggtccttccccccctactatttcaatacgcgtgctgactacggtaagcaacccgattccggcaaagcgttacatcggctgcaggccaaggcgggtatacagcaaatcctctcaccagcgtaagcaatcgtacagtactagtgttcgcgaagcgtacagtacaagtgttcgcgaagcgtgcagttggcgcaggcggcaaaccgttacatccgcggcacgcgtaggcgggttactagcaaatcctgtaacagggaggtgcgcatcgccctccacccgccccgcccctgcttccccactcccaagccagcgccaaccccgccaccttatcagtcgtcctatccccaccccaccccaccccaccccacccccatatcaatacgcgtgcacacgtgggtcagcaatacagtacaacaggtcgccaagcgtcctgttggcggtggccggaaaccctttagcatttccaggtcatgtggctgcctttaagggtgatttggggatgcttaagaaattagtggaagatggagtaatcaatattaatgagcgtgctgataatggatcaactcctatgcataaagaaaaatgttcaacaggaagttttgcctacatttttggattcacagacctcagttcctatggcagtgttcatatacaaaaatgttcaacaggaagttttgcctacatttttggattcacagacctcagttcctatggcagtgttcatatacgttccaggaagaaggtgcattttggcagcatacatgatgcagtacgagctggagatgtaaagcagctttcagaaatagtggtacgtggagccagcattaatgaacttgatgttctccataagtttacccctttacattgggcagcacattctggaagtttggagggagaaggcaataagggtggaaaaactgggccgagaggggaatccaggttggtgatgcccctggagggcagccaagtggctggagtcgggaggctggaaagagactccgagaaagtaccagcggaaggcggcgcgccgctacggcgattcgcagggagtagcagacgaagacgggtggccgccgcactagccaccacgtgtgagggataaacggtctacacggccattccggcgccgagtctagggaaagagttagcgacgacggggaaagaaaatgtgaagagagcgaccgccgctccagggtcgctgcaggaagcctaagtgcagacgccggcttctcccgcagtgacttgagaagggtcagtgaaaacctcggccactgccgcagcgtctctagggagagagttaggggagatagtggccacagtcacagctgctcttgggagaaagttaggggagacagcacccttctgcagcagcgacgtgaattttagtggaagctggaggccaccaaactaccgactccaggggaacagccagagaagaccgaggcctccgcctcagtggtccttgggagggagtcagtgacattcgggacccgcgaactagtgacttcggggatagagtcagtgacgatcgcagtcgccgcttcagtggctcctgggagggagggagtgtcgaaggcggccacagcgttggtagttcttgggaggaagtaagtggagaccgcggctacgcagccagcgactcctctggtgtgagcggcagtgaagacgccagctaccgcttcagtggcttttgggagagagaaagtgaagacgaaggtttccgctgcagcttctgggagagagcaagagaggaccttgggccccgtcctagtgacgacggagaagagggccgctgccgctgcagtggctcgtgggtgagagcaagtgaagaccgccgcagcatcaggggcctggactcaactcctccccagagtcggaggtgttgcgccatgcccggggtggccaattcaggcccctccacttcctctagggagactgcaaacccctctgctggacaaggccacatagagtgtttgcagtggttaattaaaatgggagcagacagtaatattaccaacaaagcaggggagagacccagtgatgtggcaaagaggtttgcccatttggcagcagtgaagctgttagaggagctacagaaatatgatatagatgacgaaaatgaaattgatgaaaatgatgtgaaatattttataagacatggtgttgagggaagcactgatgccaaggatgatttatgtctgagtgacttggataaaacagatgccagaaggcaagagtggaagcagggaaatcagttagggggctatcgctatagttcaggagagagttgtttatggcttggactggagtggagatga

SEQ ID NO: 142372 - DNA, 2505 bp, Homo sapiens
atgagtgaactcccattcacaattgcttcaaagagaataaaatacctaggaatccaacttacaagggacgtgaaggacctcttcaaggagaactacaaaccgctgctcaatgaagtaaaagaggacacaaacaaatggaagaacattccatgctcatgggtaggaagaatcagtatcgtgaaaatggccgtactgcccaaggtaatttatagattcaatgccatccccatcaagctaccaatgactttcttcacagaattcgaaaaaactactttaaagttcatatggaagcaaaaaagagcccacattgccaagtcaatcctaagccaaaagaacaaagctggaggcatcacgctacctgacttcaaactgtactacaaggctacagtaaccaaaacagcatgtgttcctgtgtgcacgggcatctgcagccaggcctgtaggggaccgctccccgaagatgttgggggtctttccaggaaagtggtgagttcagaagttgccctggtgcataggaagagaataccccaaggggctactgaaagggccttgagtagggcactgattggtccattttacagggtgctgactggtccattttacaaacctctagctagccacagagcactgactggtgcatttttacagagcgctgactggcgcattttacaatcctcttgtaagatatcaaagttctccaagtccccacccaacccagaagtccagctggcttcacctctcaatcccccctctaaacaggacaccccaactgctgctaggaattgggcgatgcccactctagctacttcctgctggatagggaaggaaacaagcaaagaaatctccaaaggaccacaaaaactcccaggctatcggttatgtccccttcaagctgtagggggaggggaatttggcccaacccagggtctagggcaaaccttcaacctcacttggagagatgtcatgctattgttagatcaaaccctggcctttaatgaaaagaatgcagctttagttgcagcccaagagtttggagatacctggcatctcagtcacgtaaatgacagaatgacagtcgaagaaagggacaaattccctactggtcagcaagccattctcagtgtggatccccaccgggtcctcgactcagatcatggggactggagtcgtgaacatctgttaacctgtgtcctagaaggactaagcagaattaggaaaaagcccatgaattattcaatgacatccaccataactcagggaaaggaagaaaatcctaccgccttcctcgagcggctacaggaggccttaagaaaatatacttccctgttacccgactcactcgagggtcaattgatcctaaaagataagtttattacccagtcagctgcagatatcaggataaagctccaaaagctagccctggcccctgaacaaaatttggacgcattattaaacctggcaacctccgtgttctacagtagggatcgagaagaacaggctgaaaaggaaaaacggctgtcctcaaggtccgttaccatccgaggctcagtgttaatctcctgtcccggacagctgtcctcaaggtccattaccatccgaggaatcctgggacagtctgtaaccaggagtacaaaaaccagtcagtggagactagtgcaagatcttagactcatcaatgaagcagtaattcctctatatccagttgtacccaagccctataccctgttctctcaaataccaaaggaagcagaatcgttcacagttctggacctcaaggatgccttcttctgtattcccctgcactctgactcccagtttctctttgcctttgaggatcctacagatcacacgtcccaacttacgtggacagtcttgccccaaaggttcagggatagccctcacctgtttggtcaggcactggtccaagatctaggccacttctcaagtccaggcactctggtccttcagtttgtggatgatttacttttggctgccagttcggaagcctcatgccagcaagctactcgagatctcttgaactttctagctaatcaagggtacaaggcatctaaatcaaaggcccagctctgcctacaacaagtcaaatatctaggcctaatcttagccagaggaaccagggccctcagcaagaaacgaatacagcctatactggcttatcctcgccctaagacattaaaacagttgcgggggttccttggaatcaccagcttttgccgactacagatccctggatacagcaagatggccaggccactctatactctaataaaggagacccagagggcaaatactcatctagtagaatgggaaccagaggcagaaacagccttcaaatccttaaagcaggccctagtacaagctccagccttaagccttcccacaagacaaaacttctctttatacgtcagagagagagcaggaatagctcttgaagtccttactcagactcacgggacaaccctacaaccagtggcaaaaggctag

SEQ ID NO: 142373 - DNA, 2628 bp, Homo sapiens; identical to SEQ ID NO: 120317

SEQ ID NO: 142374 - DNA, 1680 bp, Homo sapiens
atgacagctgaggaaagggacaaattccctactgaccagcaagccatccccagtatggatccccactgggaccctgactcagatcatggggactggagtcataaacatctgttgacctgtgttctagaaggactaaggagaattaggaaaaagcccatgaattactcaatgatgtccaccataactcagggaaaggaagaaaatccttctgccttcctcaagtggctacgggaggccttaagaaaatatactcccctgtcacccaactcactacggggtcaattgattctaaaagatacatttattacccaatcagctgcagatatcaggagaaagctccaaaagcaagccctgggccctgaacaaaatctggaggcattattaaaccaggcaacctcagtgttctataatagggaccaagaggaacaggcccaaaaggaaaaacgactgtcctcaaggtccgttaccatccggggaatcctgggacagtctgtaaccaggcctgaagctcataaaggattacaagatattgttaaacatttaaaagctcaaggcttagtaaggaaatgcagcagtgactgcaacaccccaattctaggagtacaaaaactgaatggtcagtggagactagtgcaagatcttggactcatcaataaggcaataattcctctatatccagttgtacccaacccctataccctgctctctcaaatatcagaggaagcagaatggttcactgttctggacctcaaggatgccttcttctgtattcccctgcactctgactcccagtttctctttgcctgtgaggaccccacagaccacacatcccaacttacacagacgatcttgccccacgggtttagggatagcccttacctgtttggtcaggcactggcccaagatctaggccacttctcaagttcaggcactctggcccttcagtatgtggatgatttacctttggctaccagtttggaagcctcatgccaacaggctactctagatctcttgaactttctagctaatcaagggtacaaggcatctaggtcaaaggcccagctttgcctacagcagcgagatggccagaccactctatactctaatcaaggagccccagagggcaaatactcatctagtagaatgagacccagggtcagaaacagccttcaaaaccttaaagcgggccctagtacaactccagctttaagccttcccacaggacaaaacttatctctatatgtcacagagacagcagggatagctcttggagtccttacgcaggctcatgggatgaacccccaaccagtggcatacctaagtaagaaaattgatgtagtagcaaaaggctggcctcactgtttaagggtagttgtggcagtggccatcttagtgtcagaggctatcaagataatacaaggaaaagatctcactgtctggactactcatgatgtaaatggcatactaggtgccaaaggaagtttatggctatcagacaactgcctacttagataccaggcactactccttgaaggaccggtgcttcaaatacctatgtgtgcagccctcaaccctgccacttttctcccagaggatggggaaccaatcagcatgactgccaaacttatagtccaaacttatgccgcccgagatgatctcttagaagtccacttagactga

SEQ ID NO: 142375 - DNA, 363 bp, Homo sapiens
  misc_feature (1)...(363): n = a,t,c or g
ttagccactaaatccgatttttcttggtcctctttgtggtctaggaggacaggcaagggtgcaggttttcaagaatgcatcagtaagggccactaaatccgaccttcctcggttctccttgtggtctgggaggaagactagtgtttctgctgctgcgttggtgagagcaattattccaatcagcagggtccagggaccgttgcgggttcttgggcaggggttgtttctgctgctgtcagtgagcacaactattctgatcagcaggggccagggaccattgcaggttctgcgccacactcgaattcttgctgggccntcagccgcctccccgtggggcagggcttgggacctgcagcccgccat

SEQ ID NO: 142376 - DNA, 954 bp, Homo sapiens
atgagtattaccaaggaaaaaggctctatttggatgctgcagctgaagagatgggagttaaatctttctccccaactgattaaaactggggccttttctagtgcggaatgtagctacctgagggaaaacaggaattggagaggagtaaggaagaagagtttgtcaacaggaagcaagcagtcagttaggaaaacaggaattagggaggctgtacccaacccctataccctgctctctgaaataccagaggaagcagaatggttcactgttctggacctcaaggatgcttccttctgcattcccctgcactctgactcccagtttctcttcgcttttgaggatcccacagaccacatgtcccaacttacatggatggtcttgcctcaagcgtttagggatagtcctcatctgtttggtgaggcactggcccaagatctaggccacttctcaagtccaggcactctggtccttcaggatgtggatgatttgcttttggctaccagttcggaagcctcatgccagcaggctactctagatctcttgaactttctagctaatcaaggatacaagacatctaaattgaaggcctacctctgcctacaacaagtcaaatatctagacctaatcttagccagaggaactagagccctcagcaaagaacaaattcagcctatactggtttatcctccccctaagacattaaaacaattggattttgccgatttcggaaccaccatcaaacaggattttcgcctgctggggcaaaccagcgtggaccgcttgctgcaactctctcagggccaggcggtgaagggcaatcagctgttgcccgtctcactggtgaaaagaaaaaccaccctggcgcccaatacgcaaaccgcctctccccgcgcgttggccgattcattaatgcagctggcacgacaggtttcccgactggaaagcgggcagtga

SEQ ID NO: 142377 - DNA, 3404 bp, Homo sapiens
tcattccttgctgagggccctggcccctctggctaagattaagcctagatattcgacctgctgtaggcaaagctgggcctttgacctagatgccttgtacccttgattagctagaaagttcaagagatctagagtagcctgttggcatgaggcttccaaactggtagccaaaggtaaatcatccacatactgaagggccagagtgcctgaacttgagaagtggcctagatcttgggccagtgcctgaccaaacaggtaagggctatccctaaacccgtggggcaagatcgtctgtgtaagttgggatgtgtggtctgtggggtcctcacaggcaaagagaaactgggagtcagagtgcaggggaatacagaagaaggcatccttgaggtccagaacagtgaaccattctgcttcctctgatatttgagagagcagggtataggggttgggtacaactggatatagaggaattattgccttattgatgagtccaagatcttgcactagtctccactgaccattcagtttttgtactcctagaattggggtgttgcagtcactgctgcatttccttactaagccttgagcttttaaatgtttaacaatatcttgtaatcctttatgagcttcaggcctggttacagactgtcccaggattccccggatggtaacggaccttgaggacagtcgtctatcaggaccatctgaaaacttcaccaggtctgccttgatctgctttaaatcagagagggagaaagggtcatgtacctgggtggggccaaattccccaccccctacagcttgaaggggacaaaactgacagcctggggggttttgtggtcctttggagatttctttgcttatttccttcaatgctcccaactctgaagagtcggggtttgttagagagccctttcccagaaagcctgacacccgtgtctttagtccggcggctgtgctagtcacttttaactggccaataggtgtctggtatttagcccctgaattagggaagtgtgaagagagaggcgcaggcaggagctggggctgcgtgcggtgctcacaggccagtgcgggttccaggtgagcgcaggcttggcaagccccgcactcagggcagcgggctgatgcctgctgggcttgatcagaggctgaatcccatgcatggaccgccattcccttttcacgggatgattggccacaataccaggtctccatctctttctcgcttcccctcttttcctcttgattgtctgggacgagctccctctgggctgccagagtgcccagacaatcagctctctgtaaaatggaccagtcagctctctcaggaggatgtgggtggggcaagataagggaataaaagcaggcgaccagagccagcaggggcaactggctcaggtcactttccaggctgtggaacctttgttctttcactcttcgcaataaatctcgctgctgctcactctttgggtccgcaaagcctttatgagctgtaacactcaccatgaaggtctgcaggttcactccacgaaggtctgcagcttcactcatgaggccagcaagaccacgaacccaccagaaggaatgaacaactccagatatgccgcctttaagagctgtaacactcactgtgaaggtctgcagcttcactcctgaagtcagtgagaccacgaacccaccaggaggaagaaactctggacacatctgaacatctgaaggaacaaactgcggacacatcatctttaagaactgtaacactcactgctagagtctgcggcttcattcttgaagtcagcgagaccaagaactcaccggaaggaaccaattccggacatattttgacatcccagatgggactatcacctattgccaagcggagggaaactagtgcttctgctgctgcgttggtgagtgcaactattccaatctgcagggtccagggaccattgcgggttcttgggcaagaggtgtttctgctgctgcttcgccttcctacagctccccttcctattaatgataagcctcctctaatctcccctgcccagaaggaaacaagcaaagaaatctccaaaggaccacaaaaacccctgggctatcggttatgtccccttcaagcagtagggggaggggaatttggcctaacccgggtacatgtccccttctccctctatgatttaaagcagatcaaggcagacttggggaagttttcagatgatcctgataggtacatagatgtcctacagggtctagggcaaactttctatctcacttggagagatgtcatgctattgttagatcaaaccctggcctttaatgaaaagaacgcagctttagctgcagcccgagagtttggagatatctgggaccaaggggaacagtccaaaaaggaaaagcaagatcagagaaagaccgtagccttagtcatggccctcagacaaataaaccttggtggttcagagaggacagaaaatggagcaggtcaatcagccgggtttagggatagccctcaactgtttggtcaggcactggcccaagatctaggccacttctcaagtccaggcactcttgtccttcaatatgtggatgatttacttttggctaccagtttggaagcctcatgccagcaggctactctagatctcttgaactttctagctaatcaagggtacaaggtgtctaggtcgaaggcccagctttgcctacagcaggtcaaatatctaggcctaatcttagccagagggaccagtgcccagttagcagaactactggcacttaccctagccttagaactgggaaatggaaaaagaataaatgtgtatacagatagcaagtatgcttatctaatcctgcatgatcatgctgcaatatggaaagaaagggcgttcttaacctctgggggaacccccattaaataccacaaggaaattatggagttattgcacacagtgcaaaaacccaaggaagtggcagtcttacactgccaaagccatcaacaagctcaaggctctgtggctctacaatcagcagatggaaaaggcagccaggcttttgtcattttcttcaagtcagcaggttccctctggccaaagatatgttcagaaatgccatccaggatccatggcctggaaatggaagccttcagaatccacttggtgctctattccactgtggctgaggtggaacccaaaaaacaagacaaaattcttctcactattcccacccatttttataagcacatgagtctctctccacgaccaccactggcccaggcccacagaatggagcttcctgagagtcgaactgcagtgattgtttttgctcttctggatctagccacccagtggagctaccgagctctgggctggtactggggactgtctgcaaagagtcctgtgatgtaa

SEQ ID NO: 142378 - DNA, 1566 bp, Homo sapiens
atgtttcggaaggatgaagaactgacttcctcacagagggatttagctgtaaggaactgggcatggagcctagcccgtggtgagcgctcagcaaacatgcacgcagtacacacctcgcttctagtggaaaggacaatactgaccacgaccaaggaaagagggtctaccttgcaatatcccttaagacctggagctcataaaggattgcaagatattgttaaacgtttcaaagctcaagccttaataaggaaatgcagcagtccctgcaacaccccaattctaggagtacaaaaaccgaatggtcagtggagactagtgcaagatcttagacttatcaatgaggcagtaattcctctatatccagttgtacccaacccctataacctgctctctcaaataccagaggaagcagaatggttcactgttctggacctcaaggatgccttcttctgtattcccctgcactctgactcccagtttctctttgcctttgaggatcccacagaccacacgtcccaacttacgtggacggtcttgcccccagggtttagggatagccctcccctgtttggtcaggcactggcccaagatctaggccacttctcaagtccaggcactctggtccttcagtatgtggatgatttacttttggccaccagttcagaagcctcttgccagcaggctactctagatctcttgaactttctagctaatcaagggtacaaggtgtctaggtcaaaggcccagctttgcctacagcaggttaaatatctaggcctaatcttagccaaagggaccagggccctcatcaaggaacgaatacagcctatactggcttatccttgccctaagacattaaaacagttgcgggggttccttggaattaccggcttttgccaactatggatccccggatacagcgagatagccaggcccctctatactctaatcaaggacacccagagggcaaatactcatctagtagaatgggaatcagaggcagaaacagccttcaaaaccttaaagcaggccctagtacaagcgccaggtttaagccttcccacaggacaaaacttctctttatatgtcacagagagagccgggatagctcttggagtccttactcagactcgtgggacaaccccacaaccagtggcacacctaagtaaggaaactgatgtagtagcaaaaggctggcctcactgtttaagggtagttgcagcagtggccgtcttagtgtcagaggctatcaaaataatacaaggaaaggatctcattgtctggactactcatgaagtaaatggcatactaggtgaaaaggaagtttatggctatcagacaaacgcctatttagataccaggcgctctgccttgagggactggtgcttcaaatacgcacgtcctgtggcagccatcttgctgttactcgcctttgggccctgtatttttaaccttcctgtcaaatttgtttcctctagaatcgaggccatcaagctacagatggtcttacaaatggacccccaaatcagttcaactaacaacttctaccgaggacccctggactga

SEQ ID NO: 142379 - DNA, 1143 bp, Homo sapiens
ttataggacatgggaaggtcccaatactaacagtagaatgcttaggactctaacaggttttcggactgcatcagtaaggttagccactaaatccgatttttcttggtcctcttgtggtcttcctcggttctccttgtggtctgggaggagactagtgtttctgctgctgcgttggtgagagcaattattccaatcagagggtccagggaccgttgcgggttcttgggcaggggttgtttctgctgcgtcagtgagcacaactattctgatcagcaggggccagggaccattgcagttctgtttggtcaggcctggcccaatatctaggccaattctcaagtccaggcactggcccaagattaggccacttctcaagtccaggcactctggtccttcagtatgtggatgattacttttggctaccagtttggaagcctcatgccagcaggctactctagtctcttgaactttctcgcttgccacactcgaattcttgctgggcctcagccgcctccccgtggggcaggcttgggacctgcagcccgccatgcccgagccccactgtggtgggctccgtgcggcccgagcctccctgatgggcactgccccctgctccatggcgccggtaccatcgacaacccaagggctgaggaatgcaggtgcatggcacgggctggcaggcagctccacccgtggccccagcgcgggatccactaggtgaaccagctgggctcctgtgtctagctcagggattgtaaatgcaccaatcagcaccctgtcaaatggaccaatcagctctctgtaaaactgacctatcagctctctgtaaaacgaccaatcagctctcgtgagagcccgcagttcattctcgaagtcagtgaaaccaagaacccaccaattcttccacatgttcaacatcggccccgcgcgggacggtccgccgcctccctctcctgctccccacggacccggaacacttccgtaccggggcagttccaggccggggtcaccgccgcccccgcctcgaactcccccagtcagctccttcctttgccacagcagcggcgcgccggtgacacgtcgagacgcggcagcacaggcgcacctgctctgctctcgcttccctttttccttcataggcat

SEQ ID NO: 142380 - DNA, 510 bp, Homo sapiens
atttataccttgatccttaccatgctcatctacaaagtggtaattttccagggatcgtaaatcataaatgtgttctctggcacttgtaacaacacgctctgatccattccttatgaggtaagatagaacaagcaacgacttataaacttttctccaattctttttgttgtcttttaacattcgtgaccaaagcatgttcataagttctggaaattgttcatacataaatgtagccttggcaatctctcccatgagttgcccagaaggtccccaaggatcatcgttcgttgcctctcgaaccttagactcgatctctgaataattcataacaacattggtggctttgtccaccagctcgcgcaccttccacatgttcaacatcgtgccccgcgcgggacggtccgccgcctccctctcctgctccccacggaccccggaacacttccgtaccggggcagttccaggccggggtcaccgccgcccgccgcctcgaactcccccagtcagctc

SEQ ID NO: 142381 - DNA, 816 bp, Homo sapiens
gatgcaaatagctcagaggtccatggtttatctaacaattaagccattaaacctgagtcaagttgaaggaaaaccatccccttggttatccgttgatactgccttgtatattctcaaggaaaatgagagtcaagcaaatctacagcttgtgtgttttaccgaactacgaaatagagaagtgtttggatggactggtgaactaggacctggaatttactggttaattccttccacaactggctgtaggctgaggaaaaaaataaaaccagtaacagatgaagcccaacttgtatatagagatgaaacaggggaattattccttacaaaggaatttaagtctactttatcagatatatttgaagtaattgatttagatggaaatggtcttcttagccttgaagaatataatttttttgaattgagaacaagtggtgagaaatgtgatgaagatgcttgggctgtctgcagagagaattttgatacaaagaggaatgaactaacaagacaaggatttatggatttgaatctaatggaagctaatgatcgagaaggagatccttgtgacctttgggtaactctacactctatgggctacaataaagctctggagttgacagaggcatgtccatttgtcattgatatctatgcagaaaaatgcaagccaaaaattaaagctgtccatatggaggcatgtagtggacaacttgagaaggccatttgtaaatctgttcttagcaacggtgatgccaaagtaatggatggctatgaaaatataatcgtgcatacttacagttgtgacacctggataacgtcagt

SEQ ID NO: 142382 - DNA, 1314 bp, Homo sapiens
atgaagggtgtggccaagtttgataaggaagttagttcagaggggccatctcaatcaaagctagaagctattcatccagacaatggggagattagactcccgtctaaacagaagccaggacctattgtgcaagacaatggaataaccccgaaggcattttggagatcatcaaggctgccccctcacttcacaggtccagactgcaagggactgggggaacagaacaatttcaaggctctgctctttgccaagctctttggctgccccaagttcagctctagtgaattcaaacacaggcctagatcctgggtaaacactggtgaaaaaggcagtctctgccatgtaggagttcccagggcagtagaagaaatggaaagtaaacaggttatgaacatagaatgggataagcgcctcgaagggggaaatagaggtgataggaacaccagaaaaagctcccaaaccagacactggaggctcagaaagcacttcttggaggaaacgatgtttaaattgagacctgaggaacaagtaggagttgggagaatatggcggatggtggaatggaggggaaaggtggagaatgtagtggagggtgggatggagggtaaaggtgattcaggtggaaagaagagcagcttccaaggcctgggggcaggagggaggtgccatggttccccaagactgaagcttggaatgaaggaaaaacatacttcaaaagcagaactactaaaatcatttaagcaattagatgtaaatgatgatggctgtattttacacactgacctttataaatttctaacaaagagaggtgagaagatgactcgagaagaagtaaatgccataataaatttggctgatgtaaatgctgatggcaaatttgactacatcaaggtgtttggatggactggtgaactaggacctggaatttactggttaattccttccacaactggctgtaggctgaggaaaaaaataaaaccagtaacagatgaagcccaacttgtatatagagatgaaacaggggaattattccttacaaaggaatttaagtctactttatcagatatatttgaagtaattgatttagatggaaatggtcttcttagccttgaagaatataatttttttgaattgagaacaagtggtgagaaatgtgatgaagatgcttgggctgtctgcagagagaacttatcttcatttgacacgtttatcatctgtcaggctcaacgagaaccccacagctctgtagagcagaaactttgttcaattcactgttgtatccgtagtaccgagaacctaataggtgctcaataa

SEQ ID NO: 142383 - DNA, 1464 bp, Homo sapiens
tcacgatgtagagtagcatgcgtactccctttttgccatttgtggtttaataactgcatcttccaagtaccacatgaacaggaacttgtctgtcttttcagcacgccagcggcactcctgctgcggtcgatctagaggatccctctcttttaccccatcactcccagcggacatttcaccatgtctggagacatttttggttgtcacaattagtgggacggttcttctgacatcaagatgggtagaggccagggatgctgttaaacatcctgggcctcgtcgcatatctctagaagctgcccaccgcgaatccactggagtgctgactggtctttgagatctacaagtggggcggcttatctctggtccacactggcctctcatcctccaagaagttatttcatgcttgttgacatggcaggtgacctctgccacattatactggtcaaagccagtctcacagccaaccctagattcaaggggtggggaaatagattccagctcttgatgggaggagctgccgctcatgtggccagttttgcagtaggagggactattagcaagaaggacgaggcaggactggatgaccgggattgttggataaacttttgaaattgatttcacttcatctcctcttgcactattggaatctgtgctttttaatgtgctacaattggcttcaccctgacctttgaatttctcagcatctggtagctgtacttgctgagatgtatctttgctcttggcttcccccaaaatgtagaggtatctgaagctgggctcttgtagacatctggcattccgttcatcagcacatgaaacattctccaagatagaccatatgataggccacagaacaagtctcaataaatttaagatgtccgtgtacaaactgtccatcattgactgtgccatgtcaggcactgagactgggtaatttacgacgaaaaagaggtttaatggactcacagttccatgtggatccaggtcacgctgatgcaagaggtgggttcccatggccttggtcggctctttccctgtggctttgcagggtatagccccactcttgactgctgtcatgggctggtgttgagtgtttgcggctttttcaggtacacagtgcaagctgtcagtggatttaccattctggggtctggaggatattggctctcttctcacagctccaccagacagtgccccagtggggactccatgtgggggctcacaccccaactcctgatgggtgactggcaaggtcacactgtagtacaggatatggatggcatatttttggaaaacatcagttaccacaaacagggatggaagcataaaataaatgtctgttagtgagttggaggtggccttttgtaacagtgtaatggtcaggtctgcggtacattcatggtttttatccggtattactaactctcctatagctagctcatcctctgaatttcctctcat

SEQ ID NO: 142384 - DNA, 1392 bp, Homo sapiens
atgtgggctctcagtgacatggtggtgctaagcgtcaggcccatggagcccatcatcaccaatgaccgcttcacctctcagaggtacgaccagggcgggaacttcacctcggagatgatcatccacaatgtggagcccagtgattcggggaacatcagatgcagcctccagaacagtcgcctgcatggatctgcttaccttaccgtccaagttatgggagagctgttcattcccagtgttaatcttgtagtcgctgagaatgaaccttgtgaagttacttgtctaccctcacactggacccggctcccggatatttcctgggagctcggtctcctggtcagccattcaagctattattttgttccggagcccagcgaccttcaaagtgcagtgagcatcctggctctgaccccacagagcaatgggactttgacttgcgtggctacctggaagagcctgaaggcccgcaagtctgcaactgtaaatctcactgtgattcggtgtccccaagacactggaggtggtattaatattccaggtgtattatcaagtttaccgagtttaggtttttcattgcctacttggggcaaagttggacttggactagcaggcaccatgcttctgacgccgacgtgtactcttacaatacgctgctgctgctgccgccgtcgttgttgtggctgcaactgctgctgccgttgttgtttctgctgtagaagaaaaagaggtgacattcttctgacatctttcccacatccccagagattaggtgcatgcatcaatggcgtcattttgtgtatactcatttatgtctgccttcttgagcctctcactgtgagactgatccataccgtggcacgaaatctgaaaaagagaagacaaacaaagaaactgagacagaaagtggaaatgaaaactccggctacaattcagatgaacaaaagaccacagacaccgcttctctccctcccaaatcctgtgaatccagtgatcctgaacaaagaaacagtagctgtggccctcctcaccagagaagacatagaccttgttgtggtcaactggccacttgagagctgccagaatagtgaagctacagcttgtagaagcagtcagggtgacgctggtacagaggttccttttaagaacttccccagaccaggccccgtagccctgcagccctgccaggcctatgtcaccaggttcgtgctgtgtggggtgatgaggacctctgaattccgaatgccttggtccaagatcgcagaacaggatagttttggttttgtgaacaggacggcaactgctgaccacatacactcgctctctgctcatgctgcatcctcctctgctgaaactggtgatctgttaacactcggcaatttcaggaggacttaa

SEQ ID NO: 142385 - DNA, 970 bp, Homo sapiens
atgggaaaatttattacatgggtgatagaattgctaagaagccacgagaagattggtgcaactcagagactgacaaaagcctttaccaccctaggcaggagtacatatcggttgaatgcaagtattgatgaaggacagatggatggatggatggatggatggatggatggatggatggaaggatggatgaacgggtacactcgccagcagttttgccacgagagtacaccgaacaaaggagacagggtcatttataacctgatgcatccaccctactgctgtttccggtttctactggctggaacggaacctcacattctgtgtttatcccaattggcgagcaacttagaactttttaaaagaggcaaaggtagacaagaacaaaggaaggaggaagtaacttgcggaatgctgagaagagtaaaaacacttttaaataaggaaaaggaacaggctatgacccaatgcttgcttggaccagtataagcatgccaaggcaaatatttaggctaaattgtgggagctaagaacataaagtacgttgatttctttatgacggctagcagatatttaagaatgttagcacaggtctttgaataaattttgcttataagagaagttaccatttattcctaattagacagggaagaaagtctttgaagagaaacctctactttactttttacaaagatgtcatgaaaaaggaatgctattaaaaaatcggagacaaacaaagggctcttagaaattaaaaattaagttagatcatctgaaattaaaattttaaattaagatgaggagatataatgaagtttcccactaaataatatgaaaaaacaaaattaaaaaccaaaaaaatggaatggacaataacagggcccactgaatatccaaatgatgagttcaaaaagaccctcacgaagacatatactcatgaaatttcagaacactgaagaaaatgaaagagaaa

SEQ ID NO: 142386 - DNA, 375 bp, Homo sapiens; identical to SEQ ID NO: 129194

SEQ ID NO: 142387 - DNA, 882 bp, Homo sapiens; identical to SEQ ID NO: 122390

SEQ ID NO: 142388 - DNA, 2207 bp, Homo sapiens
atgggccgggcgaggcggctcacgcctgtaatcccggcactttgggagaccgaggcggacggatcacgagctctaacagtggaaaccacagtcactcaactacaacatttaaatacagtgggaataattggattccgaggtggcaggggccaagtggcagcagtcaactgtcaaaagcgagatatccagccttttaccagggtaactgtgcattggggaaagagaaatgatcagacatttcaagcactagtggacactggccttgagctgacattgattcccggggacccaaaacatcattgtgatcctccagttaaagtaggggcttatggacatcaggtaattaatggagttttagctcagattcaaattacagtaggtccagtgggtccctggactcaccctgtggtcattttcacagtgcctaaatgcataattgacatagacatacttaggtggcagaactcccacactggctccctgactggtaggatgaaggctattatggtgggaagggccaaatggaagccgttagagctgcctctgcctagaaaaacagtaaaccagaaaccatatcacacccctgtagggactgcagaaattagtgccaccatgaaggacttgaaagatgcaggggtggtgattccaaccacaaccctgttcaactctcctatttggtctgtgcagaagacaggtggatcttggagaatgacagtggattattgtatgcttaaccaagttgtgtctgcagttgaagctattgtactagatgtggtttcattgcttgagcaaattaacacatctcctgccatagagtgggtcatgcacagcagcattccatcatcaaatggaagtggtacatacatgatcgggctcaagcaggtcctaaaggcacaacctgcaccaatggcctcatggggagtttcctatgatcagtggacagaggaagagaagactacggcctggttcacagacggttcttcacgatatgctagcaccacccgaaactggacagctgcagcactacagtccctttctaggatatccctgaaggacagctgtgaagggaaatcttcccaccacccgtgtcatggaggcaaggatggaggttatgcatgggctcagcaacatggactttcactcaccaaggttgacctggctatggccactgctgagtgcccaatttgccagcagcagagaccaacactgagccctcgatatggcaccattcctcagggtgatcagccagctacctggtggcaggttgattatatgggacctcttccatcatggaaagggcagagattatatgtgatctcaggagatgtgtatgggttcaagttgacaagggatggacttatgatggttaatacggagtgtcaacttgattggattgaaggatgcaaagtattgatcctaggcctgatgaattacaaatctcaagggactgccttctccctgggctgctgttttgaaaagaaaaaaacaagaaaatttgaggatactatgcctggagaggtggttgaaaataggtacaatgaacaagggctctgtcatcctgggaccctctatcctaggaaacaagtggaacaaatcaaaagatttatactaactgaagaatataaaactatcagacagaagaatttcccagaaagcagcagcaaagaaaaagaaaatgctgctccttgcaaggccacagcaagtccctcagcctctgctcccccaccctataatccttctatcacttccactcctcacacccggtctggcttacagtttcgttccgcgactagccctcccccacctgcccgacaatttcctcttaaagaggaggctggagctaaaagcacagtcaagggatcttgcttcaagtgccagaaatctggccactgggccaaggaatgcctgcatcccgggattcctcctaagccgtgtcccatctgtgtggaaccccactggaaatcggatggtccaacttgcctggcagccactcccagagcccctggaattctggcccaaggctctctgactgactcctttccagatcttcttggcttagtggctgaagactgatgctgcccgattgcctcggaagtccccataaaatcttccttcagcttaatgtctcccactctaggttcccacaccgcccctaatcccgctcgaagcagccctgagaaacatcgcccattatctctccataccat

SEQ ID NO: 142389 - DNA, 765 bp, Homo sapiens; identical to SEQ ID NO: 137761

SEQ ID NO: 142390 - DNA, 774 bp, Homo sapiens; identical to SEQ ID NO: 140783

SEQ ID NO: 142391 - DNA, 859 bp, Homo sapiens
atccatctgaccttgcccctcctccccaggctgctcctcaccaggccaagccaggtcccaattcttcctcaacctccactctcccaccctataatgcttctatcacctcacctcttcacacccagtctggcttacagtttctttctacccagagggaccagaaggccatcttattctcaatatgtattttattacccaatccactcccaacattagaaaaagctccaaaaattagattccgccctcaaaccccacaacaggacttaattaaccttgccttcaaggtgtacaataatagagaagaggcagccaagcggcaatgtatttctggattgcaattacttgcctccgctctgagagaaaccccagccacatctccagcacacaagaacttcaaaacgcctaaaccacagtggccaggcattcctccaggacctcctcccccaggatcttgcttcaagtgccggaaatctggccactgggccaagcgaatgcccgcagcccaggattcctcctaagccgtgtcctatctgtgcaggtccccactcgaaatcggactgtccagcttgcccaaaagccactcccagagcccctggaactctgccccaaggctctctgactgactccttcccagatcttcttggcttagtggctgaagactgacactgcccgatcgcctcggaagccgcctagaccatcacggacaccgagcttcgggtaactctcacagtggaaggtaagcccgtccccttcttaatcaatacggaggctactcactccacattaccttcttttcaagggcctgtttcccttgcctccataactgttgtgggtattgacgggcaggcttctaaaactc

SEQ ID NO: 142392 - DNA, 841 bp, Homo sapiens
ccaggagtaagaggagcccagggtggtccctctatccccaggcagtgtgaagagtctgctattggtcctaaatttgcttggatcatctcttcctttcactggaagcaaggcatgttcaacatggaggctccttcttcccttttctttgtcaacatgtgtgcagtaaagaagcagacaacctggggccggccagacagaggattcatctggcagtcactcccagagcccctggaattccggcccaaggctctctgtctgactccttcccagatcttcttggcttagcgactgaagactgatgctgcccgatcgcctcggaagccccataattatggaagccaaggagtcccacaatctgccatctgaaagctggagaaactggagagctagtattgtaattcagtctgaagggaaccaatggtgtaactctcagtccaaggccaaagacctgagaatgggggcaaggtggagttgggggcactggtgtaaatccctgagtctgaaggtctgagaacctgaagttctgatgtcctgcctgcaactgacctgagtattctctgtattgtggctctgcatggtatggcattttcccctcctcttgggaactgtgaataattaactctcgtttaaatgcaattgtctcctgatctattggcttcactatatcaaaatccttggcaataacttttccttgtctctttctctcatatttcccatacagtgcatccgaaaatccaatccattttacctctgaaatttgtgctgcatacaaccactttttaccaagaggatttgctgataaatggcaacagagcaggccccagttgagcagctgtatcat

SEQ ID NO: 142393 - DNA, 609 bp, Homo sapiens
atgcctcgcccccagcgcgcgctcccggcgccggccccgccccctcacccaggcggcgccgtaaagccggagaaggggcggggtctcagctcctacttcattctacggccgagaccggaggatgttccctgctcaggaggaggccgacaggaccgtgtttgttgggaatttagaggcccgagttcgggaagagattctgtacgagctgttccttcagtgctgcagcttccttactatgaaatgacagctccacttcctaatagtgcatccgtgtcttcctcactgaatcatgttccagatcttgaggctggacccagctcatataaatggactcaccaacaaccaagtgactctgacctttatcagatgacagctccacttcctaatagtgcatccgtgtcttcctcactgaatcatgttccagatcttgaggctggacccagctcatataaatggactcaccaacaaccaagtgactctgacctttatcagatgaataaacgaaagagacaaaagcaaacaagtgatagtgatagtagcacagacaacaacagaggcaacgaatgtagccaaaagttccgaaagtctaagaagaagaaaagatactag

SEQ ID NO: 142394 - DNA, 584 bp, Homo sapiens
ggggaagtcccggaggatgttccctgctcaggaggaggccgacaggaccgtgtttgttgggaatttagaggcccgagttcgggaagagattctgtacgagctgttccttcagtttcttataggcggggccactaaccaaagtgactatatgcaaagacagagaaggaaagccaaagtcttttggatttgtctgctttaaacacccagaatcggtgtcttatgccatagctttgctgaatggaattcgtttatatggaagaccaattaacgtgcagtatcgatttgggagttctcgctcttctgaaccagctaaccaaagttttgagagctgtgttaagataaattcacacaactacaggaatgaagaaatggtggtgggcagatcttcctttcccatgcagtattttccaattaataatacttctttacctcaagaatattttctctttcagaagatgcagcggcatgtgtataatccagtgctgcagcttccttactatgaaatgacagctccacttcctaatagtgcatccgtgtcttcctcactgaatcatgttccagatcttgaggctggacccagctca

SEQ ID NO: 142395 - DNA, 457 bp, Homo sapiens
catgaccatgcattacgagattccggtccgtacccggagatcaaaagggacgacataactccctcagaacgcctggtgaacaacatgcctcactgaacaggtgctatttaagctgatatctcaatgactaattatgcaaggattgagaggaaccatttagggagaggaaacagcaactccaaagaccctaagctacgagagagctctgagcatttgaggaaattaaagaccagagtggtgaacgagcagaccaggcttggtctcataatggagacgtttgtgggccgaggcggagaggctccattttactttcaatgtgacaaacatctgtcacggagttttcagggactcggtctgatctgtctgtaaaaagcctgtaaaactgctctctgggcagggcatctctgaaagaaaggcagcagccccagtcaggggcttatagataaaactcccatct

SEQ ID NO: 142396 - DNA, 761 bp, Homo sapiens
atgggacttgactgtctcacccctgaatccccactgggaaagaaggtgactatcccagtggcttttccatctagtatgatggatgagaggcccatgaaggaagcagccaccaaaggttctgcagtggctcctgttggctttctgatcacatcgcagctggctgtcaagtccgtggcccagcgatttatggcgtccctgggcaggaggagcctgtgcaaggctactgctgcagcagcccagggacagcgcatctctgaaagaaaggcagcagccccagtcaggggcttacagataaaattcccatctccctgggacagagcacctgggggaaggggtggctgtgtgcgcagcttcagcagacttaaatgttactgcctgctggctctgaagtgggtccctgacccctggcctcctggaggacacctcccagcaggggtcaacagacacctcatacaggagagctccagctggcatctggcaggtgcccctctgggacaaggcttccagaggaaggaacaggcagcaatctttgctgttctgcagcctccgctagtgatacccaggcaaattgggtctggagtggacctccggccaacagggtctggagttgacctccagcaaactccagcagacctgcagcagaggtgtctattagaaggaaaacttaacaaacagaaaggaatagcatcaacatcaacaaaaacaatgtccacacagaaaccgcacaccaataggtcaccaacatcaaagaccaaaggtag

SEQ ID NO: 142397 - DNA, 948 bp, Homo sapiens
atgcctcgcccccagcgcgcgctcccggcgccggccccgccccctcacccaggcggcgccgtaaagccggagaaggggcggggtctcagctcctacttcattctacggccgagaccggaggatgttccctgctcaggaggaggccgacaggaccgtgtttgttgggaatttagaggcccgagttcgggaagagattctgtacgagctgttccttcaggtgctctgtccaagggagatgggaattttatctataagcccctgactggggctgctgcctttctttcagagatgccctgctcagacaggaggaatctagagaggcaatcaggctacagtgactttgtagccctgagctttgtttacactgtgaggggaaaaccacctactcaagcctcagtaatggcagaagctcctcctcccaccaagcttaagcatcccaggtcaacttctgactgctgtgctggcagtgagaatttcaagccagtggatcttagcttgctgggctccgtggaagagggatctgctgagcaagaccacttggctccctggcttcagccccctttccaggggagggaacagttctgtctcgttggtgttccaggcgccactggtgtacggaaaaaaaaaaaacaactcctgcagctaactgggtgtctgcccaaacagctgcccagatacctcagctgccacgtccagactcttcccactctcccacctgcaagagaaacatcctcaggccaaagaatgatgcatgccacagggcagtctgtccatgagagaacaaacctgaggaatgagaacccaggtcccaggaacaagcttccatcatttgagcagagaattctgggacctgagtacctagatggtcaagaagcaggaaatggggaggacactcctaggcagagagccatgcagggaaggctagagtgggaactgactaaagcatga

SEQ ID NO: 142398 - DNA, 269 bp, Homo sapiens
atgccgcagactcgtgagcacatcctgctgggtcgtcaggtaggcgttccgtacatcatcgtgttcctgaacaaatgcgacatggaagctggagtcattcactgcaagggccatcaaaaggcatcagatcccattgctcaggacaacgcttatgctgataagggtcccggccgatatggccgggtccacgctagttccaaggaaccaggaggcccaatccggagacctctagcggtggcacccttgaaaaaggcaggtggtaccagaag

SEQ ID NO: 142399 - DNA, 483 bp, Homo sapiens
ttgcggaattcggcacgaggacgcatgtactttctgcttccccgctccttcagctatactcactctttgttgagtctcccacaattaccattgttcctggcccggacttcaatctggcctcccacattattcctgataccacacctgacccccatgactgtatctctatgatccacctgacattcaccccatttccccatatttccttctttcctgttcctcaccctgatcacgcttgatttattgatggcagttccaccaggcctaatcgccacacaccagcaaaggcaggctatgctatagcacaagccactatcccgcctcttagaacctctcatttcctttccatcgtggaaatctatcctcaaggaaataacttctcagtgttccatgtgctattctactactcctcagggattattcaggccccctcccttccgtacacattaagacgagatcgtcgacccgggacttcaagagcgg

SEQ ID NO: 142400 - DNA, 1175 bp, Homo sapiens
gaaaagtactgaagggccttaagggacatgatcaggccatctctgtccaccaactggtgtttatcaaagttaggctcctacgcttccacagagactggaagacaggggccttatctttcctaatgatatttcaaagggatggctcccaggtccttgaaaaacatattccacagttgaagaaaatagatatacacctcaaaaagacagagaaaggatttacaattgcaagatttcaaaggattaaagcccgttatcacttgcctgttacagcttggccttttaaagcctataaactctccttacaattcccccactttacctgtccaaaaaccagacaggccttacagcaaaccgaactcattgccttaactcaatccctcacttttgcaaaggaattacacgtcaatatttttactgactctaaatatgccttccatatcctgcaccaccatgctgttatatgggcagaaagaaatttcctcactacacaagggtcctccatcattaatgcctttttaataaaaactcttctaaaagccgctttacttccaaaggaagctggagtcattcactgcaagggccatcaaaaggcatcagatcccatcactcgggacaatgcttatgctgataaggtagctaaagaagcagctagtgttccatcttctgtccctcatggccagtttttctccttctcattggtcactcctatttactctcctactgaaatttccacctatcgatctcttcccactcaaggcaaatggttcttggaccaaggaaaatatctccttccagcctcacaggcacattctattctgttgtcatttcataacctcttccacgtaggttacaagctgctagactgcctcttagaggctctcatttcctttccatcgtggaaatctatcctcaaggaaatcacttctcagtgttccatctgctattctactactcctcagggagtgttcaggccccctcccttccctacacaccgagcttggggatttgtgcctgcccaggactggcaaattgactttactcacatgcctcgagtcaggaaactaaaatacctcttggtctgggtagacactttcactggatggatagaagcctttcccacagggtctgtaaccaggccatcactaatcattctatacgacaaatgtttcttctaa

SEQ ID NO: 142401 - DNA, 702 bp, Homo sapiens
atggaggaagaacagcatattaaacaaatggtgctagaaaaattggatgatcatatgaagttttatggaagaagaagaagaaggaggaggaggaaggaggagaaggaggaagaaggaggaggaggaagaggaggaggagaaggaggaagaagaggaggaagaggaaagaagaagaagaagaacagaacatcaattagacctagagattatacattactgcaaaattattttaaaatggaccatagacataagcgtaaaattgaaaactataccactgccagaagaaatcataagaaaaaaatttatatgactttgggtatacacagaaccaaaaccacaagtcacatggactgggcatgcacaattgaaaaaggtttgatttctaacaatacccagaaccaacaattcttcctttcggaaccaagaagactgggacaggactggagcctgaagatacacaggcggctggacatagagcgaagcagatcagcagaagaggacacagcggctcgatggcaagaggacgttgagggagcacgccggcaaaagagctcaccgagagattctggtacgccagatggcaggccattgaccggcgggactaggcagagtttggctggggcagtcagaggagagcaggggccaccaagtggcagaactctaggagaaaaccgtttcccttctgtctcctatatcgactga

SEQ ID NO: 142402 - DNA, 3291 bp, Homo sapiens
tcagatgattatgtgtcttggggttgcttttctcaaggagtatctttgtggtggtctctgtgtttcctgaatttgagtgttggcctgtcttgctaggttggggaagttctcctggataatatactgaagagtgttttctaacttggctccattctccctgtcactttcagctacaccaatcagacgtagatttggccttttcacatagtcccatatttcttggaggctttgtttgttccttttcatttttttccctctaatcttgtcctcatgctttatttgattaagttgatcttcagtctctgataacctttcttccgcttgattaatttggctattgatacttgtgtaggcgtcaagaagttctcgtgctgtgtttttcaggtccattaggtcatttatgttcttctctaaactggttattctagttagaaattcctctaaccttttttcaaggttcttagcttccttgcattgggttaaaacatgctgttttagcttggaggagtttgttataacccaccttctgaagccgacttcttcttcctgtttttctttgaatgctctcctcaggttgggtgggctcaaaacactttcaaaaattttccaccgttctgctgtttcctcagctgttctgtctctcctgttgtttcctgactttttaatgattgccattctaactggtgtgagatgatatctcatagtggttttgatttgcatttctctgatggccagtgatgatgagcatttcttcatgtgttttttggctgcataaatgtcttcttttgagaagtgtctgttcatgtccttcgcccactttttgatggggttgtttgtttttttcttgtaaatttgtttgagttcattgtagattctggatattagccctttgtcagatgagtaggttgcgaaaattttctcccatgttgtaggttgcctgttcactctgatggtagtttcttttgctgtgcagaagctctttagtttaattagatcccatttgtcaattttggcttttgttgccattgcttttggtgttttggacatgaagtccttgcccacgcctatgtcctcaatggtaatgcctaggttttcttctagggtttttatggttttaggtctaacgtttaaatctttaatccatcttgaattgatttttgtataaggtgtaaggaagggatccagtttcagctttctacatatggctagccagttttcccagcaccatttattaaatagggaatcctttccccattgcttgtttttctcaggtttgtcaaagatcagatagttgtagatatgcggcattatttctgagggctctgttctgttccattgatctatatctctgttttggtaccagtaccatgctgttttggttactgtagccttgtagtatagtttgaagtcaggtagtgtgatgcctccagctttgttcttttggcttaggattgacttggcgatgcgggctcttttttggttccatatgaactttaaagtagttttttccaattctgtgaagaaagtcattggtagcttgatggggatggcattgaatctgtaaattaccttgggcagtatggccattttcacgatattgattcttcctacccatgagcatggaatgttcttccatttgtttgtgtcctcttttatttccttgagcagtggtttgtagttctccttgaagaggtccttcacatcccttgtaagttggattcctaggtattttattctctttgaagcaattgtgaatgggagttcactcatgatttggctctctgtttgtctgttgttggtgtataagaatgcttgtgatttttgtacattgattttgtatcctgagactttgctgaagttgcttatcagcttaaggagattttgggctgagacgatggggttttctagataaacaatcatgtcgtctgcaaacagggacaatttgacttcctcttttcctaattgaataccctttatttccttctcctggctgattgccctggccagaacttccaacactatgttgaataggagtggtgagagagggcatccctgtcttgtgccagttttcaaagggaatgcttgcagtttttgcccattcagtatgatattgtctgtgggtttgtcatagatagctctctggtagaattcggctgtgaatccatctggtcctggactctttttggttggtaaactattgattattgccacaatttcagagcctgttattggtctattcagagattcaacttcttcctggtttagtcttgggagagtgtatgtgtccaggaatgtatccatttcttctagattttctagtttatttgcgtagaggtgtttgtaggattctctgatggtagtttgtatttctgtgggatcggtggtgatatcccctttatcattttttattgtgtctatttgattcttctctctttttttctttattagtcttgctagcggtctatcaattttgttgatcctttcaaaaaaccagctcctggattcattgattttttgaagggttttttgtgtctctatttccttcagttctgctctgattttagttatttcttgccttctgctagcttttgaatgtgtttgctcttgcttttctagttcttttaattgtgatgttagggtgtcaattttggatctttcctgctttctcttgtaggcatttagtgctataaatttccctctacacactgctttgaatgcgtcccagagattctggtatgtggtgtctttgttctcgttggtttcaaagaacatctttatttctgccttcatttcgttatgtacccagtagtcattcaggagcaggttgttcagtttccatgtagttgagcggctttgagtgagattcttaatcctgagttctagtttgattgcactgtggtctgagagatagtttgttataatttctgttcttttacatttgctgaggagagctttacttccaactatgtggtcaattttggaataggtgtggtgtggtgctgaaaaaaatgtatattctgttgatttggggtggagagttctgtagatgtctattaggtctgcttggtgcagagctgagttcaattcctgggtattcttgttgactttctgtctcgttgatctgtctaatgttgacagtggggtgttaaagtcttccattattaatgtgtgggagtctaagtctctttgtaggtcactcaggacttgctttatgaatctgggtgctcctgtattgggtgcataaatatttaggatagttagctcctcttgttgaattgatccctttaccat

SEQ ID NO: 142403 - DNA, 3420 bp, Homo sapiens
  misc_feature (1)...(3420): n = a,t,c or g
ctaacgaatgttcaggagggaagagtgaatataagtgtggcctgagtgaaaaggagattcagacacgtctgtaagctggtgaggccgggcatcggaaaccctatttacgcgactctgaggagcctcctgagaagccaagctctgtgccgatgggatcagacaccactgaacatgtccacggtgcttgggggcttggacaacagcagtctgacactgagacaccagacacaaagaaggagagagactgtactgaacacaaagttcatattgaatggtgaatccccaacatcgcttctccagtccagctcccagaatgtctgaggctagccttgtactattaggcaagagaatgtgagtctttcccttcttaggcacagctgcagccagccaagccatggctgtggacctggcatctctgcactcttgggggcttgggaagttcggaaggtttcccctcactgcccctgcaggctccgaggtgtctgctccctgcttctggtacccacatgctgttttggttactgtagccttgtagtatagtttgaagtcaggtagtgtgatgcctccagctttgttcttttggcttaggattgacttggcaatgcgggctcttttttggttccatatgaactttaaagtagttttttccaattctgtgaagaaagtcattggtagcttgatggggatggcattgaatctgtaaattaccttgggcagtatggccattttcacgatattgattcttcctacccatgagcatggaatgttcttccatttgtttgtctcctcttttatttccttgagcagtggtttgtagttctccttgaagaggtccttcacatcccttgtaagttggattcctaggtattttattctctttgaagcaattgtgaatgggagttcacccatgatttggctctctgtttgtctgttgttggtgtataagaatgcttgtgatttttgtacattgattttgtatcctgagagttngctgaagttgcttatcagcttaaggagattttgggctgagacgatggggttttctagataaacaatcatgtcgtctgcaaacagggacaatttgacttcctcttttcctaattgaatagcctttatttccttctcctgcctgattgccctggccagaacttccaacactatgttgaataggagcggtgagagagggcatccctgtcttgtgccggttttcaaagggaatgcttccagtttttgcccattcagtatgatattggctgtgggtttgtcatagatagctcttattattttgaaatacgtcccatcaatacctaatttattgagagtttttagcatgaagggttgttgaattttgtcaaaggctttttctgcatctattgagataatcatgtggtttttgtctttggctctgtttatatgctggattacatttattgatttgcgtatattgaaccagccttgcatcccagggatgaagcccacttgatcatggtggataagctttttgatgtgctgctggattcggtttgccagtattttattgaggatttttgcatcaatgttcatcaaggatattggtctaaaattctcttttttggttgtgtctctgcccggctttggtatcagtatgatgctggcctcataaaatgagttagggaggattccctctttttctattgattggaatagtttcagaaggaatggtaccagttcctccttgtacctctggtagaattcggctgtgaatccatctggtcctggactctttttggttggtaaactattgattattgccacantttcagagcctgttattggtcgattcagagattcaacttcttcctggtttagtcttgggagagtgtatgtgtcaaggaatgtatccatttcttctagattttctagtttatttgcgtagaggtgtttgtagtattctctgatggtagtttgtatttctgtgggatcggtggtgatatcccctttatcattttttattgtgtctatttgattcttctctctttttttctttattagtcttgctagcggtctatcaattttgttgatcctttcaaaaaaccagctcctggattcattgattttttgaagggttttttgtgtctctatttccttcagttctgctctgattttagttatttcttgccttctgctagcttttgaatgtgtttgctcttgcttttctagttcttttaattgtgatgttagggtgtcaatttcagatctttcctgctttcccttgtgggcatttagtgctataaatttccctctacacactgctttgagtgcgtcccagagattctggtatgttgtgtctttgttctcattggtttcaaagaacatctttatttctgccttcatttcgttatgtacccagtagtcattcaggagcaggttgttcagtttccatgtagttgagcggctttgagtgagattcttaatcctgagttctagtttgattgcactgtggtctgagagatagtttgttataatttctgttcttttacatttgctgaggagagctttacttccaactatgtggtcaattttggaataggtgtggtgtggtgctgaaaaaaatgtatattctgttgatttggggtggagagttctgtagatgtctattaggtctgcttggtgcagagctgagttcaattcctgggtatccttgttgactttctgtctcgttgatctgtctttctctctggctgcccttaacattttttccttcatttcaactttggtgaatctgacaattatgtgtcttggagttgctcttctcgaggagtatctttgtggtgttctctgtatttcctgaatctgaacgttggcctgccttgctagattggggaagttctcctggataatatcctgcagagtgttttccaacttggttccattctccacatcactttcaggtacaccaatcagacgtagatttggtcttttcacatagtcccatatttcttggaggctttgctcatttctttttattcttttttctctaaacttcccttctcgcttcatttcattcatttcatcttccattgctgataccctttcttccagttgatcgcatcggctcctgaggcttctgcattcttcacgtagttttcgagccttggttttcagctccatcagctcctttaagcacttctctgtattggttattctagttatacattcttctaaatttttttcaaagttttcaacttctttgcctttggtttgaatgtcctcccgtagctcagagtaatttgatcgtctgaagccttcttctctcagctcgtcaaaatcattctccatccagctttgttctgttgctggtgaggaactgcgttcctttggaggaggagaggcgctctgcgttttagagtttccagtttttctgttctgttttttccccat

SEQ ID NO: 142404 - DNA, 3171 bp, Homo sapiens; identical to SEQ ID NO: 120707

SEQ ID NO: 142405 - DNA, 4374 bp, Homo sapiens
ctatgtccctacaaaggacatgaactcatccttttttatggctgcatagtattccatggtgtgtatgtgccacatttccttaatccagtctatcattgttggacatttggcttggttccaagtctttgctattgtgaatagtgccacaataaatatacgtgtgcatgtgtctttatagcagcatgatttacaatcctttgggtatatacccagtaatgggattgctgggtcaaatggtatttctagttctagatccctgaggaatcgccacactgtcttccacaatgattgtactagtttacagtcccaccaacagtgtaaaagtgttcctatttctccacatcctctccagtacctgttgtttcctgactttttaatgatggccattctaactgctgtgagatggtatctcgttgtagttttgatttgcatttctctgatggccagtgatgatgagcattttttcatgtcccttttggctgcataaaagtcttcttttgagaagtgtctgttcatatccttcacccactttttgatgaggttgtttgttttttccttgtaagtttgtttgagttctttgtagattctggatattagccctttgtcagacgagtagattgcaaaaattttctcccattttgtaggttgcctgttcactctgatggtagtttcttttgctgtgcagaagctctttagtttaatgagatcccatttgtcagttttggcttttgttgccattgcttttggtgttttagatatgaagtccttgcccaggcctacgtcctgaatggtattgcctaggttttcttctagggtttttatggttttaggtctaacattgaagtctttgatccatcttgaatgaatttttgtataaggtgtaaggaagggatccagtttcagctttttccatatggcttgggcagtatggccattttcacgatgttgattcttcctacccatgagcatggaatgttcttccatttgtttgtgtcctcttttattttgttgagcagtagtttgtagttctccttgaagaggtccttcacatcccttgtaagttggattcctaggtattttattctgtgtgcatgtgtctttatagcagcatgatttatactcatttgggtatatatccagtaatgggatggctgggtcaaatggtatttctagttctagatccctgaggaatcgccacactgacttccacaatggttgaactagtttacagtcccaccaacagtgtaaaagtgttcctatttctccgcatcctctccagcacctgttgtttcctgactttttaatgattgccattctaactggtgtgagatgatatctcatagtggttttgatttgcatttctctgatggccagtgatgatgagcatttcttcatgtgttttttggctgcataaatgtcttcttttgagaagtgtctgttcatgtccttcgcccactttttgatggggttgtttgtttttttcttgtaaatttgtttgagttcattgtagattctggatattagccctttgtcagatgagtaggttgcgaaaattttctcccatgttgtaggttgcctgttcactctgatggtagtttcttttgctgtgcagaagctctttagtttaattagatcccatttgtcaattttggcttttgttgccattgcttttggtgttttggacatgaagtccttgcccatgcctatgtcctgaatggtaatgcctaggttttcttctagggtttttatggttttaggtttaacgtttaaatctttaatccatcttgaattgatttttgtataaggtgtaaggaagggatccagtttcagctttctacatatggctagccagttttcccagcaccatttattaaatagggaatcctttccccattgcttgtttttctcaggtttgtcaaagatcagatagttgtagatatgcggcattatttctgagggctctgttctgttccattgatctatatctctgttttggtaccagtaccatgctgttttggttactgtagccttgtagtatagtttgaagtcaggtagtgtgatgcctccagctttgttcttttggcttaggattgacttggcaatgcgggttcttttttggttccatatgaactttaaagtagttttttccaattctgtgaagaaagtcattggtagcttgatggggatggcattgaatctgtaaattaccttgggcagtatggccattttcacgatattgattcttcctacccatgagcatggaatgttcttccatttgtttgtctcctcttttatttccttgagcagcggtttgtagttctccttgaagaggtccttcacatcccttgtaagttggattcctaggtattttattctctttgaagcaattgtgaatgggagttcacccatgatttggctctctgtttgtctgttgttggtgtataagaatgcttgtgatttttgtacattgattttgtatcctgagactttgctgaagttgcttatcagcttaaggagattttgggctgagacgatggggttttctagataaacaatcatgtcgtctgcaaacagggacaatttgacttcctcttttcctaattgaataccctttatttccttctcctgcctgattgccctgtccagaacttccaacactatgttgaataggagcggtgagagagggcatccctgtcttgtgccggttttcaaagggaatgcttccagtttttgcccattcagtatgatattggctgtgggtttgtcatagatagctcttattattttgaaatacgtcccatcaatacctaatttattgagagtttttagcatgaagggttgttgaattttgtcaaaggctttttctgcatctattgagataatcatgtggtttttgtctttggctctgtttatatgctggattacatttattgatttgcgtatattgaaccagccttgcatcccagggatgaagcccacttgatcatggtggataagctttttgatgtgctgctggattcggtttgccagtattttattgaggatttttgcatcaatgttcatcaaggatattggtctaaaattctcttttttggttgtgtctctgcccggctttggcatcagaatgatgctggcctcataaaatgagttagggaggattccctctttttctattgattggaatagtttcagaaggaatggtaccagttcctccatgtacctctggtagaattcggctgtgaatccatctggtcctggactctttttggttggtaaactattgattattgccacaatttcagagcctgttattggtctattcagagattcaacttcttcctggtttagtcttgggagagtgtatgtgtcgaggaatgtatccatttcttctagattttctagtttatttgcgtagaggtgtttgtagtattctctgatggtagtttgtatttctgtgggatcggtggtgatatcccctttatcattttttattgtgtctatttgattcttctctctttttttctttattagtcttgctagcggtctatcaattttgttgatcctttcaaaaaaccagctcctggattcattgattttttgaagggttttttgtgtctctatttccttcagttctgctctgattttagttatttcttgccttctgctagcttttgaatgtgtttgctcttgcttttctagttcttttaattgtgatgttagggtgtcaattttggatctttcctgctttctcttgtaggcatttagtgctataaatttccctctacacactgctttgaatgcgtcccagagattctggtatgtggtgtctttgttctcgttggtttcaaagaacatctttatttctgccttcatttcgttatgtacccagtagtcattcaggagcaggttgttcagtttccatgtagttgagcggctttgagtgagattcttaatcctgagttctagtttgattgcactgtggtctgagagatagtttgttataatttctgttcttttacatttgctgaggagagctttacttccaagtatgtggtcaattttggaataggtgtggtgtggtgctgaaaaaaatgtatattctgttgatttggggtggagagttctgtagatgtctattaggtctgcttggtgcagagctgagttcaattcctgggtatccttgttgactttctgtctcgttgatctgtctaatgttgacagtggggtgttaaagtctcccattattaatgtgtgggagtctaagtctctttgtaggtcactgaggacttgctttatgaatctgggtgctcctgtattgggtgcataaatatttaggatagttagctcctcttgttgaattgatccctttaccat

SEQ ID NO: 142406 - DNA, 3048 bp, Homo sapiens
tcacagtccgctgatcctgttgtttcctgactttttaatgattgccattctaactggtgtgagatgatatctcatagtggttttgatttgcatttctctgatggccagtgatgatgagcatttcttcatgtgttttttggctgcataaatgtcttcttttgagaagtgtctgttcatgtccttcgcccactttttaatggggttgtttgtttttttcttgtaaatttgtttgagttcattgtagattctggatattagccctttgtcagatgagtaggttgcgaaaattttctcccatgttgtaggttgcctgttcactctgatggtagtttcttttgctgtgcagaagctcttgagtttaattagatcccatttgtcaattttggcttttgttgccattgcttttggtgttttggacatgaagtccttgcccacgcctatgtcctgaatggtaatgcctaggttttcttctagggtttttatggttttaggtctaacgtttaaatctttaatccatcttgaattgatttttgtataaggtgtaaggaagggatccagtttcagctttctacatatggctagccagttttcccagcaccatttattaaatagggaatcctttccccattgcttgtttttctcaggtttgtcaaagatcagatagttgtagatatgtggcattatttctgagggctctgttctgttccattgatctatatctctgttttggtaccagtaccatgctgttttggtgactgtagccttgtagtatagtttgaagtcaggtagtgtgatgcctccagctttgttcttttggcttaggattgacttggcgatgcgggctcttttttggttccatatgaactttaaagtagttttttccaattctgtgaagaaagtcattggtagcttgatggggatggcattgaatctgtaaattaccttgggcagtatggccattttcacgatattgattcttcctacccatgagcatggaatgttcttccatttgtttgtgtcctcttttatttccttgaccagtggtttgtggttctccttgaagaggtccttcacatcccttgtaagttggattcctaggtattttattctctttgaagcaattgtgaatgggagttcactcatgatttggctctctgtttgtctgttgttggtgtataagaatgcttgtgatttttgtacattgattttgtatcctgagactttgctgaagttgcttatcagcttaaggagattttgggctgagacgatggggttttctagataaacaatcatgtcttctgcaaacagggacaatttgacttcctcttttcctaattgaataccctttatttccttctcctgcctgattgccctggccagaacttccaacactatgttgaataggagcggtgagagagggcatccctgtcttgtgccagttttcaaagggaatgcttgcagtttttgcccattcagtatgatattggctgtgggtttgtcatagatagctcttattattttgaaatacgtcccatcaatacctaatttattgagagtttttagcatgaagggttgttgaattttgtcaaaggctttttctgcatctattgagataatcatgtggtttttgtctttggctctgtttatatgctggattacatttattgatttgcgtatattgaaccagccttgcatcccagggatgaagcccacttgatcatggtggataagctttttgatgtgctgctggattcggtttgccagtattttattgaggatttttgcatcaatgttcatcaaggatattggtctaaaattctcttttttggttgtgtctctgcccggctttggtatcagaatgatgctctggtagaattcggctgtgaatccatctggtcctggactctttttggttggtaaactattgattattgccacaatttcagagcctgttattggtctattcagagattcaacttcttcctggtttagtcttgggagagtgtatgtgtcgaggaatgtatccatttcttctagattttctagtttatttgcgtagaggtgtttgtagtattctctgatggtagtttgtatttctgtgggatcggtggtgatatcccctttatcattttttattgtgtctatttgattcttctctctttttttctttattagtcttgctagcggtctatcaattttgttgatcctttcaaaaaaccagctcctggattcattgattttttgaagggttttttgtgtctctatttccttcagttctgctctgattttagtgatttcttgccttctgctagcttttgaatgtgtttgctcttgcttttctagttcttttaattgtgatgttagggtgtcaattttggatctttcctgctttctcttgtaggcatttagtgctataaatttccctctacacactgctttgaatgcgtcccagagattctggtatgtggtgtctttgttctcgttggtttcaaagaacatctttatttctgccttcatttcgttatgtacccagtagtcattcaggagcaggttgttcagtttccatgtagttgagcggctttgagtgagattcttaatcctgagttctagtttgattgcactgtggtctgagagatagtttgttataatttctgttcttttacatttgctgaggagagctttacttcccagtatgtggtcaattttggaataggtgtggtgtggtgctgaaaaaaatgtatattctgttgatttggggtggagagttctgtagatgtctattaggtctgcttggtgcagagctgagttcaattcctgggtatccttgttgactttctgtctcgttgatctgtctaatgttgacagtggggtgttaaagtctcccattattaatgtgtgggagtctaagtctctttgtaggtcactcaggacttgctttatgaatctgggtgctcctgtattgggtgcataaatatttaggatagttagctcctcttgttgaattgatccctttaccattatgtaatggccttctttgtctcttttcat

SEQ ID NO: 142407 - DNA, 3534 bp, Homo sapiens; identical to SEQ ID NO: 116413

SEQ ID NO: 142408 - DNA, 3129 bp, Homo sapiens
atggtaaagggatcaattcaacaagaggagctaactatcctaaatatacatgcacccaatacaggagcacccagattcataaagcaagtcctgagtgacctacaaagagacttagactcccacacattaataatgggagactttaacaccccactgtcaacattagacagatcaatgagacagaaagtcaacaaggatacccaggaattgaactcagctctgcaccaagcagacctaatagacatctacagaactctccaccccaaatcaacagaatatacatttttttcattaccacaccacacctattccaaaattgaccacatagttggaagtaaagctctcctcagcaaatgtaaaagaacacaaattataacaaactatctctcagaccacagtgcaatcaaactagaactcaggattaagactctcactcaaagccgctcaactacatggaaactgaacaacctgctcctgaatgactactgggtacataacgaaatgaaggcagaaataaagatgttctttgaaaccaacgagaacaaagacacaacataccagaatctctgggatgcattcaaagcagtgtgtagagggaaatttatagcactaaatgcccacaagagaaagcaggaaagatccaaaattgacaccctaacatcacaattaaaagaactagaaaagcaagagcaaacacattcaaaagctagcagaaggcaagaaataactaaaatcagagcagaactgaaggaaacagagacacaaaaaacccttcaaaaaatcaatgaatccaggagctggttttttgaaaggatcaacaaaattgatagaccgctagcaagactaataaagaaaaaaagagagaagaatcaaatagacacaataaaaaatgataaaggggatatcaccaccgatcccacagaaatacaaactaccatcagagaatactacaaacacctctacgcaaataaactagaaaatctagaagaaatggatacattccttgacacatacactctcccaagactaaaccaggaagaagttgaatctctgaatagaccaataacaggagctgaaattgtggcaataatcaatagtttaccaaccaaaaagagtccaggaccagatggattcacagccgaattctaccagaggtacaaggaggaactgcatataaacagagccaaagacaaaaaccacatgattatctcaatacatgcagaaaaagcctttgacaaaattcaacaacccttcatgctaaaaactctcaataaattaggtattgatgggacgtatttcaaaataataagagctatttatgacaaacccacagccaatatcatactgaatgggcaaaaactggaagcattccctttgaaaactggcacaagacagggatgccctctctcaccgctcctattcaacatagtgttggaagttctggccagggcaatcaggcaggagaaggaaataaagggtattcaattaggaaaagaggaagtcaaattgtccctgtttgcagacgacatgattgtttatctagaaaaccccatcgtctcagcccaaaatctccttaagctgataagcaacttcagcaaagtctcaggatacaaaatcaatgtacaaaaatcacaagcattcctatacaccaacaacagacaaacagagagccaaatcatgagtgaactcccattcactattgcttcaaagagaataaaatacctaggaatccaacttacaagggatgtgaaggacctcttcaaggagaactacaaaccactgctcaaggaaataaaagaggatacaaacaaatggaagaacattccatgctcatgggtaggaagaatcaatatcgtgaaaatggccatactgcccaaggcaatttacagattcaatgccatccccatcaagctaccaatgactttcttcacagaattggaaaaaactactttaaagttcatatggaaccaaaaaagagcccgcatcaccaagtcaatcctaagccaaaagaacaaagctggaggcatcacactacctgacttcaaactatactacaaggctacagtaaccaaaacagcatggtactggtaccaaaacagagatatagatcaatggaacagaacagagccctcagaaataacgccgcatacctacaactatctgatctttgacaaacctgagaaaaacaagcaatggggaaaggattccctatttaataaatggtgctgggaaaactggctagccatatgtagaaagctgaaactggatcccttccttacaccttatacaaaaatcaattcaagatggattaaagatttaaacgttagacctaaaaccataaaaaccctagaagaaaacctagaaattaccattcaggacataggcgtgggcaaggacttcatgtccaaaacaccaaaagcaatggcaaccaaagccaaaattgacaaatgggatctaattaaactcaagagcttctgcacagcaaaagaaactaccatcagagtgaacaggcaacctacaacatgggagaaaattttcgcaacctactcatctgacaaagggctaatatccagaatctacaatgaactcaaacaaatttacaagaaaaaaacaaacaaccctatcaaaaagtgggcgagggacatgaacagacacttctcaaaagaagacatttatgcagccaaaaaacacatgaaaaaatgctcatcatcactggccatcagagaaatgcaaatcaaaaccactatgagatatcatctcacaccagttagaatggcaatcattaaaaagtcaggaaacaacacgtgctggagaggatgtggagaaataggaacacttttacactgttggtgggactgtaaactagttcaaccattgtggaagtcagtgtggcgattcctcagggatctagaactagaaataccatttgacccagccatcccattactgggtatatacccaaatgactataaatcatgctgctataaagacacatgcacacagctttcagctgacgagaattgtgctgatagcatttggaggggaagggatgactgcgaacacctctgcatacccactggaggtcaaggttttggggatgaacaggaagtaccagcagggaatgattag

SEQ ID NO: 142409 - DNA, 3573 bp, Homo sapiens
ttattgtctttctcctccaattagagtggaaagctcaatgtaagtagcatcattcattttgcggcctgaagccagggcagtggcatcctgcatcgaactaccaatgtcatttttcacagaataagaaaaagctattctaaaattcatatggaacttcaaaagagcctgaatagccaaatcaatcctgttgtttcctgactttttaatgattgccactctaactggtgtgagatggtatctcattgtggttttgatttgcatttctctgatggccagtgatgatgagcattttttcatgtgttttttggctgcataaatgtcttcttttgagaagtgtctgttcatgtccttcacccactttttgatggggttgtttgtttttttcttgtaaatttgtttgagttcattgtagattctggatattagccctttgtcagatgagtaggttgcaaaaattttctcccattttgtaggttgcctgttcactctgatggtagtttcttttgctgtgcagaagctctttagtttaattagatcccatttgtcaattttggcttttgttgccattgcttttggtgttttagacatgaagtccttgcccatgcctatgtcctgaatggtattgcctaggttttcttctagggtttttatggttttaggtctaacgtttaagtctttaatccatcttgaattgatttttgtataaggtgtaaggaagggatccagtttcagctttctacatatagctagccagttttcccagcaccatttattaaatagggaatcctttccccattgcttgtttttctcaggtttgtcaaagatcagatagttgtagatatgcggcgttatttctgagggctctgttctgttccattgatctatatctctgttttggtaccagtaccatgctgttttggttactgtagccttgtagtatagtttgaagtcaggtagtgtgatgcctccagctttgttcttttggcttaggattgacttggtgatgcgggctcttttttggttccatatgaactttaaagtagttttttccaattctgtgaagaaaggcattggtagcttgatggggatggcattgaaactgtaaattaccttgggcagtatggccattttcacgatattgattcttcctacccatgagcatggaatgttcttccatttctttgtatcctcttttatttccttgagcagtggtttgtagttctccttgaagaggtccttcacatcccttgtaagttggattcctaggtattttattctctttgaagcaattgtgaatgggagttcactcatgatttggctctctgtttgtctgttgttggtgtataagaatccttgtgatttttgcacattgattttgtatcctgagactttgctgaagttgcttatcagcttaaggagattttgggctgagacaatggggttttctagatatacagtcatgtcatctgcaaacagggacaatttgacttcctcttttcctaattgaataccctttatttccttctcctgcctaattgccctggccagaacttccaacactatgttgaataggagtggtgagagagggcatccctgtcttgtgccagttttcaaagggaatgcttccagtttttgcccattcagtatgatattagctgtgggtttgtcatagatagctcttattattttgaaatacatcccatcaatacctaacttattgagagtttttagcatgaagggttgttgaattatgtcaaaggctttttctgcatctgttgagataatcatgtggtttttgtctttggctctgtttatatgctggattacatttattgatttgtgtatattgacccagccttgcatcccagggatgaagcccacttgatcatggtggataagctttttgatgtgctgctggattcgttttgccagtattttactgaggatttttgcatcaatgttcatcaaggatattggtctaaaattctctttttttgttgtgtctctgcctggctttggtatcagaatgatgctggcctcataaaatgagttagagaggattccctctttttctctggtagaattcggctgtgaatccatctggtcctggactcttttggttggtaagctattgattattgccacaatttcagagcctgttattggtgtattcagagattcaacttcttcctggtttagtcttgggagggtgtatgtgtcgaggaatttatccatttcttctagattttctagtttatttgcgtagaggtgtttgtagtattccctgatggtagtttgtatttctgtgggatcggtggtgatatcccctttatcattttttattgcgtctatttgattcttctctctttttttctttattattcttgctagcggtctatcaattttgttgatcccttcaaaaaaccagctcctggattcattaattttttgaagggttttttgtgtctctatttccttcagttctgctctgattttagttatttcttgccttctgctagcttttgaatgtgtttgctcttgcttttctagttcttttaattgtgatgttagggtgtcaattttggatctttcctgttttctcttgtgggcatttagtgctataaatttccctctacacactgctttgaatgcgtcccagatattctggtatgttgtgtctttgttctcgttggtttcaaagaacatctttatttctgccttcatttcgttatgtacccagtagtcattcaggagcaggttgttcagtttccatgtagttgagcggttttgagtgagattcttaatcctgagttctagtttgattgcactgtggtctgagagatagtttgttataatttctgttcttttacatttgctgaggagagctttacttccaagtatgtggtcaattttggaataggtgtggtgtggtgctgaaaaaaatgtatattctgttgatttggagtggagagttctgtagatgtctattaggtctgcttggtgcagagctgagttcaattcctgggtatccttgttgattttttgtcttgttgatctgtctaatgttgacagtggggtgttaaagtctcccattattaatgtgtgggagtctaagtctctttgtaggtcactcaggacttgctttatgaatcttggtgctccttttattttgagcctatgtgtgtttttcatttcattcatttcatcttccattgctgataccctttcttccagttgatcacatcggctcctgaggcttctgcattcttcatgtagttctcgagccttggttttcagctccatcagctcctttaagcacttctctatatcagttattctagttatacattcttctaaatttttttcaaagttttcaacttctttgcctttggtttgaatgtcctcccgtagctcagagtaatttgatcgtctgaagccttcttctctcagctcatcaaagtcattctccatccagctttgttccgttgctggtgaggagctgtgttcctttggaggaggagaggccctctgctttttagagtttccagtttttctgttctgtttttttcccat

SEQ ID NO: 142410 - DNA, 7769 bp, Homo sapiens
ctagcccatctgtgagttaagaggagccccatagatgtatgatgagcaaaggtgaaagctggctaagcctggaggagcttctgactctttggcaatttcatctggtttggatcttaattttttacagttgacagcagtgttatctgagctagtcagtggcatctggctgctgttgtttcctgactttttaatgattgccattctaactggtgtgagatgatatctcatagtggttttgatttgcatttctctgatggccagtgatgatgagcatttcttcatgtgttttttggctgcataaatgtcttcttttgagaagtgtctgttcatgtcctttgcccactttttgatggggttgtttgtttttttcttgtaaatttgtttgagttcattgtagattctggatattagccctttgtcagatgagtaggttgcgaaaattttctcccatgttgtaggttgcctgttcactctgatggtagtttcttttgctgtgcagaagctctttagtttaattagatcccatttgtcaattttggcttttgttgccattgcttttggtgttttggacatgaagtccttgcctacgcctatgtcctgaatggtaatgcctaggttttcttctagggtttttatggttttaagtctaacgtttaaatctttaatccatcttgaattgatttttgtataaggtgtaaggaagggatccagtttcagctttctacatatggctagccagttttcccagcaccatttattaaatagggaatcctttccccattgcttgtttttctcaggtttgtcaaagatcagatagttgtagatatgcggcattatttctgagggctctgttctgttccattgatctatatctctgttttggtaccagtaccatgctgttttggttactgtagccttgtagtatagtttgaagtcaggtagtgtgatgcctccagctttgttcttttggcttaggattgacttggcgatgcgggctcttttttggttccatatgaactttaaagtagttttttccaattctgtgaagaaagtcattggtagcttgatggggatggcattgaatctgtaaattaccttgggcagtatggccattttcacgatattgattcttcctacccatgagcatggaatgttcttccatttgtttgtgtcctcttttatttccttgagcagtggtttgtagttctccttgaagaggtccttcacatcccttgtaagttggattcctaggtattttattctctttgaagcaattgtgaatgggagttcactcatgatttggctctctgtttgtcggttgttggtgtataagaatgcttgtgatttttgtacattgattttgtatcctgagactttgctgaagttgcttatcagcttaaggagattttgggctgagacgatggggttttctagataaacaatcatgtcgtctgcaaacacggacaatttgacttcctcttttcctaactgaataccctttatttccttctcctgcttgattgccctggccagaacttccaacactatgttgaataggagcggtgagagagggcatccctgtcttgtgccagttttcaaagggaatgcttccagtttttgcccattcagtatgatattggctgtgggtttgtcatagatagctcttattattttgaaatacttcccatcaatacctaatttattgagagtttttagcatgaagggttgttgaattttgtcaaaggctttttctgcatctattgagataatcatgtggtttttgtctttggctctgtttatatgctggattacatttattgatttgcgtatattgaaccagccttgcatcccagggatgaagcccacttgatcatggtggataagctttttgatgtgctgctggattcggtttgccagtattttattgaggatttttgcatcaatgttcatcaaggatattggtctaaaattctcttttttggttgtgtctctgcccggctttggtatcagaatgatgctggcctcataaaatgagttagggaggattccctctttttctattgattggaatagtttcagaaggaatggtaccagttcctccttgtacctctggtagaattcggctgtgaatccatctggtcctggactctttttggttggtaaactattgattattgccacaatttcagagcctgttattggtctattcagagattcaacttcttcctggtttagtcttgggagagtgtatgtgtcgaggaatgtatccatttcttctagattttctagtttatttgcgtagaggtgtttgtagtattctctgatggtagtttgtatttctgtgggatcagtggtgatatcccctttatcattttttattgtgtctatttgattcttctctctttttttctttattagtcttgctagcggtctatcaattttgttgatcctttcaaaaaaccagctcctggattcattgattttttgaagggttttttgtgtctctatttccttcagttctgctctgattttagttatttcttgccttctgctagcttttgaatgtgtttgctcttgcttttctagttcttttaattgtgatgttagggtgtcaattttggatctttcctgctttctccggttgttcctttccatgtttagcgcttccttcaggagctcttttagggcaggcctggtggtgacaaaatctctcagcatttgcttgtctataaagtattttatttctccttcacttatgaagcttagtttggctggatatgaaattctgggttgaaaattcttttctttaagaatgttgaatattggcccccactctcttctggcttgtagggtttctgccgagagatccgctgttagtctgatgggctttcctttgagggtaacccgacctttctctctggctgcccttaacattttttccttcatttcaactttggtgaatctgacaattatgtgtcttggagttgctcttctcgaggagtatctttgtggcgttctctgtatttcctgaatctgaacgttggcctgccttgctagactggggaagttctcctggataatatcctgcagagtgttttccaacttggttccattctccacatcactttcaggtacaccaatcagacgtagatttggtcttttcacatagtcccatatttcttggaggctttgctcatttctttttattcttttgtctctaaacttcccttctcgcttcatttcattcatttgatctttaatcactgataccctttcttccacttgatcggattggctcctgaagcttgtgcatgcgtcacatagtttttgtgccatggttttcagctccatcaggtcctttaaggtcttctctacgctctttattctagtcagccattcgtgtaatcttttttcaaggtttttagcttctttgcaatgggttcgaacatccttctttagctcggagaagttcgttattaccgatcttctgaagcctacttctgtcaactcgtcaaagtcattctccgtccaggtttgttccattgctggtgaggagctgtgatcctttggaggagaagaggcgctctgatttttagaattttcagcttttctgctctggattctccccacctttgtggttttatctacctttggtctttgatgatggtgtctgggaggtgtctcccagttaggatactcagggggcaggggcccacttaaggaagcagtctgtccgttctcagatctcacactccgttctgggagagccactactctcttcaaagcgctgcttttcagcagtttggctgtgatttgtttaggtgctgctttttccttatttattctccttgtgggtgcgttaaggttcttggttctcctcccacccccaactctcccctgacacacaacgtggatgtggaacttcttgattctgtcttgttttggttgataaggtacaaatagtctcacgtaaccctgtacatctggtagaaatcccccagataactgcctcttactgggtggcttgttaaacatacagattctcttgtcaaaacttctgggaatgggacccagagagctgtgtttggaaggcttctgggggattttaggtggccaatgtgatgtttgggaagcaccgggccacagcactttgctcaaggttttgctcacagttggcctaccatgtctgttgtttcctgacttttttcatgattgccattctaactggtgtgagatgatatctcatagtggttttgatttgcatttctctgatggccagtgatgatgagcatttttttcatgtgttttttggctgcataaatgtcttcttttgagaagtgtctgttcatgtcctttgcccactttttgatggggttttttgtttttttcttgtaaatttgtttgagttcattgtagattctggatattagccctttgtcagaagagtaggttgcgaaaattttctcccatgttgtaggttgcctgttcactctgatggtagtttcttttgctgtgcagaagctctttagtttaattagatcccatttgtcaattttgtcttttgttgccattgcttttggtgttttggacatgaagtccttgcccacgcctatgtcctgaatggtaatgcctaggttttcttctagggtttttatggttttaggtttaacgtttaaatctttaatccatcttgaattgatttttgtataaggtgtaaggaagggatccagtttcagctttctacatatggctagccagttttcccagcaccatttattaaatagggaatcctttccccattgcttgtttttctcaggtttgtcaaagatcagatagttgtagatatgcggcattatttctgagggctctgttctgttccattgatctatatctctgttttggtaccagtaccatgctgttttggttactgtagccttgtagtatagtttgaagtcaggtagtgtgatgcctccagctttgttcttttggcttaggattgacttggcaatgcgggctcttttttggttccatatgaactttaaagtagttttttccaattctgtgaagaaagtcattggtagcttgatggggatggcattgaatctgtaaattaccttgggcagtatggccattttcacgatattgattcttcctacccatgagcatggaatgttcttccatttgtttgtatcctcttttatttccttgagcagtggtttgtagttctccttgaagaggttcttcacatcccttgtaagttggattcctaggtattttattctctttgaagcaattgtgaatgggagttcactcatgatttggctctctgtttgtctgttgttggtgtataggaatgcttgtgatttttgtacattgattttgtatcctgagactttgctgaagttgcttatcagcttaaggagattttgggctgagacgatggggttttctagataaacaatcatgtcgtctgcaaacagggacaatttgacttcctcttttcctaattgaataccctttatttccttctcctgcctgattgccctggccagaacttccaacactatgttgaataggagtggtgagagagggcatccctgtcttgtgccagttttcaaagggaatgcttccagtctttgcccattcagtatgatattggctgtgggtttgtcatagatagctcttattattttgaaatacgtcccatcaatacctaatttattgagagtttttagcatgaagggttgttgaattttgtcaaaggctttttctgcatctattgagataatcatgtggtttttgtctttggctctgtttatatgctggattacatttattgatttgcgtatattgaaccagccttgcatcccagggatgaagcccacttgatcatggtggataagctttttgatgtgctgctggattcggtttgccagtattttattgaggatttttgcatcaatattcatcaaggatattggtctaaaattctcttttttggttgtgtctctgcccggctttggtatcagaatgatgctggcatcataaaatgagttagggaggattccctctttttctattgattggaatagtttcagaaggaatggtaccagctcctccttgtacctctggtagaatttggctgtgaatccatctggtcctggactctttttggttggtaagctattgattattgccacaatttcagatcctgttattggtctattcagagattcaacttcttcctggtttagtcttgggagagtgtatgtgtcgaggaatgtatccatttcttctagattttctagtttatatgcgtagaggtgtttgtagtattctctgatggtagtttgtatttctgtgggatcggtggtgatatcccctttatcattttttattgtgtctatttgattcttctctctttttttctttattagtcttgctagcggtctatcaattttgttgatcctttcaaaaaaccagctcctggattcattgagtttttgaagggttttttgtgtctctatttccttcagttctgctctgattttagttatttcttgccttctgctagcttttgaatgtgtttgctcttgcttctctagttcttttaattgtgatgttagggtgtcaattttggatctttcctgctttctcttgtgggcatttagtgctataaatttccctctacacactgctttgaatgtgtcccagagattctggtatgttgtgtctttgttctcattggtttcaaagaacatctttatttctgccttcatttcgttatgtacccagtagacattcaggagcaggttgttcagtttccatgtagttgagcggctttgagtgagattcttaatcctgagttctagtttgattgcactgtggtctgagagatagtttgttataatttgtgttcttttacatttgctgaggagagctttacttccaactatgtggtcaattttggaataggtgtggtgtggtgctgaaaaaaatgtatattctgttgatttggggtggagagttctgtagatgtctattaggtctgcttggtgcagagctgagttcaattcctgggtatccttgttgactttctgtcttgttgatctgtctaatgttgacagtggggtgttaaagtctcccattattaatgtgtgggagtctaagtctctttgtaggtcactcaggacttgctttatgaatctgggtgctcctgtattgggtgcatatatatttaggatagttagctcctcttgttgaattgatccctttaccattatgtaatggccttctttgtctcttttgatctttgttggtttaaagtctttctctctggctgcccttaacattttttgcttcatttcaactttggtgaatctgacaattatgtgtcttggagttgctcttctcgaggagtatctttgtggcgttctctgtatttcctgaatctgaacgttggcctgccttgctagattggggaagtcctcctggataatatcctgcagagtgttttccaacttggttccattctccgcatcactttcaggtacaccaatcagacgtagatttggtcttttcacatagtcccatatttcttggaggctttgctcatttctttttattcttttttctctaaacttcccttctcgcttcatttcattcatttcatcttccattgctgataccctttcttccagttgattgcgtcggctcctgaggcttctgcattcttcacgtagttctcgagccttggttttcagctccat

SEQ ID NO: 142411 - DNA, 2022 bp, Homo sapiens
atgagattgaccccgcgcgcgctgtgcagcgccgcccaggccgcctggcgggagaacttccccctgtgcggtcgcgacgtggcgcgctggttcccgggccacatggccaaggggctgaagaagatgcagagcagcctgaagctggtggactgtatcatcgagaaaattatgcaacacttagaaggagaaggcctaaaaaatgtcatttttaccaactgtgtaaaggatgaaaatgtcaagcagatcatcccgatggtcactgaactgattgggagaagccaccgctaccaccgaaaagagaacctggagtactgtatcatggtcattggggtccccaacgtgggcaagtcctccctcatcaactccctccggaggcagcacctcaggaaagtggactcacagtacttggccttttgtgactggctgatgtcaccgatcgtgatgtcctcaagggaaagcaccagggtgggtggcgagcctgggatcaccagagctgtgatgtccaaaattcaggtctctgagcggcccctgatgttcctgttggacactcctggcgtgctggctcctcggattgaaagtgtggagacaggcctgaagctggccctgtgtggaacggtgctggaccacctggtcggggaggagaccatggctgactacctgctgtacaccctcaacaaacaccagcgctttgggaagagtatgagtattcaacatttccgtgtcgcccttattcccttttttgcggcattttgccttcctgtttttgctcacccagaaacgctggtgaaagtaaaagatgctgaagatcagttgggtgcacgagtgggttacatcgaactggatctcaacagcggtaagatccttgagagttttcgccccgaagaacgttttccaatgatgagcacttttaaagttctgctatgtggcgcggtattatcccgtgttgacgccgggcaagagcaactcggtcgccgcatacactattctcagaatgacttggttgagtactcaccagtcacagaaaagcatcttacggatggcatgacagtaagagaattatgcagtgctgccataaccatgagtgataacactgcggccaacttacttctgacaacgatcggaggaccgaaggagctaaccgcttttttgcacaacatgggggatcatgtaactcgccttgatcgttgggaaccggagctgaatgaagccataccaaacgacgagcgtgacaccacgatgcctgcagcaatggcaacaacgttgcgcaaactattaactggcgaactacttactctagcttcccggcaacaattaatagactggatggaggcggataaagttgcaggaccacttctgcgctcggcccttccggctggctggtttattgctgataaatctggagccgaagtaaggttccttcacaaagatccggaccaaagcggccatcgtgcctccccactcctgcagttcgggggcatggatgcgcggatagccgctgctggtttcctggatgccgacggatttgcactgccggtagaactccgcgaggtcgtccagcctcaggcagcagctgaaccaactcgcgaggggatcgagcccggggtgggcgaagaactccagcatgagatccccgcgctggaggatcatccagccggcgtcccggaaaacgattccgaagcccaacctttcatagaaggcggcggttgggcgtcgcttggtcggtcatttcgaaccccagagtcccgctcagaagaactcgtcaagaaggcgatagaaggcgatgcgctgcgaatcgggagcggcgataccgtaaagcacgaggaagcggtcagcccattcgccgccaagctcttcagcaatatcacgggtagccaacgctatgtcctgatagcggtccgccacacccagccggccacagtcgatgaatccagaaaagcggccattttccaccatgatattcggcaagcaggcatcgccatgggtcacgacgagatccttcgccgtcgggcatgcgcgccttga

SEQ ID NO: 142412 - DNA, 1266 bp, Homo sapiens
atgtacacccactgctatattgggagtaacgtcatactccaccctctggatattcggatcaatatcaccgggtgggtgtacacctacggcaatattgaaagtaataccatgctctctccctccatggacattgggaacaatatcatagatataagcactagaggaaaagctctacctgatatagctggcctagacacatgcagatttattaattgtagaagaaagaattatacttttcagggttttggagacatattacacagaaacatgaattctggaatcttgcaagtcttccagagggaactcacctgtcccatctgcatgaactacttcctagacccagtcaccatagactgtgggcacagcttttgccggccctgtttctacctcaactggcaagacatggcagttgttgctcagtgctctaaatgcaaggagacaacatggcagagaaacctcaacactgacatttgtttgaagaacatggcttccattgccagaaaagccagcctccggcaattccttagctctgaagagcaaatatgtgggatgcacagagagacaaagaagatgttctgtgaagtggacaagagcctgctctgtttgctgtattccaactctcaggagcaccggaatcacagacactgtcccattgagtgggctgctgaggaacgccggtcttttggagacatattacaaaggtatgagtctctgctgctgcaagtgtctgagcctgtgaatccagatttcagtgcagggcccatcattggactgatggacaggctcaagagattcagagaaatagatcttcagaggcatcacttacccagtgttcctcagcagcccactcagcgggacagtgtctgtgataccggtgctcctgagagctggagcacagcaaacagagcaggctcctgtccacttcacagaacatcttctttgtctccctgtgaatgccacacatttgctcctcagagctcaggaatagccagagactggcttttctggcaagggaagccatcttcttcaatcgaatcactgagtaagaattgggatgtcttgccagttgaggtagaaacagggcctgcaaaagctgtgcccacagtctatggtgaccgggtctatgaagtagttcatgcagatggggcaggtgagttccctctggaagacttgcgagattccagaattcatgtttctgaggaagaaagagcagcatgtcattttggggtctgggttgatgaaaagcttctgaacatgtggagataa

SEQ ID NO: 142413 - DNA, 1047 bp, Homo sapiens
tcacatgtgggctttgcagaatgggtgcaaggttttattgagtggaagtagctcagcgaaagtcagaagtgggtagagtgggagggctttcctcgggagctgggccactcggtggcctgggctttcctcggactgccccagccaaactctgcattgttctccttctgctggttggtggcctgctggcgcctgccggtgcgttcctgtggttgtccaccgcctgtgtgttcctccaccgatgtgctcctctcgatgtccacctgcccctgtctctgccttgctggggtctcgggagtttttataggcacaggatgggttgtggcaggccagagtggtcttgggaaatgcaacatttgggcaggaaatgcctgtcctcaccgaggtccgtgggggttggaatccttcatcatagtatctctcaactgttgacattcctgcatcgttctccctggggagcgggaggctccaagcgcggctggggcgctgtgggcagatgcgctcggtcctcaccagcggcgttgtgcggcgaaccctgcggtgcttcgggaaggcggtcgttcctccctgctcccaccgttttccagcgtgtgcgctcttaccttctctaaagatggctccacttagtcctctggcaccacccacattcttcttatgggcacgtgtcattgcattgtcattattgtttgcgcagtcgtctcctgaactcacccctgagcagggcgcagaactttcctttcccattttggtgatccagctccttctggagcatctgggggtaaaaactgtttgtagacacataagcttataggccctttgcagttccgctagtctccaagcctgtgcttcaccttctctcctccatgtcttattctgctgtcccatatctgcagtgccttccccttcctcttgaccctccaaattctcactccatgcctgaaacttattttgtactgctatcagccttgcactgcagctgtcagcagtcattctaggacatacaggtttgtctgttggtgtctttgaattatctgtgaatactttaatcat

SEQ ID NO: 142414 - DNA, 759 bp, Homo sapiens
atggccatggccctggccctggccctgctctggctgttccctggccctgcccagttggggcatgttcacgcagagtccactggccaccctgcggtaggcctggaaagtcagcaggtggcgctgggacaccagctttctgctggctgggggcagaggagccccgacccggaaagtgccacgttccgggacctcatgctgtatcgaggctcttcccagcccccaggctcctgcttccagcccctcccagagctgagggtggccgttgggcacagcggcagaggacagctcctgggctccaccttttccctcacgctgccagcaccaggttggcggcttctcgctcagctgccttggcaagagggcagatgcctggtgactctcatcttgcagcaggccacactgttggcctccaatgaagcctttaaaaagcagatggagagtgctagtgaggcggccaagaagtacacggagaatgaccagctcaagaagtcagacccttccctgagaaaaatggcccctcaggaagtccagaggagcgtcctctgcccgctgctgcccattttgtgccaaagtactagtaacaagccttgcacgcatgctcgagggctgtgtgaaaacaaacaaatagcaccctatgcctccaaccccaatgcagccatgcttagccggcaggccaaactagagaaagctgaaaaccaggttctggccatgcagaagcagtctgagggcctcaccaaggagtacgaccgcttgcagtag

SEQ ID NO: 142415 - DNA, 825 bp, Homo sapiens
cagcagcgcacgctgctggcttccaatgaagcctttaaaagccaggcgaagagtgctagtcagccggcaagtaagtacatgaaggagaatgaccagctcaaaaaaggaagctgctgttgacggaggcaagttggatgtcggcaatgctgaggtgaagttggaggaagagaacaggagcctgaaggctgacctgcagaagctaaaggacgagctggccagcactaagcaaaaactagagaaagctgaaaaccaggttctggccatgcggaagcagctcctgagggcctcaccaaggagtacgaccgcttgctggaggagcacgcaaagctgcaggctgcagtagatggtcccatggacaagaaggaagagtaagggcctccttccttcccctgcctgcagctggcttccacctggcacgtgcctgctgcttcctgagagcccggcctctccctccaagtacttctgtttgtggccttcctgcttcccccatttcctttccacagctcatagctccgtcatctcggcccttgtccacactctccaacgcacattacagggggccttgattgctacacgttcagaatgcgtttgctgtcatcctgcttggcctggccaggcctggcacagccttggcttccacgcctgagcgtggagagcacgagttagttgtagtccggcttgcggtggggctgacttcctgttggtttgagcccctttttgttttgccctctgggtgttttctttggtcccgcaggagggtgggtggagcaaggtgaattggagtttctcttgagggcaataaaagttgtcatggtgtgtaaaaaa

SEQ ID NO: 142416 - DNA, 1157 bp, Homo sapiens
atgttgttgtcagcttttcagtacgccaaaaactggaccacagtgcagatgtcccatcaacagggtgggcatccccttgcttttgagcgccacccacctcgtggctttctggaggccaagtcgctgtgcattgctggccatggggctgaggccagcagggagtggtgctgtcagcagaggaccgcttcaccattgactgcccagaggaacaatgggtttaattccctcagcgtgctgacccgggtggtgctgcggctttaccaggtccccacaacagttcagcaagcccagccaccccccaccctcatctggatacctctactcctgcaccagagccctgatcagaagtcaaggcacctaggcctccccgacccccagcgggatgcctcccattcctgcaccagagccttgatcagagtcacagcatcatatgtcttccattacctgtcagtcagccaagtcccatctccaccctgtgtaggcctgacctgcagcaccttcccggccaccccacccagcgctaacccagtgcatagggtgcttctgttggtcgatgagtatgggatgaagaaagaggaaggacatgatttttcttcattccagtacctacctttagaaggatggggagctcactccgagaacagggaaatcaacattgcagtaacaagtaagtgggggcctccgctcaggcacaggcatgtggctgcctatgtgggcattcgggaccatcaggagagtcaaggactcgcctcagcctgcaacacagactgtaaccaagaaagtgatgtgtgtgctgttaaaacaggctctgaaaaggtaaaggagaatatctggatggagagagagagacagtctagtaaacatccttattgttgtaagcaccagaggttttcagctctgtggtggccaagtacccgatgaggaaacaggcttggagaaatccagtaacttgccaggttgccctgctgtggaatggcaacttcaaatctatatcaacttctactagaaatgttaacggcagaaacatcactaaaaagagttgttgggaatggcggagaaaggtagaaatgggagaagacggccagcataaggagcagctgctgcgcttgatgcaaagtcatcgaacaaaaacgttcagctacagaagcaccatctga

SEQ ID NO: 142417 - DNA, 1104 bp, Homo sapiens
ctagatgatctgcacaaatggttcctctcctctttcctgttgtctgccattagcattggaataaagttcctgctgaaaatccacatctcccctgggtccggtgttctcctccaactcctcccgggaaacccaagccctgccgctcatggaacagaagaactggaaccgaagtttctggaacagggctatctgagagcggttcttcctggccctcgggttcaagcaacggcataactggaaccgacggttacggaccaagggtatgcgagagcgggtcttcccatacaggaagtagaagatgttttgtttggggtcctcgtcgtcctcctccatgtcattggccaggtagagagccaggaagaaatgaatgcgttggtattgccaggaggggaggccggcccggctgaaatacgctatgaccatagccaggagatacttgtccgacaccctcagatctttgtcccaggccaggaatcttttaatgacaggatcctcaagcagcctgttgaaggcctcgtggtgctcagggagcacgagcgacactcgccgtcgcttcagcttcatcttgaggccacacagcatctccgccacccagatctcctcaggctcaggggcgagcaccttccgtggctcctcctccaacgactcctcagattcgtcccaccactccctcttccttttccagcaaaaggacctatgcggggggctgggatctaccccaggggcaagctgactgttgaagtccttgtggtgctcagggaggatgggtgacactcgctgttgcttcagcttcatcttgagcccacacagcatctccactacccaggtctcctcaggctcaggggcgagctccttctccggctcctcctcagattcatctgaccactccttcttccttttccagccaagggacctacatggggggctgggatctaccccaggggctgatgatcccaacacttcatcatccaccacctcctggagggagtaccccgaggtgctccgctggggactctgctcattctgggggtgcggttgacggctggtcgtgatctttcccttaatctgtcccctcttacggaacctagtctccgttctgtccat

SEQ ID NO: 142418 - DNA, 2172 bp, Homo sapiens; identical to SEQ ID NO: 114553

SEQ ID NO: 142419 - DNA, 698 bp, Homo sapiens
gccttcaaatcctcctggactgcaagtccgtaagaaacaggacctccaggttccgccccagggaggttggaattcaccaatataaaaagggtggtggtgccgcaagaaagggtggaactggaaacgctcctggtttcttacttttctccaaggactcctagaaggaccccaccccccttcccccacccctgctcctaggaggacaacgtgatcactgtattcagctccatcaagaatggtccaggttcttctagatgatctgcacaaatggttcctctactcctgcctggtgtctgccattagcattggaataaagttcccgctgaaaatccacatctcccctgggtccggtgttctggaagcgagagagacaatgtcacacttcaaggaggcagctctctagacaggaaagttattcacgtcccatgtcaattgagaaatgcaattttatctgctgcctttcattctataccctgcttctgaaccatcgtgttcaactgtgaaactcacactttggtgaccacgactccaaaactcacttaatacacccaaggtcagccccagtgatctgcttcatagcaaggactttgggtgggtctgcccagggagtagggcaccctcagagaatgtggctttggactttatcacagctggggccttttgtgtcacttaagatctaaacttgtaaccatgctaga

SEQ ID NO: 142420 - DNA, 1338 bp, Homo sapiens
ctagatgatctgcacaaatggttcctctcctctttcctgttgtctgccattagcattggaataaagttcctgctgaaaatccacatctcccctgggtccggtgttctcctccaactcctcccgggaaacccaagccctgccgctcatggaacagaagaactggaaccgaagtttctggaacagggctatctgagagcggttcttcctggccctcgggttcaagcaacggcataactggaaccgacggttacggaccaagggtatgcgagagcgggtcttcccatacaggaagtagaagatgttttgtttggggtcctcgtcgtcctcctccatgtcattggccaggtagctgaggacagaaatcaggttggtgctcaggggcaccaccaggagaggcctccggctgaggtcagcttcccagagaggaaggtaagggactgtccctagctcaggactggcacccaccctcagtgttggggtgactgtactcatttggaaattgcgggatggaggggtattcgaaggtcggatgcaaatctgagaagccagaggaagggttttgggtgatgctcccaggatggtgggctccgatgggatcttgtccgacaccctcagatctttgtcccaggccaggaatcttttaatgacaggatcctcaagcagcctgttgaaggcctcgtggtgctcagggagcacgagcgacactcgccgtcgcttcagcttcatcttgaggccacacagcatctccgccacccagatctcctcaggctcaggggcgagcaccttccgtggctcctcctccaacgactcctcagattcgtcccaccactccctcttccttttccagcaaaaggacctatgcggggggctgggatctaccccaggggcaagctgactgttgaagtccttgtggtgctcagggaggatgggtgacactcgctgttgcttcagcttcatcttgagcccacacagcatctccactacccaggtctcctcaggctcaggggcgagctccttctccggctcctcctcagattcatctgaccactccttcttccttttccagccaagggacctacatggggggctgggatctaccccaggggctgatggtcccaacacttcatcatccaccacctcctggagggggtaccccgaggtgctccgctggagactctgctcattctgggggtgcggttgacggctggtcgtgatctttcccgtaatctgtcccctcttacggaacctagtcttcgttctgtccatggccttcttctggacacacggagtccggtccctccaatcaggaaggtcggaatctctgatgtcatcgttcat

SEQ ID NO: 142421 - DNA, 857 bp, Homo sapiens
ctagatgatctgcacaaatggttcctctcctctttcctgttgactgccattagcattggaattaagttcctgctgaaaatccacatctcccgtgggtccggtgttctcctccaactcctcccgggaaacccaagccctgccgctcatggaacagaagaactggaaccgaagtttctggaacagggctatctgagagcggttcttcctggccctcgggttcatgcaacggcataactggaaccgacggttacggaccaagggtatgcgagagcgggtcttcccatacaggaagtagaagatgttttgtttggggtcctcgtcgtcctcctccatgtcattggccaggtagctgaggacagaaatcaggttgctgctcaggggcaccaccaggagagcgtccggctcagtgttggggtgactgtactcatttggaaattgcaggatggaggggtattcgaaggtcagatgcaaatccgagaagccagaggaagggttttgggtgatgctcccaggatggtgggctccgatgggatctttggagggggtgtgtctaggtcggctggtgtcaggagggtcttttgtgtgccaggcagagaactgtcccgaagagctgagagtagaggggctaggagcttcagggctgcggccagactgtggcccagagctcagatcccaaaggacccataggagaggcaggggccacttcattcactctgcaagagaccagcagaatcctgagggaagatgctgacaaatcattaaaaagaccaagaattagcccggagttgccgctcaagcctgttgatcccagtacttttttaagaggttgaagacaggaggatcatgttaagcccaaa

SEQ ID NO: 142422 - DNA, 1713 bp, Homo sapiens
  misc_feature (1)...(1713): n = a,t,c or g
aaaatatttatagagaaaanagccccactataccaccagaggaccaccagtcagcgtaaaccaggtattttttaacgcctacttgtgcgccataaggaatttcaaaggaatattaagaagtgagtgagcgctcatgggatctggttgtttagaagcatgcagcacctcctgcttcactctctctgtctctcctgctccaccatggccagaaacgtgcctgcttccccttcgccttctgccgtgattgtcagtttcctgaggcctccccagccatgcttcctgtacagcctgcagaactgactcctagaagtacccccaccccacccctgctccttggaggacaacgtgatcactgtattcagctctgtcaagaatggtccaggttcttctagatgatctgcacaaatggttcctctcctccttcctggtgtctgccattagcattggaataaagttcctgctgaaaatccacatctcccctgggtccggtgttctcctccaactcctctggggaaacccaagccctgcagctcatggaacagaagaagtggaaccgacgtttctggaacaggactatctgagagcggttcttcctggccctcgggttcatgcaacggcgtaactggaaccgacgcttacggaccaagggtatgtgaagagcggttccttccctggccctcgggttcgtggaacggtataactggaaccgacgcttacggagcaagggtatgcgagagcggttcttcctggccctcgggttcatggaatggcctaactggaaccaacgcttacggagcaagggtatgcgagagcggttcttcctatacaggaagtggaagatgttttgtttggagtcctcgtcgtcctcctccatgtcattggccaggtagagagccaggaagaaatgaatgcgttggtattgccaggaggggaagccggcccggctgaaatacgctatgaccatagccaggagatacttgtccgacaccctcagatctttgtcccaggccaggaatcttttaatgacaggatcctcaagcagcctgttgaaggcctcgtggtgctcagggagcacgagcgacactcgccgtcgcttcagcttcatcttgaggccacacagcatctccgccacccagatctcctcaggctcaggggcgagcaccttccgtggctcctcctccaacgactcctcagattggtcccaccactccatcttccttttccagcaaaaggacctatgcggggggctgggatttaccccaggggcaagctgactgttgaagtccttgtggtgctcagggaggatggatgacactcgctgttgcttcagcttcatcttgagcccacacagcatctccactacccaggtctcctcaggctcaggggcgagctccttctccggctcctcctcagattcatctgaccactccctcttccttttccagccaagggacctacatggggggctgggatctaccccaggggctgatggtcccaacatttcatcatccaccacctcctggagggggtaccccgaggtgctccgctggggactctgctcattctgggggtgcggttgacggctggtcgtgatctttcccgtaatctgtcccctcttacggaacctagtctccgttctgtccatggccttcttctggacacttccagaggacttgggctccaggacccagtaacgcagccctggacttgacc

SEQ ID NO: 142423 - DNA, 1722 bp, Homo sapiens
  misc_feature (1)...(1722): n = a,t,c or g
tgggggaggattatggattaggcttctggactcgtggttcgtgatgttgtcacgttagaaacagatctagcacggttacaagtttagatctgaagtgacacaaaaggccccagctgtgatgaagtccaaagccacattctctgaagggtgccctactccctgggaagacccacccaaagtccttgctatgaagcagatcactggggctgaccttgggtgtattaagtgagttttggagtcgtggtcaccaaaatgtgagtttcacagttgaacacgatggttcagaagcagggtatagaatgaaaggcagcagataaaattgtatttctcaattgctctgaactctagctagacttgacatgggacgtgaataaccttcctgtctagagagctgtctccttgaggtgtgacattgtctctctcacttccagaacaccggacccaggggagatgtggattttcagcaggaactttattccagtgctaatggcagacatcaggaaggaggagaggagccatttgtgcagatcatctagaagaacctggaccattcttgacaagagctgaatacagggatcacgcttgtcctccaaggagcaggggtggggtggggtacttctaggaaatncaaattttgcagggctgtacaggaagcatggctggnggaggcctcaggaaactgacaatcacggcagaaggcgaaggggaagcaggcacgtttcttcttaatattcctttgaaattctttatggtgcacaggtagcgtagaaaataactgcttcacgctgactgtcatccctctggggtggggggtagggggttttctgggatgattttcccatcgtgatccaacaccagtcagagtcccaacccttcgctgatacacgggaggtagaaatggtgacatcactcagtgcacaaagtgaggctcagagcttccccccgaaaagccaaagtttcaacccgagttaggtcggcaaactctcgaatcttagatgtgtgatgtttcagagctgaaagagattaaggccttcgaagttttcttcttctaccccacatccattgcctgaaacttcaatgagatccactccatagtccttaagctttagatcaatattagtgggcaccagcatccagactgttttctactaactccttcaccgcagtgcttagactcggtaccaccggcccagagcaaatctgatggactgacttccgatcaataggtttgatggccttagcaggttctgtactcgagctctcagctcgctccaaggatgcaacaccggatccgcctcggggactgggaaagttccctccacggctcccacaggcgccccgcctcctgggctcccaacggctgctttcgacgttgtgctccaccctttccgggcggggcggaaaaaatacttcccgtctctccttttcgcctagtggctctgtcaaaggtcgagtccgtgacgtcaaagagcctggaccaatcagagcacaccggactgcgttttttccgaacgccagcagcagggtcagaagggaggtagtcgccctccgtcgtggcctggcgtggattccgagcgttggtgtctggcggtttccgaccgttggtgtctggcacgcgccaccccgatgtaccaggtaaagccctatcacggggtcggcgcccctctccgtgtggagcccacctgcatgtactggctccccaacatgcacggcaggagcggc

SEQ ID NO: 142424 - DNA, 548 bp, Homo sapiens
  misc_feature (1)...(548): n = a,t,c or g
cgggcttgncgtacctcgngagaagcaccagatcatgcaccgagatgtaagccctccaacattcctcgtgaactctagaggggagatcaagctgtgtgacttcgggttgagcngccagctcatagactccatggccaactccttcgtggcacgcgntcctacatggctccacctcctaagctgcccaacggtgtgttcacccccgacttccaggagtttgtcaataaatgcctcatcaagaacccagcggagcgggcggacctgaagatgctcacaaaccacaccttcatcaagcggtccgaggtggaagaagtggattttgccggctggttgtgtaaaaccctgcggctgaaccagcccggcacacccacgcgcaccgccgtgtgacagtggccgggctccctngtcccgctggtgacctgcccaccgtccctgtccatgccccgcccttccagctgaggaacagtggcgcctccacccaccctcctgcctcaccctgcggagagcaccgtggcggggcgacagcgcatgcaggaacgggggtctcc

SEQ ID NO: 142425 - DNA, 612 bp, Homo sapiens
  misc_feature (1)...(612): n = a,t,c or g
tccctggaccaggtgctgaaagaggccaagaggattcccgaggagatcctggggaaagtcagcatcgcggttctccggggcttggcgtacctccgagagaagcaccagatcatgcaccgagatgtgaagccctccaacatcctcgtgaactctagaggggagatcaagctgtgtgacttcggggtgagcggccagctcatcgactccatggccaactccttcgtgggcacgcgctcctacatggctccggagcggttgcagggcacacattactcggtgcagtcggacatctggagcatgggcctgtccctggtggagctggccgtcggaaggtaccccatccccccgcccgacgccaaagagctggaggccatctttggccggcccgtggtcgacggggaagaaggagagcctcacacgtggcgcctccacccaccctcctgcctcacncctgcggagagcaccgtggcggggcgacagcgcatgcaggaacgggggtctcctctcctgccagtcctggccggggtgcctctggggacgggcgacgctgctgtgtgtggtctcagaggtctgcttccttaggttacaaaaccaaaaccctcgttgccgaat

SEQ ID NO: 142426 - DNA, 1905 bp, Homo sapiens
atgagcagaattgcctggaagctgctctggaagctcattcaaggttacctgggccagccagctggaactgcaagaaggcacccaggcattggtatttttaaaagtcccccaggtgatttcacctgcaatgggttgatagccgtgattaagaatcagagtgacaaccagagaggaatgagtcctggaagttggagtcctggaagggaaaacaatccaacacttgtggaagtcctagaaggagttgtccgcctcccggagaccgtacatacggctgtgcgatacaccagcattgaattggttggagagatgagtgaagtcgttgatcgaaatcctcagttccttgaccctgtgttgggctatttgatgaaaggcctgtgtgaaaagcccctggcttctgctgcagccaaagccattcataacatttgctctgtctgccgagatcacatggctcagcactttaatggactcctggagattgcccgctccctcgattccttcctgttgtctccagaagctgctgtgggcttgctaaaagggacagcacttgtcctagcccgattacctttggataagattaccgaatgtcttagtgaactatgttctgttcaggttatggcattgaaaaaggtatttgttggtgcaacttcccgtagagttgccaagctatttcgggaaggcttgaaggcacacgggaattcttttgaaacctcgggagaggcggagaggtgttgcacgtggaggccaaaagagatgacctgtgtagaaaaagcaggaacagatgagaaaatgcttatgaaggtttttcgctgtttgggaagttggtttaacttgggagttttggacagtaacttcatggctaacaataaattactagcactcctttttgaggttttgctctctgattcctatacttgccagcagcaatcacgaccgccagcaccaaaaggacagagggagtctgggtcagccctgctttatgcaaaacaaggtgatgcctttgttcttactggtgtctgtgtagcagaatccaatggcacctgtcttccacccaaagagaccatggagctatttgaagctatatattgttacatccagtcatcctacagtggtatagaacaggggtccccagcccctgagccatggtcgcataacaacggtctatggcctgttaggaaccgggccacacagcaggagtggcgtctgagtcagggtcctggaatctgcattttaacaagcacagctgattctggtgctagtgacaattgggcacaatttgagcagcacaggagcaaatggtcttttaggtcccttctggctctgatgtgtgtgattcagctcagtgtggccatatcgccctcttgcggtagaaagcgggactccgcctggctaggggaacagacgccaggggctgactgtaacaaagaccggaagctcttcttggatccaaggcaggttcatgcatgggagatctcagaccagttgttacagatccggcaggatgtggagtcatgctattttgctgcacagaccatgaaaatgaagattcagacctcattttatgagctccccacagactctcatgcctctttacgggactcattgctaacccatatccagaacttgaaagacttgtcacctgttattgtaacgcagctggctttagcaatagcagatcttgccctacagatgccttcctggaagggatgtgtgcaaacactggtggaaaaatacagcaatgatgtgacttctttgccttttttgctggagatccttacagtgttacctgaagaagtacatagtcgttccttacgaattggagctaatcggcgcacagaaattatagaagatttggccttctactctagtacagtagtatctctattggtgaatattcagttttcctag

SEQ ID NO: 142427 - DNA, 2022 bp, Homo sapiens
atgctactcctgctgcgtcactcagttctgcatggattaaatgaattaacacatttaaaatataagaagtttgaaaagctcttggactccggctgcagcgtcacctccctcgggcctcggcagcggcggcggctcgctcgcctcagccccagcgcccctcggctaccctcggaccaggcccgcagcgccgcccgccctcggccgccccgacgccggcctgggccgcggtcgcagccccgggctcgcgtaggcgccgaacgctcccggcccgcccactacgggcccaggctagaggcgccgccgccaccggcccgcggagcccggatgctggcccggaggaagccgatgctgccggcgctcaccatcaaccctaccatcgccgagggcccgtccccaaccagcgagggcgcctccgaggcaaacctggtggacctgcagaagaagctggaggagctggaacttgacgagcagcagaagcggctggaagcctttctcacccagaaagccaaggtcggcgaactcaaagacgatgacttcgaaaggacctcagagctggacgcgggcaacggcggggtggtcaccaaagtccagcacagaccctcgggcctcatcatggccaggaagctgatccaccttgagatcaagccggccatccggaaccagatcatccgcgagcaccaggtcctgcacgagtgcaactcaccgtacatcgtgggcttctacggggccttctactgtgacagggagatcagcatctgcatggagcacatggatggcggctccctggaccaggggctgaaagaggccaagaggattcccgaggacatcctggggaaagtcagcattgcggttctccggggcttggcgtacctccgagagaagcaccagatcatgcaccgaaatgtgaagccctccaacatcctcgtgaactctagaggggagatcaagctgtgtgacttcggggtgagcggccagctcatcgactccatggccaactccttcgtgggcacgcgctcctacatggctccggagcggttgcagggcacacattactcggtgcagtcggtcatctggagcatggacctgtccctggtggagctggccatcgaaaggtaccccatccccccgcccgacgccaaggagctggaggccatctttggccagcccgtggtcgacagggaagaaggagagcctcacagcatctcctcttggccagggtcccccgggcgccccaacagcggttacgggatggacagcctgcccgccatggccatcttcgaactgctggactatattgtgaaagagccgcctcctaagctgcccaacggtgtgttcacccccgagttccaggagtttgtcaataaatgcctcatcaaaaacccaacggagcgggcggacctaaagatgctcacaaaccacgccttcatcaagcggtccgagctcaggccctttgctgaaccgcttcgtcaacttccttgccctccttttcccatgaccgagggtcccatccagcacgtacccctgtccgcaaagtccgggatctgctcctccaaatctcccgcgtgctgtaccgcaatcatcaagaagctcacggccatgacgacctgcctcatccccaagaggtatctaattctttggattctccaaatactctatcagtgtgtcctctccccaggtgatgcctttgttcttactggtgtctgtgtagcagaatccaatggcacctgtcttccacccaaagagaccatggagctatttgaagctatatattgttacatccagtcatcctacagtggtatagaacaggggtccccagcccctgagccatggtcgcataacaacggtctatggcctgttaggaaccgggccacacagcaggagctcagtgtggccatatcgccctcttgcggtagaaagcgggactccgcctggctaggggaacagacgccaggggctgactgtaacaaagaccggaagctcttcttggatccaaggcaggtgcaaggagggaaaaaagaatga

SEQ ID NO: 142428 - DNA, 1755 bp, Homo sapiens
  misc_feature (1)...(1755): n = a,t,c or g
ctcggcagcggtagcggctcgctcgcctcagccccagcgcccctcggctaccctcggcccaggcccgcagcgccgcccgccctcggccgccccgacgccggcctgggccgcggccgcagccccgggctcgcgtaggcgccgaccgctcccggcccgccccctatgggccccggctagaggcgccgccgccgccggccccgcggaagccccgatgctggcccggaggaagccggtgcgggcggcgctcaccatcaacccctaccatcgccgagggcccatccccctaccagcgagggcgcctccgaggcaaaccttggtgcacctgcagaagaagctggaggagctggaaacttgacgagcaggcagaagaagcggctggaagcctttctcacccagaaagcccaagggtcggcgaactcaaagacgatgacttcgaaaggatctcagagcctgggcgcgggcaacggctggggtggtcaccaaaagtccagcacaagacccttcgggcctcatcatgggccaggaagctgatccacccttgagattcaagccggcgcatccgggaaccagatcatcccgcgagtctgcaggtcctgcacgatggcacctggccgaccatgggggggcttttacggggccttctacagtgacggggaggatcagcatttgcatagaacacatggacggcggctcccttggaccaggtgctgaaagagggccaagaggattcccgaggagatccctggggaaagtcagccatcgcggnttctccgggggcttggcgtacctccgagagaagcaccagatcatgcacccgagatgtgaagccctccaaacatcctcgtgaaactctagaggggagatcaagctgtgtgacttcggggtgagcggccagctcatagactccatgggccaactccttcgtggggcacgcgctgctacatgggctccggagcggttgcaagggcacacattactcggtgcagtcggacatcttggagcatgggcctgtccctggtggagctggccgtcggaagggtaacccatccccccgcgcgacgccgaagagctggaggccatctttggccggcccgtggtcgacggggaagaaggagagcctcacagcatctcgcctcggccgaggccccccgggcgccccgtcagcggtcacgggatggatagccggcctgccatggccatctttgaactcctggactatattgtgaacgagccaccttcctaagctgcccaacggtgtgttcacccccgacttccaggaggtttgtcaataaatgcctcatcaagaaccccagcggagcgggcggacctgaagatgctcacaaaccacaccttcatcaagcggtccgaaggtggaagaagtggattttgccggctggttgtgtaaaacccctgcgggctgaaccaagcccggcacacctcacgcgcaccgccgtgtgacagtggccgggcttcccttggtcccgctgggtgacctgcccaccgtccttgtccatgccccgcccttccagctgaggacaggctggcgcccccacccacccctcctgcctcacccctgcggagagcaccgtggcggggcgacaactgcgcacgcaggaacgggggtctcctctcctgctggtccctgccggcgtgcctctggggacgggcgacgctgctgtgtgtggtctcagagcctctgcttccttaggttacaaaacaaaacagggagagaaaagcaaaaaaaaaaaaaaaaaa

SEQ ID NO: 142429 - DNA, 396 bp, Homo sapiens; identical to SEQ ID NO: 136323

SEQ ID NO: 142430 - DNA, 427 bp, Homo sapiens
  misc_feature (1)...(427): n = a,t,c or g
tgatgttcaatctgcgtggaaaacgcctatctgcaatggacgtgtcttctctcttcaggccnctaaacaacagaagtaaccaggaggcacagaggattccttgatgcctcaggaccatcncncaaatttttgataaaagaaattaaattgggtgttcccaggtttttcccaatcaggggtgtttaaaaccccggcccgggcaagaattttgggggcccctttaaaaaaacataattttgctgggcccgcgttccaaaaatgtgattttttaaagggggcccccnnnnnnnnnnnnnggctgtaagtttattcaatgcaaaagaatcctctccaattttactgaggtggatgaccacgtccacgaccaaatccgcctataaactggaattcggttgctgacccagccccagcctcgcccacgcgtccg

SEQ ID NO: 142431 - DNA, 367 bp, Homo sapiens
atggagatacagcaagaaagcagcatctgcaagaaagccctcaccaggaccaaatcagctgacacctcaaccttggactacccagcttcccgaactgtgagtttctccatcaacttagctggcagctcctgtccccagcagcatcagaggccccatgaaaagagctccagcaggggctcagcctgcatgggtcccatgcggcagcctcagtgtcagagcctggatggcagtgatcaggagacgataaacttctatgcatgcctgctgatccataacgtgacccaaaatgacacaggattctacacccttgaagttataaagctaaatcttatgaatgaagaaataaccatacaattcagcttacgcc

SEQ ID NO: 142432 - DNA, 1506 bp, Homo sapiens; identical to SEQ ID NO: 120949

SEQ ID NO: 142433 - DNA, 1830 bp, Homo sapiens
atacagcaagaaagcagcatctgcaagaaagccctcaccaggaccaaatcagctgacacctcaaccttggactacccagcttcccgaactgtgagtttctccatcaacttagctggcagctcctgtccccagcagcatcagaggccccatgaaaagagctccagcaggggctcagcctgcatgggtcccatgcggcagcctcagtgtcagagcctggatggcaggggcttgaccaggtccaaatcctcaggacagaccccaggagatgtcaacatgaaaagggctgagcacatcctggcttcagagtctcagagagctgtgtcctacagggtccctgggcagctccccactccttgctctgccagccatggggaaggtggggtgaccacaggacaatcagccatgcagaggacagaggacacccaagatgaggctcagtgcagaagaaggaaaacagcacagctgacagctgtgttcagaaagtttctggatcccatgctcatctccacaaaggaggacaagcaggcagcagagaccatggtgatttcctcagctcctccctgcagatggcatgtttcctggcagaggctcctgctcacagcagagctgtccaagccctccgtcaccagcaacaactccaaccccatggaggacaaggatgctgtggccttaacttgtgaacctgagacccagggcacaacctacctgtggtgggtaaatggtcagagcctcccggccagttccaggctgcagctgtccaataacaacaggaccctcactgtactcaatgtcacaaggaattacacaggaccctataagtgtgaaatctggaatcgagtgagtgtcagtcacagttaccctgtcaccctggatgtcctctgtagcccaggctgccaacccaaattgacatggccagaatccaggcctctcagtccttctcaggtccaagaacagagactctcagccctggatatcaaagctgtccatgactgcctgccccaggcaaattttgagggacactgtggcctttctacagaccaggagtattcttggcttatcaatgaaaagctccagcaatacacacaagagctctttatccccaaaatcactgcaaagaatagcggggtctatgcttgttttgtccgtaactcagccactgacctcagaacatctgaagctttgaaacaagctcacactttttcccaaatgagaggaggacgccccttggatgaggaagaagcagctcagactctgctctctgctctgcttcaggctcacttggtgactggccctgccctgactccacctggtgtgagaacagggtggtggaaaaggtgcctgggtggcctgtcccgaatctggctaaatctagctgccagcagaagcaaagcctcccccaggttaggctgcagggaaatgggaagagagggagcctcagggcagactcctgagctgtgtcctggctctgaagtcactggctgtatgaggctgtgggcacagcacatgggacacagcacagaggacagcatccagtatctccgtgattatcttcatctgcccctggagattgtgcctgccaccctacgccacaaccgtccagagactggcaggcctccgcctaaaggtctggagggtgagccacctgcaagactcaaaagagaggaaaccgacagagatacctacagacggagtgctgtgccccctggtgccgacaagaaaaccgaggctggggccgggtcagcaaccaaattccagtttagaggcggatttggatgtggacgtggtcaaccacctcagaaaaattggagaggattattttgcattgaataa

SEQ ID NO: 142434 - DNA, 770 bp, Homo sapiens
  misc_feature (1)...(770): n = a,t,c or g
agagtcaagcctagtactcgtttgcacagttttcatgtgagtgtgtagctccccaggcgggtttttcctccaaatgcgcaaagtacaattaagaagtaaatagggttnacanannctgtttnaattcttgtcccaaggggattaaatgtgggtacccccgggttttccccctcccagcggttttaaaacggggccccgggatttatttttggggcccctataaaaaaatttttcgtcggccaccccggggggataaaagtgggctccttaaagggggccccccnnnnnnnnnnnnggctgtaagtttattcaatgcaaaagaatcctctccaattttactgaggtggctgaccaacgtccacgaccaaatccgcctctaaactggaattcggttgctgacccagccccagcctcggctttcttgtcggcaccaggtggcacacgcactccgtctgtaggtatctctgtcagcttcccctcttgtgagtctcgcaggtcgctcaccctccagacctttaggccgaggcctgccagtctctggacggctacggcgtagggtggcaggcacaatctccgggggcagatgaaggtaatcacggagatactggataccctcattggtaaggtaccagtagaaatgtctccaggcaaactgttcaaacacgtagcctcgggacttgagagactgcatggccttcatcacatgaaggcggacgcgtgggtcgagccggttcctacggacatcaactaggctttcaatcctttcttct

SEQ ID NO: 142435 - DNA, 400 bp, Homo sapiens; identical to SEQ ID NO: 112913
  misc_feature (1)...(400): n = a,t,c or g

SEQ ID NO: 142436 - DNA, 945 bp, Homo sapiens
ggcacgagggacgccaccgccgaggaaaaccgtgtactattagccatggtcaaccccaccgtgttcttcgacattgccgtcgacggcgagcccttgggccgcgtctcctttgaggtaaggggcctggataccaagaagtgactgctcatctaatccataaagctatgttaacagattggaggtagtagcattttcattacaagtgactaaaagaacagctgtttacccctgatcgtgcagcagtgcttgctgttccttagaattttgccttctgtttgcagacaaggtcccaaagacagcagaaaattttcgtgctctgagcacctggagagaaaggatttgggttataaggggttccctgctttcacagaattattccagggtttatgtgtcagggtggtgacttcacacgccataatggcacctggtggcaagtccatcttatggggagaaatttgaagatgagaacttcatcctaaagcataccgggtcctgggcatcttgtccatggccaaatgctgggacccaacacaaaatggttcccagtttttcaatctggcacttgccaagactgagtggttgggatgggcaagccatgtgggtgttttggcaaagtgaaagaaaggcatgaatattgtggaggccatggagcgctttgggtccaggaatggcaagaccagcaagatgatcaccactgctgactgtggacaactccgaataaagtttgaccttgtgttttatcttaaccaccaagatcattccttctggaagccccagggagagcacccctccaacccatttgctcgcaggatcctaagaattttgtggctctcgcttgcagttcccttttgggttccatgttttccttgttccctcccatgcctagctggattgcagagttaagtttatgattattgaaataaaaactaaataacaaaaaaaaaa

SEQ ID NO: 142437 - DNA, 683 bp, Homo sapiens; identical to SEQ ID NO: 120750

SEQ ID NO: 142438 - DNA, 193 bp, Homo sapiens
ggttataaaattatacaccatggccctcctaaagacactctaggaaaaccatgtcatcctgatcttaaaacacctgcaagaaagagcacagtacttcaccattatggtaataatatgaatagaaagaataccccgtaccaacaaggaacaccttgtgccggttgccctgatgactgtgacaaaggactatgca

SEQ ID NO: 142439 - DNA, 570 bp, Homo sapiens
atggtgggagtgaatctgccccataaagcatccggattcttgatgaagaaggaactagattactttgctaaagccttggaaaacccagtgagaccctttctggctatacttggtggagccaaagtggcagacaagatccaacttatcaaaaatatgctggacaaagtcaatgagatgattattggtggtggaatggcttataccttccttaaggtactcaacaacatggagattggtgcttccctgtttgatgaagagggagccaagatcgttaaagatatcatggccaaagcacaaaagaatggtgtaaggattacttttcctgttgattttgttactggggacaagtttgacgagaacgctcagggaaccaaagccctcatggatgaaattgtgaaagccacttccaagggctgcatcactgttatagggggtggagacactgctacttgctgtgccaaatggaacactgaagataaagtcagccatgtcagcactggaggcggtgccagtctagagcttctggaaggtaaaatccttcctggagtagaggccctcagcaacatgtag

SEQ ID NO: 142440 - DNA, 1386 bp, Homo sapiens; identical to SEQ ID NO: 120751

SEQ ID NO: 142441 - DNA, 2258 bp, Homo sapiens
tggaccagcgtggtggaattccgcggagagaggggcgcgccgcagctcctcaacgccgcaacgcgccggcccaactgcaggaagggttataaaattatacaccatggccctcctaaagacactctaggaaaaccatgtcatcctgatcttaaaacacctgcaagaaagagcacagtacttcaccattatttccagcaatggctttactaccggtgttgtttctggttactgtgctgcttccatctttacctgcagaaggaaaggatcccgcttttactgctttgttaaccacccagttgcaagtgcaaagggagattgtaaataaacacaatgaactaaggaaagcagtctctccacctgccagtaacatgctaaagatgggactggcaccaaagttggaaacggaccatttgggaatgcaagaattcaaaaaccttaggctcccatgggcctcccataggttttggtggttgctaaaaggagctccatataattccctgtctcacatcggaatctccaaaactagaaggccaaggaggagcaagggcatatcttatatggtggcaggcaagagagcatgtgcagacactcaatgtgagctcgtgaaagcggctgggagaggggatgtaccctgcaaagtcacaggggcagagctgcccaaggccatggaagcccacctcttgaatcagcatgacctggatgtgagacatggagtcaaaggaaatcattttgaaactttaagggttaatgactgcccatttgtatttcaagagaaggttgttcaatttctacgtagttgtgtggttttcaatacaggaacctacaaacctgagagggcctttaggggtttattaacagccagccaaaagcaggtagctcagtcctataattgcaaggaactgaatcctgccaaaagcctaaatgagcttagagaaagtttgagagaatacaggtttttgatgtccttggatgaatatctagaaataggattgatgacttgtatgatgtctctttctaagaagttgactttagacaaactggatgttagagggaagcgagtcatcatgagagtagacttcaatgttcccatgaagaagaaccagattacaaacaaccagaggatcaaggcttccatcccaagcatcaagtactgcctggacaatggagccaaggcagtagttcttatgagtcatctaggtcggcctgatggtgttcccatgcctgacaaatattccttagcacctgttgctgttgagctcaaatccttgctgggcaaggatgttctgttcctgaaggactgtgtaggcgcagaagtggagaaagcctgtgccaacccagctcctggttcagtcatcctgctggagaacctgcgctttcatgtggaggaagaagggaagggccaagatccctctggaaagaagattaaagctgagccagataaaatagaagccttccgagcatcactttccaagctaggggacgtctatgtcaatgatgcttttggcactgcacaccgcgctcatagttccatggtgggagtgaatctgccccataaagcatccggattcttgatgaagaaggaactagattactttgctaaagccttggaaaacccagtgagaccctttctggctatacttggtggagccaaagtggcagacaagatccaacttatcaaaaatatgctggacaaagtcaatgagatgattattggtggtggaatggcttataccttccttaaggtactcaacaacatggagattggtgcttccctgtttgatgaagagggagccaagatcgttaaagatatcatggccaaagcacaaaagaatggtgtaaggattacttttcctgttgattttgttactggggacaagtttgacgagaacgctcaggttggaaaagccactgtagcatctggcatatctcctggctggatgggtttggactgtggtcctgagagcaacaagaatcatgctcaagttgtggctcaagcaaggctaattgtttggaatgggccgttaggagtatttgaatgggatgcctttgctaagggaaccaaagccctcatggatgaaattgtgaaagccacttccaagggctgcatcactgttatagggggtggagacactgctacttgctgtgccaaatggaacactgaagataaagtcagccatgtcagcactggaggcggtgccagtctagagcttctggaaggtaaaatccttcctggagtagaggccctcagcaacatgtag

SEQ ID NO: 142442 - DNA, 570 bp, Homo sapiens
tttttttttttttttttaacccccaaattataggattttattagccttgaaacaggccctgtggctgtcgtcccgctgggcacacagcaggggtgtctactggaggaatgcccggaggaagtcgttgtaggagatttttgaagacagcgtcttatcgtaatactccagaatatggaagaactcttcctcagagaggttgatgctgtactgtctcaggaccgtcctgaaatctgcgacgcttagcagccctgttccagcctcatcatagcttttgaacgtgcgccgcattggccctccagcagtgcacaattttgggctgaatacgcagcagagcagagtaaaaagatggcgtctccgcgccggcttctttcatcttgtgtgcattctggatcttcatcctgtgcatcagtgagctttcctttgcttttagcaggaggacacagctctgaatgaagtcacagtatgcaaatttcccgttgctctttaagtcgtattttataatgagctgctgacactcctctttgcttatgtccaggttgaatttctccacaagagccaggaaatcggagg

SEQ ID NO: 142443 - DNA, 1446 bp, Homo sapiens
ctccgagtccagctcaaacaggagggtgcaagcctaccgggtcctcccctacggggctcgtcctctcctgctccatgagagggcctcaggaggaggggtcagaacagcgttctgcaccttccattgccctcaccttgaagcatccttcccctgggtctgaccagtctgaccatagtcttcctgaggcctccgccgagcgaaggccaaatgggcgttttatttttttaattttcttcttcaccagtcactttgacagactctggaacgagatgccagtcaatgccaaggggaggctgaaatacccggacttcctgagcaggttcagttccgagacagcagccacaccaatggccactggtgactcggccgtggcccagagagggagcagtgtccctgacgtctcggaaggcaccagatctgccctctcattgcccactcaggagctgagaccagggtcaaagtcgcagagccacccctgtactccagcgagcaccaccgtgatcccgggcactccacccttgcagaactgtgatcccatagagagcaggctccggaagagaatccagggctgctggcgccagctcctgaaagaatgcaaggagaaggacgtggccagacagggggacatcaacgcctccgatttcctggctcttgtggagaaattcaacctggacataagcaaagaggagtgtcagcagctcattataaaatacgacttaaagagcaacgggaaatttgcatactgtgacttcattcagagctgtgtcctcctgctaaaagcaaaggaaagctcactgatgcacaggatgaagatccagaatgcacacaagatgaaagaagccggcgcggagacgccatctttttactctgctctgctgcgtattcagcccaaaattgtgcactgctggaggccaatgcggcgcacgttcaaaagctatgatgaggctggaacagggctgctaagcgtcgcagatttcaggacggtgagcacagctctgcgcccagtgcctctgcagggagcagctgccaaatgccagcggccagaaacttcccacggggagccctctacctgctgccgaaggcccggtgtgacctggctgcttcagatctcacttccctgggacccccaagttatccagtcctgggtccactcgcctcaccttcagaccccgggttctccttcccaaaggttgctggagccctgcgtggatgccccatacctgcatcgccagctcctcagggtcctgagacagtacagcatcaacctctctgaggaagagttcttccatattctggagtattacgataagacgctgtcttcaaaaatctcctacaacgacttcctccgggcattcctccagtagacacccctgctgtgtgcccagcgggacgacagccacagggcctgtttcaaggctaataaaatcctataatttggaaaaaaaa

SEQ ID NO: 142444 - DNA, 999 bp, Homo sapiens
atggggaaaaccaccccaatgattcaattacctcccaccaggtccctcccgcaacatatggggattgtggagattacaattcaagatgagattttggatggcgacaccgccaaaccgtatcattggtttttctatataaaccagtgtatagagaagccctttaaagagaatagaatggtggtgtcattactcatacctgcactcttggctgacccgaggataattagcatgaccaacaaagaaaattcatccagtgtgactgtatcagaccctgagatggaaaataaggcaggccagactctggagaacagctcattaatggccgagctcctgagcgatgtgccgttcaccctggccccgcatgtgctggcagtacagggcaccatcactgaccttcccgaccacttactctcctatgatggcagcgaaaacttatcacggttttgcctggttgacagagtgagaccctgccaaaaaaaaagaaagggagaaggagaaggaagcaataagaggaagaagaagaaggaggaggaggaggagaaggaggaagaagaaagaagaagaaagaagaggaagaagaagaaaggaagaaggaagaaggagaaggaggagaaggagaaaaagaggaagaggaagaagaagaagaggaagaagaagaagaaaagaagaagcagcaataaaaggaaaccaatcttcttttggaggggaaaagtgcccaagaatctcataattttacttctcattagcgaaagctcactgcatgctaaaagcagcaatggcagacaagacactctgtactcgaaaccaattatatccgaaataaaacattctggtttgctgctggacttcctggaagtgggtaaaaccatctggcaggaagtggtgacagacaagactggggagaaaagcagggaccagatcacaaagggcctgatgttccatactaaaggaacttgtaccttgttctccaggcagcggcaagctgttgaaaggttttaa

SEQ ID NO: 142445 - DNA, 782 bp, Homo sapiens
  misc_feature (1)...(782): n = a,t,c or g
gccgacctttggttttgcagctccggtgctggtgcggcgggggactgcggggccagcctcaggtagcagcagcagcagcagcagcagcagcagcagcagcagcagcagcagcagcagcagctgcttcattgtttcacttcttcagaaagcctccggattctaaaaagccctcagtaccagagacagaagcagatggattcgtccttttaggagatacaacagatgagcaaagaatgacagcaagaggcaaaacttcggacatagaggccaaccaacctttgggagaccattctaagaaacttcatccagtgtgactgtatcagaccctggagatggaaaataagggaggccagactctggganaacagctcattaatggccgaagctcctggaacgatgtgccggttcaccctggccccgcatgttgctggcagtacagggcaccatcactgaccttcccgaccacttactctcctatgatggcagcgaaaacttatcacggttttggtatgatttcactcttgaaaattcagtgctctgtgattcataacctttatgtctgtttgcaccttaacagctttaaaatatgttcgcctattttatctaacctgtttgatgttctttgccgtttcactgtttaaggtcctcagcaaggatcataaagcaaagaaaatagcattatgttcactactctatttttaagaaaaaaggtacatttggtatacaaattggaacttaagttccacttcctttctcccatataataaatatacaaattaggc

SEQ ID NO: 142446 - DNA, 1068 bp, Homo sapiens
atggggaaaaccaccccaatgattcaattacctcccaccaggtccctcccgcaacatatggggattgtggagattacaattcaagatgagattttggatggcgacaccgccaaaccgtatcattggtttttctatataaaccagtgtatagagaagccctttaaagagaatagaatggtggtgtcattactcatacctgcactcttggctgacccgaggataattagcatgaccaacaaagaaaattcatccagtgtgactgtatcagaccctgagatggaaaataaggcaggccagactctggagaacagctcattaatggccgagctcctgagcgatgtgccgttcaccctggccccgcatgtgctggcagtacagggcaccatcactgaccttcccgaccacttactctcctatgatggcagcgaaaacttatcacggttttgcctggttgacagagtgagaccctgccaaaaaaaaagaaagggagaaggagaaggaagcaataagaggaagaagaagaaggaggaggaggaggagaaggaggaagaagaaagaagaagaaagaagaggaagaagaagaaaggaagaaggaagaaggagaaggaggagaaggagaaaaagaggaagaggaagaagaagaagaggaagaagaagaagaaaagaagaagcagcaataaaaggaaaccaatcttcttttggaggggaaaagtgcccaagaatctcataattttacttctcattagcgaaagctcactgcatgctaaaagatgtagaagaaatgaagatgatttagagaatggaatgatcccgatgaagaatagcactttcacttacagcagcaatggcagacaagacactctgtactcgaaaccaattatatccgaaataaaacattctggtttgctgctggacttcctggaagtgggtaaaaccatctggcaggaagtggtgacagacaagactggggagaaaagcagggaccagatcacaaagggcctgatgttccatactaaaggaacttgtaccttgttctccaggcagcggcaagctgttgaaaggttttaa

SEQ ID NO: 142447 - DNA, 1206 bp, Homo sapiens
ttactgtgtctgtgtcacgtgtgcgttcagcagtgcctgctcctttatggtctgctgtaaccgccactggaggaccgcttctctgcagctcgaggactggagggtgaagaagtgagaagtttcaatctggggatcccgggcagtgcccattaattgcgttgcgctcactgcccgctttccagtcgggaaacctgtcgtgccagctgcattaatgaatcggccaacgcgcgggggagaggcggtttgcgtattgggcgccagggtggtttttcttttcaccagtgagacgggcaacagctgattgcccttcaccgcctggccctgagagagttgcagcaagcggtccacgctggtttgccccagcaggcgaaaatcctgtttgatggtggttccgaaatcggcaaaatccattaattgcgttgcgctcactgcccgctttccagtcgggaaacctgtcgtgccagctgcattaatgaatcgggccaacgcgcggggagaggcggtttgcgtattgggcgccagggtggtttttcttttcaccagtgagacgggcaacagctgattgcccttcaccgcctggccctgagagagttgcagcaagcggtccacgctggtttgccccagcaagcaaaaatcctgtttgatggtggttccgaaatcaggaaaatcccatgcagcgaagttgttggtggcagctgtgatcatcatggcaaactggggttcctcatagggagcattggaaagagcaggagaaggatgggcaaaggcaacttcataatctcttttggagcctaatcttaaaagggaaggtattacttttggctgaatcaaattgttgttcttagtatcttctagacgttccagaactgatgtcagatttgggtcttcagaatccacaaaccatatcggtgaagaagatggataggattccaccggccagctgtcccacacatcaagtccttttgcagactcaatatttttaatcgttgattgatcgaattgaggcacttggtatttttcgttttgctgctgtttagggatctgcagcatatcatggcgtgtaatatgagagacgccgtacgtttctttgtatgctttttggttattttctttcgcgaaggcttgagtcgctcctcctgccagaagtgcagtcgtaaaagtcagaactgtggcttgttttacaatttttttgatgttcatgttcat

SEQ ID NO: 142448 - DNA, 506 bp, Homo sapiens
cagacaccgtggagatggtgagtgaagttgagccacctgcccctcaagttggtgccaggtccagtccgaagcagcctctggcggaggggctactgactgctctacagcccttcctgtctgaggccctggtcagccaagtcggggcctgctaccagttcaatgtcgtcctgcccagcggcacccaaagcgcctacttcctggacctcactacaggtacccttggagggactgagatcctggggatgcctggagcctggctgcatggcctggccgccctgatgccctcgtgctctccatggcaggccagcaaggctgaggagaatgtctccgacagcttcatgcactccatggacccacagctggagcagcaaatggagaccactcagagcctggtggactcctatgtgaccattgtcaacaagaccgtgtgggacctcatggttggtctcacgcccaagaccatcatgcacctcatgatcaacaacatccaggagataatcaactaa

SEQ ID NO: 142449 - DNA, 1519 bp, Homo sapiens
atggatacagggcttatggcaggtctggggttggcagtgctgctgtgggagcctgtaggagggctcgtctttggaatcccccaggaggactggaattcaaaacaagtgtcccctgccctgtggctgggggacatcctctacttccaagcccagacatacaccagctgccacaagcccctgaggctctttagaggaccaatggacagccacacccacaatgggccagcctgctgggccacctgcaccctggtgattccagcctcgttcctccatgggccaaatatcctaaacaaaggcctggacagggggtctttatctgactgcccagaaaacacacgcagaaaggctctgcatgccctctgtggcctgccaggggccagcaaggccgaggagaatggctccgacagcttcatgcactccatggacccacagctggtgtggcaaatggagaccactcagagcctggtggactcctatgtggccattgtcaacaagaccgtgtgggacctcatggttggtctcacgcccaagaccaccatgcacctcatgatcaacaacatgcatgcaccacctcatgggggcaggggctcctgtagcactggggacacaggtggctgtgttggcctggcagagatgacaaccagccctaccaaggagttcatcttctcagagctgctggccaaactgtactcatgtggagacgagaacatgctgatggaggattccacggagcaggcaaaatggtgcaacgagacgctgtgcatgcaccatgtgctgagggaggcgcccaacatcatcggcgacatcaaaacaaccatggaatcctatccatcttcttcaccgatatggtttgtggattctgaagacccaaatctgacatcagttctggaacgtctagaagatactaagaacaacaatttgcttcgtcagcaattgaagtggttgatatgtgaactctgcagtttatataaccttcctaagcacctggatgttgagatgctagatcaaccactacccacgggtcagaatgggacaacagaagaagtgacttcagaagaagaggaagaagaagaagagatggctgaagtaggaacatggatggagctggaggccattatccttagcaatactaacgcaggaacagaaaaccaaatactgcatgttctcacttataagtgggagcaaaatgatgagaatcaatgagcacaaagaggggaacaacagacactggagcctacttgagggtggagggtgggaggaaggggagaatcagaaaaaataactattggcttagtacctgggtgatgaaataatctgtacatcaaacctctgtgacacgagtttacctatattacaaacctgcacatgtatacctgagcctaagataaaagttttaaaaacaacgagtcccttaataaaatctctaattttctagatccgaagatgcactttcttcctttttcacgtattaatagtaaatgcaaggtggggtcttgaagtgaataaaaacaagtcctct

SEQ ID NO: 142450 - DNA, 5160 bp, Homo sapiens
gggaaaaaaaatatttaatgtaaatgtttagccattagaacatacaaataaataaataagctcagaatagctgagaaaaaaaccacaaataagtgaattgtcaatttctcctcagtctcagatatgctatttccaaaatactaataaaatatacaaattaactaataagatatagaacattcaacataaaacctaaaataaaaaagaccaaccctaattattttatttctgtatatcaagactacaaatagcatttaaacgcttattattcaaattaagaaattatacattttgttttgataatgttcattgtcttaaaagtgtcattcagctttcccactttaaaagtatattgctaattatggtcaattaactatgacagcccacagagcctccagtgacagtaaaatactagacatagaagagataaatgaggatttagatcccctccccccagcatcagcaaagggtcactctgctcccacagctgacgctttgaaacgctttctgtttgtagagactaaaatcacccagcaacaggtcaggtcctgataaagtgcctactgcaagaactaccgacactcctcttccctggatgtgcaccagggactgtcccgtcttcgagtcagagcagcaccaggaagcagagggtgccaagcatggcgagtcacccccaaatatccaggaagacaagtgggcgcagcccaggggaaaggagggcgagcggatgatgggagaccggcacggctagcatcgggacaaagatgcagccgccactttggttcaaacaactttaatgacaccacagtgtctgtcctcccccaagtaactgggtatagtgggtgacagatgttgcagtagcttggcagaccctcctcctccacctcccctgaaagctctccaggcacaaagtggagatagaaataggacaatgaatgaagtccccacctcacatccacagacagtatctccaaaccatcatgaggcaggccacggtatactgaaaacaagcatgctagtcccatttggggaaatggcttaaaaagcacaaataaaatattaccatcatcatctcttttccaaacctaaccactttgggaaaggcagcagaaaaaaaaaatgccttcagttttaataatgaggcttgtaaacaatccaaccacataagcagcagcggccccatggcgtctcagccctcagaccctgtatctctgccgcctgtgcagccctgtctgaaccctggagtggcgctgcctgctcaggagggctctgatctcaccagcaaagccaaagcttcatctttggttaatttcactgagatgccactagtgtaaaaactgtgctcttcttggcaatattactaaagtagccacatggcacataacgtgttattttaagttatttgaaaagcaatgtccatctaaataagtgaccacaccgtaataaaaatcatttaaaaaaggaagggagggaggaatggcagaatgaaagaaggagcttaggagagcctcaggcgtgcagtgtgagtatcctcgtgggtctggggaggcgctgctgacgaaggaagcactggttctctgtaggggtctgaccccagcatcagcttcagctcagctcaaagccagcggcacattcaatcgcatagagaagtttacttcgcaaaagtgtctcgtcatagaactcggggagcttcagcaggttcatgcaggtgctggctgtggggagccgctcaaggtcggagcctccgttgtgaatacaaaatgcgggatacaactccttaaaccccaagagagggggtcgagagcagcttgttacaaacttcagcagtttgcgcttttcttcatcagtgaacccttccacaactctccagaagaccttaataacaggatggtctgcagaatagcctcctgaatagtttgtaaaggattttaggtcctctaggcttatgggaacttgtgcaccagaaattaatacctgaatttcttgctgatcaaacattcggagccactcgaggctgacgacattggcaaggccctggcggaaagccaggcagtgctggcggatctgcctgttcagcctgtagtctgccaccaagtggatgtacgcaatccggttggcgctggtgacagggatgtctttcccaccgaattttagttcaactacctgcgcctctcccaggtcattgttcaccacagtgaagttcagcccaagctcctccacatcgtcttcgtagctcttcagaaagagcaaattcttatacacctcagggtctagggaggcgaggtggtgaatgtccacgtcggcactggttccaagcaacttggaaagaaagaagcctgcaaagggcagctccaccagcatgttctcatagagagcctttccaagcattctggctaggaagtagtaatgtctggcaaaagaatctcccacaagcatctgagcagccgggttggggtacagaagcccttcattagtagtcttaaagaacccctggttggggttaaatcctgacttcagtagttcatttaaaaactctctgaaaataccaccaccatcaatgccagcttcatccaggccatgggcattgagcaagtgcacacggatccgctttttcaaatcaggctcattttctggagaaagtttgtcataagcatcttcataaatgtaatttcttcttattgtgacattaattccatccagaaatggaccatctccttgaacttcttgcttatctgcataaatcaacctctgaaagatctttactcgttcctcaaatggaaccacaaaaggcaactctgtcaggacagcaagctgtctttcctcagacacagacagcggcggggactccaaacccacgtccagggtggactgcagcgggcctatcctccccatccgccggaacctccacacatgtctggatgctggcacatagagctgagtgaccttatctgctttaatatcttcttgttctgacagccagtggtttggaggacaaaaatttctcctcgtgtctctggacttcaacattttcactagattggtgataaccttaaataactgaatccatcttttctgttccatctgtatgcattgttgcatttcagagctagtagtaactccaatactctgaaatgctgtaatatattcttctcgaacttctggcttggtttctggataagccaacttgatgatccccaggcatgcatctcgaaggcatcgagacaacattatcagctcttctaaagtaaaaggcatcattgatgattgtctttgacctacaacttctatgggatcaccgaagaattcgttatcatgtatggaaattagtgaatgactaaacaaggagctaaaaaggtaaaagagtgggatgattcgactagaatcttcaaaagacataggagaacccctggatatcacctgaagcaacggtaccatagaccctgtgatcatccgtgttgacatggaagatattagaaaccaaagatgtctcagaaacctggcattaaaggctaaactgtagagaagcctgactttgggtaccatcatgcggtgctgcaccatcagcgtgtggcagacggaggccatggtggtgaagacctcctcgctcgcagagtccctccacaccaggttgagcagggtgttggtctgctgctttgtgtccagcttcttcaggcattcctctgttatgtatgatactgacagtctgccatcctccgggcttgagggcttgtcggcttcttcactctcctcctcagagtcactggctgagtcgtgacagctcgcgctggcaggagagactggtaactgagagaggaaggtctgcagcacccgcaaatacaccagcagcccttcctcagagagggcccccaaataattttcgccaacagttaaaacgaaatagaaaagccagggtgctccaccactctttcttgaacatctactctctattaacaacagtgcattcagaaagggctcgtaagggaaaacggtctgcgcatctgcaagcgccggaatgatgaaatgaaaaatctgatctgtaaaaggtgctgccagaaactcctctgtgaaggctgtaaaaacttgttgcctcgcaccttccggacaggagttgtaagtaaagtgcaatggttttagaacattctctagcaaaatttttgctataggaactcgagataaatcagaatattcaatacttgatggaagcttgctgttaatcaacaaatatagagacctataatacccattgtgaatcatgtagtgcaaaatttgttcaatcactgacaccacatagctagcatcttgtaaaacaggcaagtaagtattctcagacgaaaatacttcaagcattctcattggaagtgcaacattcaaactgtcatcattacagttttgcagcaacctgcaacagaggctcatcaatctttttatctgaaataagcatgtaagtctctcagatccatccaactgcttgacaaacagagagctgtgtttaattaagttctgatacagccatatcaaacgttttgagtcttcattttgtttgtaaaaaaacagaagctgccttaccaaaagggtaaggttggggccattagcaatgggaaaagcgcccccggactgtgacaaggtagcacagcgatcaaatgcacttctttggatggaatattgctgttttctgtctctatagcctcgaataaatgactggataattattgcatttttcaaccttcgcctttcttcctctctctttcttctttcttcctgagtacgatgtaaaagagaagccttttcctccttcctgctcgcgccgccaagggacaccttgggccgcgtcttgaagtcgccttcgaagctgaacatcctggcagcctagcccatgtgcgggcagcgccgccgcggaagcagccgggcgggcggggcacggggcgggctgggaggctctcggcgcccgcccgcccggcccggggcagcgaggacgcggcggccgggaggcgacccgagcccgcccccgggctgtaccctcccagccctgccctggggcgggaggggcggcaatactggaggggcggccctgcctcgcctgcccctcatccacgccggccacagctcgggccgctgcaggggcgcccagcgggcagcaaacccggcgcttgcacctggaac

SEQ ID NO: 142451 - DNA, 801 bp, Homo sapiens
gaagaaaggcgaaggttgaaaaatgcaataattatccagtcatttattcgaggctatagagacagaaaacagcaaggccacctcaaggtctgcccagcagatagggagactcggatccttcgttgccacttcccgtgtgcacagacacctctgggactccagggcagcattgccgcgtgtctgaacacccgccgacaggatccagccagaagccagcggtctgcggagctgcagggtcagccagctggggccccagcagagcaggggaagcctaaacagcacatgctccaggtggatcagcccgccctgtcgaagggcagcttccctagcagcgacccttgtgctgggggcgatgcctgcacgttttcgcggtgtgctgttgaagaagccttgcgggagaaggcacggaacaggcaggaccagggcttggcctttaccatgccccagacactcttccagatgccgaggacaacagcagagaacaacacagatctgattcttggtctcatggagcacacactgtcccaccgagggatctctatcaccatggccctgcaagcccaggctctgctctttcaggccctcatcgcgatggccgcggctttccacagggaaacctgctgtcctcatctagaatccacaaggacagaggaggggggaccacttcccaactcattttacaagtctactattttgctgacatcaaagccagataacgacacagccagaagagaaaatgacagaccaatatccctgataaacatggatggaaaaatccgcaacaaaacaccagcaaactga

SEQ ID NO: 142452 - DNA, 4557 bp, Homo sapiens
atggtttcagagaaacgagaaagagaaaataactccccaaaccggcctcgcgcacgccgtcggccagcgactgccagcgggatgggcctttgggcgaaccctgcctcctccgccggtagacctaacccgcaggcccgacctccgctgcctccggacgttcccggttctgctgggccgccgcgctggactgagcgctcaaccacccgaccccagggagctcgaggagcgcgggtcgcgcacgacgtcgggaaggcccaggaggccgcgagcagcggcggcaaccggacagcgccgacccggcaccctgagctcattaggagtccagcggtcccgcgggtagggctcggagataccttaaatgccgcgagactgaagagcaaacgtcagggattattatgtcgattttccgaggaccagggttcgcagctggcagtagaaaaaaaggctggctcctcaggggtcccactggcatttgataccctgaacgaccctcaggattgcccaaattcggtggatcgcccaaattcggtggatcagcaactttcctatactgcatcccgaattttcaaagaacatattttccgttcacccccgctggtcttttactgccatcaatacactgttcttggtgcaaatacttcagcctctttattcaaagtatgttttatgaaggctcccgctggagtcctctaattgaaagtttatttttggttttggatgaatctgcggagcttaagttgtgagaagaaagggggaacaagacacaatgaaagaaaagtccaaaaatgctgcgcggactaggagggagaaggaaaacagcgaattttatgaactggctaaattactgcctttggcctcggctatcacctcgcaggtggacaaagcatccataatcagactcacgaccagctatctcaaaatgagagtggtgttcccagaagggctcggcgaggcgtggggccactcaagtcggaccagccccctggacaacgttggccgagaactgggctcccatctgctccagaccctggatggcttcatcttcgtggtagccccagatgggaagatcatgtacatctcagagacagcctcagtccacttgggtctttctcaggtagagctgaccggaaacagcatttatgaatacattcacccggcagaccacgacgagatgacggcggtgctcaccgcccatcaaccctaccactctcacttcgtgcaggagtatgagatcgagcgctccttcttcctgaggatgaagtgcgtcttggccaagcgtaacgccggcctcacctgtggcggctacaaggtcatccactgcagcggctacttgaagatccgccagtacagcctggacatgtcccccttcgacggctgctaccaaaacgtgggcctggtggccgtgggccactcgctgcctcccagcgccgtcacggagatcaagctacacagcaatatgtttatgttccgcgccagcctggacatgaagctcatctttctggactccagggtggcggagctgacggggtacgaacctcaggacctgattgagaagactctgtaccaccatgtgcacggctgcgacaccttccacctgcgctgcgcgcaccatttgctgctggtgaagggacaggtgaccaccaagtactacaggttcctggcgaaacacggcggctgggtatgggtgcaaagctacgcgaccatcgtgcacaacagtcgctcctccaggccacactgtatcgtcagcgtcaactatgtcctcacagacacagaatacaaagggctgcagctctccctggatcagatctcagcctccaaaccagccttctcctataccagcagctccacccccaccatgactgacaacagaaagggggccaaatcccggctctccagctcaaagtcaaaatccaggacttccccataccctcagtattcgggatttcacacagaaagatcggaatctgatcatgacagccagtggggcggaagtcccttgaccgacacggcctctccgcagcttctggaccccgccgataggcctggctcccagcacgacgcatcgtgcgcctacagacagttttcggaccgcagctctctctgctatggctttgcgcttgaccactcgaggctggtggaagagaggcatttccatacccaggcctgtgaaggaggccgatgtgaggcaggcaggtacttcctgggaacgccgcaggccgggagggagccctggtggggctctcgcgcagccttgcccctgacaaaggcctccccagaaagcagagaagcctatgaaaacagcatgcctcacatcgcttcagtccacaggatccatgggcgaggtcattgggatgaagatagtgtggtcagttctccagaccctgggtcggccagtgaatcaggtgaccgatatcgtactgagcagtatcaaagtagcccacatgaacccagcaaaattgaaactcttataagagccactcagcaaatgattaaagaagaagagaacagattacagctaaggaaagccccctcagaccaactggcttccattaatggggctgggaaaaaacactccctgtgttttgcaaactaccaacagcccccaccaacaggtgaagtctgccatggctctgctcttgccaacacttcaccatgtgaccatatccagcagagagagggaaaaatgttgagcccccatgaaaatgactatgacaacagtcccaccgcactatctcggataagtagtcccaattcggatcgcatttcaaaatccagtttgatcctagctaaagactatctgcattcggatatatctcctcatcagacagcaggagaccaccctactgtctctccaaactgctttggctctcaccggcagtattttgacaagcatgcttacacattaactggatatgccctggagcacttatatgacagcgaaaccattagaaactattccttgggctgtaatggctcacactttgatgtaacttcccatctgaggatgcaaccagacccagcacaaggacacaagggaacatctgttataataaccaacggaagctgatgttttgctgaaatattttgttctttaaggatctctgaaacatatttatagtttaataccccattaccagcatttactatgccacagattgttagagagtataacttaagttactgggtatttgatacgtgttcctataaaatcaaagaaaacatagcactagcattcagggttatacacagaaaagggagctaaattgaatacacaaatttcccctctaattatatgggaaccagaatagataaattttgacttgaaaaatattcatgtagatcaagtgtgcatatatactacatgagaggactgatgaatgacaacattgcattgtgactatccagtgatcctcaaacacacaaactattacttacaaactgcggtatacattttacatatggaaatataggctatgtaatgtaaatacatcaaaaatgggtaattttctttgactctgtcacactaaacttcttaacgaaatttccattcccaaaataactgagaaagagagagatacatcttataaactgacttctttgtggtttcaaatcagccagctcatttggttcaggcataaattagagaaatggttctggatatggtgcaaaaatgagttttcacctggtatccattataaacaatcaggaagaggtaatttttcaccttgcttttcagttagacaaggaccaggattgcactgacatggcgctgagggtttttctaagtaagaacactgagatattgggacacacatcaaaaacctggagtgctcaattggaagtagttctatgaatatggaaaggccagaggcagagtgaaataaaatgctatctcaaagtttaacacaatttaagggctcagcataagtaaacaacatatttggggtttgcttgtaaaaccaactaaataaaaaattcaaaccaattcacccagaaaaaagaccaataggtgcaaaaataaaaggaaaaccagtgaagtgccacatgacagcagtgttaagtgtttgaaaacgtttcaaagcacatatgtgccaatgtgacaacatgtggaaagcctcaggagagagtctaagataaaagcttaggctgatagacaagtagttaagagctaagagcagtactctgaaggaataggcaaaatgtttattttccttattgtttgtaaacaacaaacttggtcttacatctgtgtggtatagtagaaaggccagctgactagatctctggattctaattttggccctacctgtaacttaattttgtgaccacagttgtaccattcaccgtgcctgggctctagtttcctggtttgtaaggcagccccagcgttcatgttctgtgatagagcagaactgaacttattacctaattaactctctgctatgagttgtcaagactgatcattctgttttttctgtacacagaagtttagatgctttgtgacttaagcaggtgtgtgggctcctttaggcaggttacagttaatttctagagtcg

SEQ ID NO: 142453 - DNA, 295 bp, Homo sapiens
  misc_feature (1)...(295): n = a,t,c or g
cacgggccggctctgcaccgtggctaaggcaagggggntgcgagcctgcaggtgagccacccccacccatgccctgggctccaggggaggctgcgaggcccctgaggactctcctcagcttcctcattgcaggggagagctgagggacaccatcctagactgggaggactccctgcccgaccgggacctggcactcgccgatgaggccagcaggaacgccgacctgtccatcacgctgggtacatcgctgcaggatccggnccagcgggaactgccgctggntaccaagcgccgg

SEQ ID NO: 142454 - DNA, 376 bp, Homo sapiens
ggcctgccaccttcaggggtccccacggagtctggaccatggaggagcgaggtctggcccccaagttcgacaccacctttgagagcgcgcggcccacgcagacccacatggcgctggtgcagctggagcgcgtgggcctcctccgcttcctggtcagccagaacgtggacgggctccatgtgcgctcaggcctcccttctgggccccctacagcccaccctacccctcctccatgggccctgcaggaggggagacccaccttgaagtgggggatcagtagaggcttgcactgcctttggggctggagggagacgtgggtccaccaggcttctggaaaagtcctcaatgcaataaaaacaatttctttcttgcaaaa

SEQ ID NO: 142455 - DNA, 1197 bp, Homo sapiens
atgtcaccattacctggtcacatgtttgtgtccacccgcagccaccagggcatagatggtaccacctttgctctccagtgtgcccagtacaaatcgaggatgtcggtgaattacgcggcggggctgtcgccgtacgcggacaagggcaagtgcggcctcccggagatcttcgaccccccggaggagctggagcggaaggtgtgggaactggcgaggctggtctggcagtcttccagtgtggtgttccacacgggtgccggcatcagcactgcctctggcatccccgacttcaggggtccccacggagtctggaccatggaggagcgaggtctggcccccaagttcgacaccacctttgagagcgcgcggcccacgcagacccacatggcgctggtgcagctggagcgcgtgggcctcctccgcttcctggtcagccagaacgtggacgggctccatgtgcgctcaggcttccccagggacaaactggcagagctccacgggaacatgtttgtggaagaatgtgccaagtgtaagacgcagtacgtccgagacacagtcgtgggcaccatgggcctgaaggccacgggccggctctgcaccgtggctaaggcaagggggctgcgagcctgcaggggagagctgagggacaccatcctagactgggaggactccctgcccgaccgggacctggcactcgccgatgaggccagcaggtctgaccccccacccccagggagcccatggaacgccgacctgtccatcacgctgggtacatcgctgcagatccggcccagcgggaacctgccgctggctaccaagcgccggggaggccgcctggtcatcgtcaacctgcagcccaccaagcacgaccgccatgctgacctccgcatccatggctacgttgacgaggtcatgacccggctcatgaagcacctggggctggagatccccgcctgggacggcccccgtgtgctggagagggcgctgccacccctgccccgcccgcccacccccaagctggagcccaaggaggaatctcccacccggatcaacggctctatccccgccggccccaagcaggagccctgcgcccagcacaacggctcagagcccgccagccccaaacgggagcggcccaccagccctgccccccacagaccccccaaaagggtgaaggccaaggcggtccccagctga

SEQ ID NO: 142456 - DNA, 951 bp, Homo sapiens
tcacggtgctttcgcaagtgaggcctcagatctgcgctcttcaaatcctacataaagagcccagaggttctccccatgctcagcactgggctcgctttcctgcagaggaaacgatggcaggtagagcttaagaatgacgttctcccccaggtcggccgagagtgatgtagaaccgtagaatcctagagttggggaaaagaggtcttgggggacatctggacggctcccctccagagtagaaccttctcccccgtgggttccacattgctcttttttcatcatcagctgcagaagacaccctgtcatggccaccaagagtaaattcacaggcttgtaaaagcctaactcaagtactgccaaccgcaggtggctctgctcatcagccttgtccagtgatttagtgatggggggagggcccttctctgcaggtgatgaatcattatcatcatggtcatcgtcatcatgatcatcaccggctaaacttgttttattatccagagagtacaggcaagatgagtgtagaattacctgcttcctgcccaccagtgaatgaggatagctggtttgagccatcactaccaacagccacagctgtgtcacgctgtaggtgagattagtaaacttgctccagctcaggatattctgaaatgtgtgtttcatcttcttccagtatggaaaagcgggctcagtgaagagggaagagcgagcatccactgccagctttccagttggacacgagccatgcaaaggcatccaggaagaatctgcatccagctcttcaagctgcagttcaggcttggttgaggtgtccggcggcggcaattttacccaaagcggtgtggaggtgggggtggctgttgagcagcacggcacttccaagttggttccacggtagccgtccttaccctcctgctcgttcctgtgccaggaaccacggtcggggtgccacat

SEQ ID NO: 142457 - DNA, 4199 bp, Homo sapiens
ctgtgcagaccatgacaactagtttagattttattgtcagctcattaaaaactcgttctcgttttgtgtttttaaaaaattccactgatacagccgttttctctaccgaaaaagactataaccgcattatttcaccagtggaagctacagacaaagggcccttgagaggcggcatcttcacctacgggaatttttcctgttgacagacattgccagacacacggaatccctcgcagaacaccgatgggcccacaaagcacgcggaggccgcggccgctgacgatgtgagcaaattcggttcacggtgtctgggcttctctccttccaagagcgtcatttcttggtcctctctacagcggctcagcagtaagcccaaggtccagcacgcgaatcaggaacctgatgattcttcggtggtgaccgcattgccttcaaacctgaagtccgagtgcttccaccctggggaatatgcagaccgctgggtcactggacgccaggccgcggcattccctgagcccctgggagtcagggctgtggccctgggcctggagccagtctcctgccatgacaaccaggacaaagacaattctggtcccacagtcttgcatctgactgcccgctttggccaccccaaggtggtgaactggctcttgcatcatggcggtggggatcccaccgcggccacagacatgggcgccctgcctatccactacgctgcagccaaaggagacttcccctccctgaggcttctcgtcaggcactaccctgagggagtgaatgcccaaaccaagaacggtgccacgcccctgtacctggcgtgccaggagggccacctggaggtgacgcagtacctggtgcaggaatgcggcgcggacccgcacgcgcgcgcccacgacggcatgaccccactgcacgccgcggcgcagatgggccacagcccggtcatcgtgtggttggtgagctgcaccgacgtgagcctgtcggagcaggacaaagacggcgccaccgccacgcacttcgcggcgagccgcggccacagcaaggtgctcagctggctgctgctgcacggcggggagatctcggctgacctgtggggcgggaccgcgctgtacgacgccgccgagaacggggagctagagtgctgccagatcctggtagtgaacggcgcggagctggaagtccgcgaccgcgacgggtacgcggccgctgacctgtcggacttcaacggccacagccactgcacccactgcctgcgcacggtggagaacctgagcatggagcactgcgtgctctcccgggatccatccgtggagctggaggcgaagcagccggattcaggcatgtcctcacccaacaccacggtgtcggtccagcctctgaactttgacctcagctcgcccaccagcaccctctccaactacgactcctgctcctccagccactccagcatcaagggccagcaccctccacgtgggctttccagcactagagctgcagacatacagagctacatggacatgctgaacccagagctgggcctgccttggggcacgattgggaagcccatacccccaccacccccacccagcttccccccgccacccccgcccccaggcacccaactgcccccacccccacctagctacccatctcccaagcctcctgtgggaccacaggcagctgacatctacatgcagaccaagaacaaactccgccacgtggagacagaggccctcaagaaggagccgagctcctgcgacggccacgacgggctacggaggcaggactccagccgcaagccccgcgctttcagcaagcagcccagcacgggggactactaccggcagctgggccgctgccccggcgagacgctggtcgcacgcccgggcatggcgcaccgcgaggaggcggaactccctgggaaccacgtgcctaacggctgcgccgcggaccccaaggcgtccagggagcagcagctgccgccgccgccgccgccgccgcccctgcccgaggccgcgagttcgccgccgccggtcccgcctctgcccctcgagggcgctggccctggctgcgggcagcgccgctcctcctcgcccaccggcagcaccaagtctttcaacgtgatgttcccgatgggcgacaactcggagctactggctgagattaaggcaggcaagagcctgaagccgacgccacagagcaaggggctgaccacagtgttctcaggcagcaggcagccggccttccagcccgattggccgctgccgtctgtgtcacctgcactgttaccagtccggagccccacaccgccagctgcggggtttcagccgctgcttcaatggaagcttggtttcccgttgccgcccactactcctgcgccgggggtgcagctggacgtggaggcgctcatccccacgcacgatgagcagggccgtcccaagcccgagtggaagcgccagggtcaagatgaatcagggacctctgtggaggcgatggcaggcccaggggggaaaactggacatcagaggggttttggcgatggcaggcccaggggggaaaactggacatcagaggtggagaaaacagcgagcagcaaccggccgtgccccccgccagcgaccaaagtggacactgcccagagcctggagcggcggctcaggccgaagcctcaccccagcgtcaccccccgccggccagacgcggtccctccctgcagacgcagccccgcggagccattacaccacccaggacatgcaaaagctgacggccgccagctcgtgctgctacccccgcgagggctggaggtacccccgcgagggctggaggtactcccgcgagcacaacgccatcctctggccctttggcgagctcatgaccgaggccgacatcctccgcatcgagcagcaatcgagaacctgcaggtgctgcacaaggcgcagaagctggaggcgcgcctggagcaactggagctgagcagctgctgcccatctccgtcgccctgtggagccgcgcttcaccgtcgacccgcgccgaatgcatggccgcgccgccagcctgcccgcctggctgtggcgcgcgagatcctcgagtgcggcgtctccgtgcagcatcaccgcgccacctacgagctgcgcgcactggacgcggcgcccccgcgctgtccgcgccgcaagcccccgcagtccgctggcgccccggaggactacgtggcggccggctctggccagcccagcgccgccgccgcccacggcccgctggccgactgggagcccctggacaccctgggcccgcctgaggcacaggattgccaggcggcgctacctgagcccgagcagctggcgcgccggccgcccctctgcacggaactgcgcggcgtccaggactacctcgacctgcgcaaggagcgcatcgtttacctcttcctggagcactggcgccgctgggccttccgcggaccgggccttccgcggaccaggccgccgcgcccaggcgcgcctaggcagactgctgcctggcgtgacggccgcccgtgctggccggagctggaggccacagacgccccccggctgccgctgctgaggcagcggcaggcagtgggcaagctgctgcaccactggcggagcctgcggcggcacgtgccgccaagcccgggcctggcgcacggcgtgtactggccccagcacttcctgtcgcccctagacggcggcgcacccccgcgctacgaaagcctcacgctcgacctcttcatgctcggctacttccagctaccggagatgggcctgagccgcgaggatcgcaagttccgccacctactgtgctacgagatgttccaccggctggacagccacccgtgggagcgcatccgcctcttccaccgcgtggtgctggaggaggtggaggccggccggcgcggctggagcgacggcttcgaggacctcaggcacaggttcttcggaaacggcctggaggctgagccggcccccgaagaacaggcgaagaaaaaggaagagaaggggaaagaacaggagcggaccgaagaggccgctccggttcagaagggggacccgcccaaggggcagcgcgaggccctggcccctgtgccgcagccgccgcgcccgcccgcccgccgcgcctcccccgatctcagactctccgggttccgaagcccccgccgaagaccctttggaactggtgtctga

SEQ ID NO: 142458 - DNA, 3415 bp, Homo sapiens
atggatgggaggaggcagggctgggacagaccatgcagcaatgatggatttggaccccaaccagaagcccctgggtcatctgggaccatgaacagaggtgagaggtcacgcatgcagggcaggttaccttctactgagtttggtcccagctcacttgtcacctccactgggaagttctcactgatgctcctccatgaggggccaagcaacatctttacacgccccaccctcaacttcatcacaatacccctatcatctactcacatgctggcctttgcacctgctaggccacctgcctgcaaagcctctcagctccttaacctggctaaactccccctcatccttcagagttcatcctataagaagcaccccttcctcaagggagccttccttagttgctctgactgggcagagtttcacaacctccaatttggcaattgtcaatttagagcccctggctacagcaccccaccctgggcagagccacttcgccacctggtggctggttcctggaactgcatgttccacctcatctctgggaagatgctgctcctgacatcttctcccaggacccaggcgtcccctccctgggggcaccagtgtaaatgcttcatgggaaaaggattcgatgctctgacagagccatctacggggaagacctgcctgcccaaggccttgctgaacctgagcaatggccgcaacgacaccatccctgtgctgctggacatcgcggagcgcaccggcaacatgagggagttcattaactcgcccttccgtgacatctactatcgaggtcagacagccctgcacatcgccattgagcgtcgctgcaaacactacgtggaacttctcgtggcccagggagctgatgtccacgcccaggcccgtgggcgcttcttccagcccaaggatgaggggggctacttctactttggggagctgcccctgtcgctggctgcctgcaccaaccagccccacattgtcaactacctgacggagaacccccacaagaaggcggacatgcggcgccaggactcgcgaggcaacacagtgctgcatgcgctggtggccattgctgacaacacccgtgagaacaccaagtttgttaccaagatgtacgacctgctgctgctcaagtgtgcccgcctcttccccgacagcaacctggaggccgtgctcaacaacgacggcctctcgcccctcatgatggctgccaagacgggcaagattgggatctttcagcacatcatccggcgggaggtgacggatgaggacacacggcacctgtcccgcaagttcaaggactgggcctatgggccagtgtattcctcgctttatgacctctcctccctggacacgtgtggggaagaggcctccgtgctggagatcctggtgtacaacagcaagattgagaaccgccacgagatgctggctgtggagcccatcaatgaactgctgcgggacaagtggcgcaagttcggggccgtctccttctacatcaacgtggtctcctacctgtgtgccatggtcatcttcactctcaccgcctactaccagccgctggagggcacaccgccgtacccttaccgcaccacggtggactacctgcggctggctggcgaggtcattacgctcttcactggggtcctgttcttcttcaccaacatcaaagacttgttcatgaagaaatgccctggagtgaattctctcttcattgatggctccttccagctgctctacttcatctactctgtcctggtgatcgtctcagcagccctctacctggcagggatcgaggcctacctggccgtgatggtctttgccctggtcctgggctggatgaatgccctttacttcacccgtgggctgaagctgacggggacctatagcatcatgatccagaagattctcttcaaggaccttttccgattcctgctcgtctacttgctcttcatgatcggctacgcttcagccctgcgcctgcgcattgagcgcctgcgcttgagcccctgcagctcccacgggcccgcatctggcactggacctggcatacagcccattccagggcatgttttcttccagcttatcccccagacatcctcagagagcccctccatgccaggcgaggcggtggccagcgccatgcattcctcccgctacccgagcccagcagaactggacgcctatgccgagaaggtggccaacagcccgctgtccatcaagatcttccccaccaacatccgtgtgccccagcacaagcacctcagccgcacagtcaatggctatgacaccagtggccagcgctacagcccctacccacagcacaccgctggctaccagggccttctggccattgtcaaggccgcggtttcctcctccagcacggccgcaccagctgggcccgccaaaagtgtgctcaagagcgccgagggcaagcggaccaagctgtcaccggccgccgtgcaggtgggcattgcgccctacccagtgcccagcactctgggtcccttggcctaccccaagccacctgaggcgcctgctccaccacccggcctgcccgcagccgccactgccgcctccgtcatccccctgccgggccggggcctgcccctgccaccttccaacctgccctccatccacagcctcctgtaccagctcaaccagcagtgccaggccccgggcgccgcaccccctgcctgccagggcatggctattccccatcccagccctgccaagcacggcccagtgcccagcttccccagcatggcctactcggctgcagccggtctgcccgactgccggaaaggcactgagctgggccagggagccacccaagccttgacgttggctggggccgccaagcctgcagggtacgcagacagcggcctggattacctgctgtggccgcagaaaccgcccccaccgccgccccagccactgcgtgcctacagtgggagcacggtggccagcaagtcccctgaggcttgcgggggccgggcatacgagcgggccagcgggtcacccctcaactgtggcgtggggctgcccaccagcttcaccgtaggccagtactttgcggccccgtggaacagtgtgctggtgacacccaccagcgactgttacaacccagcggcggcggtggtggtcacggagctggggccgggggcaagcccgggaagcttggcttgggccccccttgcaaggaatcgtctcgggccttgcccagcaaagagtgtgtgcaaacaacatcgggtgctgagcaagcagcctgcagtcacttggagtatctcatcaacgacatccggccgccctgcatcaaggagcagatgcttgggcaagggcttatgagacggtggccgtgccccggctactcgaccaccagcatgcccacatccgcctacccgtctacagataa

SEQ ID NO: 142459 - DNA, 3750 bp, Homo sapiens; identical to SEQ ID NO: 140234

SEQ ID NO: 142460 - DNA, 1215 bp, Homo sapiens
atggagaaacaactgaaccttgaggactctcagcagataaaccagatgaagtggataaagactcgctgtgtggagaaggcagggcagcccacgcagaaaggtgggaggcaagtagacagaggaggtggtagagcggtgatggagtgtgagcatctagataaaaagctgcagtcagcttcccaaaaatcagggaaaataataaccggaaataataaagtagaatgcaagaacaaaccagcaatcctgagaggacccacagaccctctgaaggaagcagactgctactgcaggacccgggagacacctcaaatatactctgggaggcggaaagcgtcggcaagttttcaagcccgtctagccctctgcctggaaacagactcagggctgttttggtggggcaccgtgggagagggggcaggtgtttcttgggaaaacaacaacaacaacaacattatttctcaggccccagcaatggaaaccacatgccaaaataagaaccatccgatcaggagtgtagtggcactgcttccaagtggagctgcaaccttaggagtgaagctgcagaccttcgcagtgagtgttgcagctcttaaggtgtcgcctctggagttgttcgttcctcccggtgggctcgtggtctcgctggcttcaagagtgaagctgcagaccttcgcagtgagtgttacagctcataaaagcagtgtggacccaaagagtggagctgcctgccagtcccgtgccatgcgctcgcactcctcagcccttgggtggtcgatgggactgggcgccgtggagcagggggcggcgctcgtcggggaggctcgggctgcacaggaacccacggaggactatgagagcaagctggaggctctgcagaagcagatggactccaggtactacccggaggtgaacgaggaggaggaggagcccgaggatgaaggtgaggggtcactgggccagcacctgctgcgtcaggagggtctcagcatggagatcgcagtggaggtgaccaagtccttcattgagtacatcaagagccagcccattgttttcgaggtctttggccactaccagcagcacccgttcccgcccctctgcaaggacgtgctcaggttagcgccctgggtcggggggttcggggctgctgtcctcaaagcccctgcccagatcttttcatccagctgttttgagctgcaggaacttatgcacccctga

SEQ ID NO: 142461 - DNA, 543 bp, Homo sapiens; identical to SEQ ID NO: 120295

SEQ ID NO: 142462 - DNA, 2358 bp, Homo sapiens
atgggctcctgtgctgcccgagcctccccgacgagcgccgccccctgctccacggcgcccagtcccatcgaccacccaagggctgaggagtgcaagcgcactgcacgggactggcaggcagcttcacctgcagccccggtgcgggatctactagagttccctctgaacaaggtccaggtatctccattcctcttgagtaaggtgcacagccacatcctcagatgtcacaaactgctgatacctggctgtcaggagcgcagctgcctgatctcctgggctgtcctcatggggaaaggcaggcacctggggaacaggtggaaccctagtgacactgagccccaggtgacgccgcaccaccaaagaaggtgcttgtgtttgtcagacaaatacagccaggcctgccaccccttaggctccaaagtccggaggtgcagaaagccaggaccaagagacaggcagctcaccagggtggacaaatcgccagagatgtggtgcattgtcctgttttcacttttggcatgggtttatgctgagcctaccatgtatggggagatcctgtcccctaactatcctcaggcatatcccagtgaggtagagaaatcttgggacatagaagttcctgaagggtatgggattcacctctacttcacccatctggacattgagctgtcagagaactgtgcgtatgactcagtgcagataatctcaggagacactgaagaagggaggctctgtggacagaggagcagtaacaatccccactctccaattgtggaagagttccaagtcccatacaacaaactccaggtgatctttaagtcagacttttccaatgaagagcgttttacggggtttgctgcatactatgttgccacagacataaatgaatgcacagattttgtagatgtcccttgtagccacttctgcaacaatttcattggtggttacttctgctcctgccccccggaatatttcctccatgatgacatgaagaattgcggagttaattgcagtggggatgtattcactgcactgattggggagattgcaagtcccaattatcccaaaccatatccagagaactcaaggtgtgaataccagatccggttggagaaagggttccaagtggtggtgaccttgcggagagaagattttgatgtggaagcagctgactcagcgggaaactgccttgacagtttagtttttgttgcaggagatcggcaatttggtccttactgtggtcatggattccctgggcctctaaatattgaaaccaagagtaatgctcttgatatcatcttccaaactgatctaacagggcaaaaaaagggctggaaacttcgctatcatggagatcctgtggactgtggcattcctgaatccattgagaatggtaaagttgaagacccagagagcactttgtttggttctgtcatccgctacacttgtgaggagccatattactacatggaaaatggaggaggtggggagtatcactgtgctggtaacgggagctgggtgaatgaggtgctgggcccggagctgccgaaatgtgttccagtctgtggagtccccagagaaccctttgaagaaaaacagaggataattggaggatccgatgcagatattaaaaacttcccctggcaagtcttctttgacaacccatgggctggtggagcgctcattaatgagtactgggtgctgacggctgctcatgttgtggagggaaacagggagccaacaatgtatgttgggtccacctcagtgcagacctcacggctggcaaaatccaagatgctcactcctgagcatgtgtttattcatccgggatggaagctgctggaagtcccagaaggacgaaccaattttgataatgacattgcactggtgcggctgaaagacccagtgaaaatgggacccaccgtctctcccatctgcctaccaggcacctcttccgactacaacctcatggatggggacctgggactgatctcaggctggggccgaacagagaagagagatcgtgctgttcgcctcaaggcggcaaggttacctgtagctcctttaagaaaatgcaaagaagtgaaagtggagaaacccacagcagatgcagaggcctatgttttcactcctaacatgatctgtgctggaggagagaagggcatggatagctgtaaaggggacagtggtggggcctttgctgtacaggatcccaatgacaagaccaaattctacgcagctggcctggtgtcctgggggccccagtgtgggacctatgggctctacacacgggtaaagaactatgttgactggataatgaagactatgcaggaaaatagcaccccccgtgaggactaa

SEQ ID NO: 142463 - DNA, 444 bp, Homo sapiens; identical to SEQ ID NO: 120298

SEQ ID NO: 142464 - DNA, 612 bp, Homo sapiens; identical to SEQ ID NO: 114323

SEQ ID NO: 142465 - DNA, 753 bp, Homo sapiens
atgggcttggtgggcccctgcactcggagcagccagccagccctgctggccccgggcaatgggggacttagcacctgggccagtggctgtggagggtgtactgagtcccccagcagtgccggcccaccggcgctgtgcccgatttctcgccgggccttagctgccttcccgtggggcagggcttgggacctgcagcccgccatgcctgagcctccccctcctccgtgggctcctgtgccgcccgagcctcctcgacgagcaccaccccctgctccacggcacccagtcccatcgaccacccaagggctgaggaatgcgagtgcacggcgcgggactggcaggcagctccacctgcagccccggtgtgggatccactgggtgaagccagctgggctcctgagtctggtgggaatgtggagagtctctatatctagctcagggattgtaaatacaccaatcagcaccctgtgtttagctcaaggtttcatgtacttctccctgggaccacattcctgtgtgaacaagtgcaagcaaacctttgcattagaccctgctttgggagtaatccaggctcagaaagaaaagccatctgatgatgactttaaatcactcaacccactctatcaccttcggcctggacaagcactgtgcctcatatctgatgggctttctctacatcgtggagctgctcatcgctcaatgtggctcccctggggcaactctcatacaatggaggatggcatcaatggatag

SEQ ID NO: 142466 - DNA, 903 bp, Homo sapiens; identical to SEQ ID NO: 133639

SEQ ID NO: 142467 - DNA, 3174 bp, Homo sapiens
atggagcgctatgaatggatcaaactccccgaggagatgggagaggctggtatccaaaccacaggtgaagaatttagttttaaagttgaaaaagagaaaaatccttcctgtgagaactcaggagcccagctggcttcacctagtggatcccgcaccagggctgcaggtggagctgcctgccagtcccgcgccgtgtgctcgcattcctcagcccttgggtggtcgatgggactgggcgccgtggagcagggggtggtgctcgttggggaggctcgggctgcacaggagcccatggagtggggccagcagggctggctggctgctccgagtgcagggcccaccaagcctacgcccaccggaaccccagctggcccacaagcgccgcacgcagccctggttcccgctcacgcctctccctccacacctccctgcaagctgaaggagtgggctccagccttggccagcccagaaaagggctcccacagtgcagccgcagccgccatggcgatgaactttggggaccatgccagcgggttccgccatgatgatgtgatcaggttcatcaacaatgaagtcctcaggaacggcggcagcccagccttttacacggccttccgctcgcggccgtggaacgaggtagaggaccggcttcgggccattgtggccgacccgcgggtgccccgtgccattaagagggcctgtacctggagcgctttggcgctgagtgtgcaagtggctgcgaggcagcaggaggagctgctgtaccaggtttggtggctgcaagggcatgtggaggagtgccaggcgacctcctgggctctaacttcccagctgcagcagctgcgcctggagcatgaggaggtggcaacacagctgcacctcacgcaggccgccctgcagcaggtgctgaatgagcgtgatgggttatgcgggaggctgctagaagttgagagatccatgcaggtctatccgatgcctcaggattttgtacccggtccagaagccggccagtatgggcctgtggccgggactttaaatgcagaacagagtgaggcggtggccacagaggcacagggaatgccacattcggaagcccaggtagcagccccaacagctgtgtattacatgcctgaaccccagagtggcagggtccagggcatgcaacctcttctgctaatgcaggcacctcatccagtcccattccatatgccttcaccaatgggactgccatactcaacacctctaccacccccagtagtaatggaatcagcagcagcaattgcaccacagatgcctcctgcagggatctatccacctggtctttgggccacagtgggatcccaggaggagacggcccctccgtgggaccagaagtgccatggccaggatggatatcctgagaatttccagggagtatatcacccaggagataacagaagctgcaaccaaaaggaaggttctgagtgtccccaaggaatgacttcccaaggggacagcagcagccacagcctgaagaaagatccagtgatgcaagagggcacagctcccccagagtttagcaggagccacagcctggagaaaaaaccagtgatgcccaaggagatggtccccctaggggacagcaacagccacagcctgaagaaagatccagttgtgcccaaggagattgtccccataggggacagcaacagccacagcctgacgaaaaatccagttgtgcacaaggagatggtctccctgggggacagcaacagccacagcatgaagaaagatccagtgatgccccagaagatggtccccctgggggacagcaacagccacagtctgaagaaagatccaatgatgtgccaggagatggtccccctgggggacagcaacagccatagcctgaagaaagatccagtggtggcccagggcacagctcccctgatgtatagcaggaggcacagccagaagaaagtgccaatgatgcccaaggagatggtccccctgggggaaagccacagccacagcctgaagaaagatctagttgtgcccaaggagttggtccccctgggggacagcaagagtcacaggatgaagaaagatccagtgatgccccagaagatggtccccctgggggacagcagaagccacagcctgaagaaagatccagtgatgccccagaacatgatccccctggaggacagcaacagccacagcctgaagaaagatccagtgatgccccagaacatgatccccctggaggacagcaacagccacagtctgaagaaagatccaatgatgcaccaggagatggtccccctgggggacagcaacagccatagcctgaagaaagatccagtggtgccccagggcacagctcccctgatgtttagcaggagacacagcctgaagaaagtgccagtgatgcccaaggagatggtccccctgggggacagccacagcctgaagaaagatccagtgatgccccagaacatggtccccctggaggacagcaacagccatagcctgaagaaagatccagtggtgccccagggcacagctcccctgacgtttagcaggagacacagcctgaagaaagtgccagtggtgccccaggggacagcctccctggggttcggcagaatccacagcctgaagaaagagttagtgatgcccgaggagatggtccccctgggggacagcaacagccacagcatgaagaaagatctagtgatgcccaaggagatggtccccctaggggacagcaacagtcacagcctgaagaaagatccagtggtgcaccaggaggtggtctccttgggggacagcaacagccacagcctgaagaaacatccagtgattccccagggcacagcctcactgaggtttagcaagagccacagccagaaggaagatcaggagaggccccaggcaacccctctggaggatagcaagagccatggtgtgaaaaatagcccatggaaacaccagcctcaggggcagaaggtcaaggaacaaaaaaggaaaaaggcctcagaatcccagcaacagaagcctgcctcatgctccagcccagtgaattgggcctgcccatggtgtaatgccatgaattttccacggaacaaggtgtgctctaaatgcaagagagtccgtatgccagttgagaatggcagcgttgacccagcgtaa

SEQ ID NO: 142468 - DNA, 843 bp, Homo sapiens; identical to SEQ ID NO: 128621

SEQ ID NO: 142469 - DNA, 363 bp, Homo sapiens; identical to SEQ ID NO: 120303

SEQ ID NO: 142470 - DNA, 579 bp, Homo sapiens; identical to SEQ ID NO: 137743

SEQ ID NO: 142471 - DNA, 2277 bp, Homo sapiens
tcatacctctaaagctgcgtgcacagatgaggtatctgcaaggtctgtgcagagcccttgtgtattggcattgagactgaagccttgaatagtatagtctatctttgctgaactaattgggatgaagaaatagattttggccgatgtaagcatttttagtttgaggagctgagtggaggcagctccaagaaatcttaggtgatttctcggtgtcttagctgccttcccgcggggcaggacttgggacctgcagcccgccatgcctgagcctcccaccccctccatgggctcctgtgccgcccgagcctccccgatgagcactgccccgtgctccacggcgcccagtcccatcgaccacccaagggctgaggagtgcaggcgcagggcgcgggactggcaggcagctccacctgcagccccagtgcgggatccactgggtgaagccaactgggctcctgagttctttgggtccacactgcctttacgagctgtaacactcaccgtgaaggtctgcagcttcactccgctagggtccgcggcttcattcttgaagtcagtgagaccaagaacccaccaattccggacacagaaatacaatcctccacaactacggtccactggaattggaactcttctgtcgaggttctcttctgcagttttcattagtatagcaagccggcttccagatacccttcctttttgaatagcactcatcagctgcaaaaattcattgagttcaacctgtccatttttattcaaatcaacttcatttagaatttcatggagtgtattttcatccatttggacattgatactctctaatacacgctgcacctcaacaacggtcataaagcctctctggtccgcatcaaacttatgacatctcctcttatacctgtcaatgtctgaaggcagtaggctaatttcagagcgatctgttaactgttctgatcgagatttatagcccatttcataatatagaaacttcctggctgtttcaagttgttcctgcttcttataatcatcccaattcagttccctgcccatcagttcaacaatcctgggtagggcttcctctgctgcctggacatttagaaaggccaggcgagtacgacgtgaaatcatatccacagcagtgcaggcatactccttaatcccatatttcacctctgcttcaatatatggaaattctgacacaagacgtactccaacaataggccaccttttgccagtcacacttgccattttggccacctcaaaggccttatcaccataggtggcggcaagatgctgtgccacctcgctttcaagtccataatcctgcacaagcctaatgtagagtgtggggctccaatctttacccccttgaaggaaaagcccaactgttctacttggtcctgcttttaaattatgagttttgacagcagcatttatggtatcttctgccatagaccgataagttgtccactttccacctgctatagtaataaggccactctcactgatatcaacaacatgatttcgggagatagactgagtatctgcagatttggggtctgtaacaagaggacggattccactccatgctgccaggacatcccctcttctcacttcaacatcacaactcaggtaattacgcacttcattcaaaatgaagttgatatcttcttctgaaggaattggatggtgtgtaacatcagttggagtatcagtagtgccagcgatcgtcatcttttgccagggtaagaagaaaataactcgcccatcactggtcgctgggtcaagaagtcccatgctctctgggctgtaataaccaggcatcacaatatggacaccagcacttggctggcagatagctgctgcgtctttatcatccattttgcgcacagagtccgtgaaaggtcccgtggcattgataacacatttggctctcacgtcaaattcctgccctgtgaggacatccttgcaccgtgcgccgctcacacgcactttccctgtctgggggtctgtcttcttgagcaagctcactacctccatgtaattggctgtggcagccccatacctggcagcagtcagagcaatggcaaggttcatccgtgcatcgttatgttgtcctggctttgccagtccgacgctctcaacagtcttcgatctagaggtagtgacccaaagaacctctaatccagaggtagatgcaatgatagcagtaccatcccatttcctggctcctgcagctgcccttctgtgtgctccccctcccataaggggtttgagcat

SEQ ID NO: 142472 - DNA, 2679 bp, Homo sapiens; identical to SEQ ID NO: 133644

SEQ ID NO: 142473 - DNA, 1528 bp, Homo sapiens
atgtgctcttgtgctcttcgcacagaagatttagagtcagatacttttttgtgttttgaaattgaactactaggtcatgctacggtgcaaagtatgctgatttgtaaattaacagggattttgccgatttcggaaccacccatcaaacaggattttcgcctgctggggcaaaccagcgtggaccgcttgctgcaactctctcagggccaggcggtgaagggcaatcagctgttgcccgtctcactggtgaaaagaaaaaccaccctggcgcccaatacgcaaaccgcctctccccgcgcgttggccgattcattaatgcagctggcacgacaggtttcccgactggaaagcgggcaacataaaggttctccatggccccaccagactcaggagcccagctggcttcacctagtggatcccgcactggggctgcaggtggagctgcctgccagtcctgcgccgtgcgctcgcattcctcagcccttgggtggtcgatgggactgggcgctgtggagcagggggtggtgctcgtcggggaggctcgggccacacaggagcccatggagtgggtgggaggctcaggcatggcgggctgcaggtcccgaaccctgcccttagactcagagccacagtggatgcctgaggccagcaggcccctctgctccacaggtggaaaagcctgaggttcgccgacctccagagcccgcagctgcaccacggagaggtgagtgctgctcttccctggctgcggcatatagggcgaaggctggttgacctctggccttctggggcaggtcacacagaaggaaggctccttctcagagccttcactgtggcatctgtcaaatggtcttgtattctttaccttgttcagtgcaaggatgaatgataggatgcctgtcaagggcttttggcagtgcctagtgatgcattcagcattgccaccactgttgctgttaccgttgccgtgcttcagcagctggagcagcctctttgcaaggcagtacccatgtgagaattcagcacatgcactccatgaccctgtgcttctgacgcccagtgtgcgactcagagacgtctgtaccaggtccatatggcccctggtggtcaccgggctgccatcagcaatgaatgtgagttcctggtgctccacatcctcgccagcatttggtgtgttagtgctttggatatgagccactccagtaggtgcgtggcagtatctcatggttggtttaacttgcagctccctaatgatatacctatgtggagcatctttcaggtgcttatttgccatctgtgtatcttcttgaatgaggtgtctgtttagatcttctgcccactttttaattgggttgttttcctgggagcagcctggacacgtgatcccagggaaagtgtggggtgcccctcggaggactccgtagcaggcaccagcaacagacaagatgtgcgccaacaggaaggaacacttaacactgctgaccgtcagggtcaggtggtttagaggacatcgttctgcaagccccat

SEQ ID NO: 142474 - DNA, 3342 bp, Homo sapiens; identical to SEQ ID NO: 117636

SEQ ID NO: 142475 - DNA, 385 bp, Homo sapiens
ggcacgagcctacagagcactttggggggtgtagttgcaggcatggtggtcacatgccctcaccaggactccccaagcccagggaacctcttgggcaaaggctccaaggcatgaaacagcctctcattgagggaactgcagaaagccccatgtgtcctcactgaggtcagcagcattctgctctcccagctcctcttcatgcctgcactcgagcagcactgacccgcccagccacttctgtgccggaaagaccgggtaacgaagacgacaacatccctgctctcttggggtgtgtcagcgggtgatggaatagtgaggagctatgaggaagacaaaacagggaccagggcacagagagggattgcattccgccttcttgagcgcc

SEQ ID NO: 142476 - DNA, 901 bp, Homo sapiens
tcaggatgttcgcaggctccattgacaaaagtgacttcccacgctttgcccacagagggcatccctgcgcattgatacgcagaccaggcaaatgcagctcctggaagcctcctcggtccgctcttttttccctaagccatagtctgtctgcccccacccccttcccgtggaatctttgcctgatccagttcgtttccctccggtctccacattttcccttccagccctccacttctccggatcaatgtgtagtacggttccaactcccagctcgcacaccgcggggctcgggatctcttggaccgaatggaactttttgctgcctgcttttgctgctgattctgtcagtggacaaggaaaaaggcttcgaaggcagcagaggcgcaggggaggtggagaaagaggtggaggaagaggacgaggaggaggaggaagccgaaggggctcggcgcgtgtgtgtgcatgtgtgcatgcgtgtgtgagtgcatgtgtgtgagtgctgccgctgcccgcgacccctggccccgaaggtgttggctccccaccagactcaggagcccagctagcttcacccagtggatcccgcaccagggctgcaggtggagctgcctgccagtcccgtgccgtgcgctcgcactcctcagcccttgggtggtcgatgggactgggcgccgtggagcagggggtggtgctccttggggaggctcgggccgcacaggagcccatggagtgggtgggaggctcaggcatggcgggctacaggtcccgagccctgccccgcgggaaggcagctaaggcacgctactcatttggtagtttttgttcaccacattgtgaagaagggaatggaaaaattacagaatatcagaatatgtcaaacaagttctcaggttctgagcca

SEQ ID NO: 142477 - DNA, 3098 bp, Homo sapiens
ttaggaggatggaacaaacgagtaaggttcgtgctgttcagacaattgtaatcctggcagcaaacctgttgggcgactccaggcccacgcaatcgccaacccactctcattcagggcgttctgcccctctgcccctttccacggtccgtttacccccattcttgaacgattccatcggaattccccaaccctgttccaagtgtgaccccaagatatgaggccgcccttcctgaagccaccgcaggctcctccagcaggcagccccgggagcagggagctgggcggccgggggccccgcgcgccacgggaggcagaggtcgctccccgatcgcggaaaccgggactcacgtgtggatctgcttgtgcctgcgcctccatggtggctgacttcgagctgagggcggcggggacaccctggtgcttcccagagcagatggcagctgcgcccaggctcagaacgcagctggccccgccgctcgctcccactcctggcacgcgtgtcgcgagcgctgcgcggagggggttggggacgcaggcagccgccactagccgcttctggttacctccgccccttccagtccacctggcccaaaccaagctggaacaagctcgccgctgggcgccacctgccggcgctctgtacagccggcggaaggcacccactcccggcgcatctgagacatctgctccccgtttatcttctgccataaataaaagctccctggggccctcatcagaagccatgcagatgccagtgccatgctttgtatagacgagggcctggtgcttctgtctcacagctcttaagattctttcctccatcttaactttggataacctgattgtgtctggaattggtgggttctcggtctcactgacttcaagaatgaagccacggaccctcgcgatgagtgttacagttcttaaaggtggcgtgtccggagtttgttctttctgatgttcagatgtgttcggagtttcttccttctgactcagaagcccagctggcttcacccagtggatcccgcaccggggctgcaggtggagctgcctgccagtcccgcgccgtgcgctcgcactcctcagcccttgggtggtcgatgggactgggcgccctggagcagggggcggcgctcatcggggaggctcgggctgcacaggaacctacggaggccgggggctcaggcatggcgggctgcaggtcctgggccctgccccgcgggaaggcagctaaggcccggcgagaaatcgagcgcagcgccggtgggctggcactgctgggggaccgagtacaccttcccgagcagccgctggcccgggtgctaagcccctcattgcccggggctggcagggccggccggctgctccgagtgcggggcctgccaagcctacgcccacctggaactctagctggcccgcaagtgccgcgcgcagccccggttcgtactcgcgcctctccctccatacctccctgcaagctgagggagccggctctggccttggccagcctagaaaggggctcctacacctataagatgtcccagctgagcctgtcctggctgggcctctggccagtggcagcatccccttggctgctcctcctgctggtcggggcctcctggctcctggcccatgtcctggcctggacctacgccttctatgacaactgccgccgccttcggtgtttcccacaacccccaagacggaactggttttggggacaccagggcatggtcaaccccacagaggagggcatgagagttctgactcagctggtggccacctacccccagggctttaaggtctggatgggacccatctcccccctcctcagtttgtgccaccccgacatcatccggtctgtcatcaacgcctcagctgccattgcaccaaaggacaagttcttctacagcttcctggagccctggctgggggatgggctcctgctgagtgctggtgacaagtggagccgccaccgtcggatgctgacgcctgccttccatttcaacatcctgaagccctatatgaagattttcaatgagagtgtgaacatcatgcacgccaagtggcagctcctggcctcagagggtagtgcctgtttggatatgtttgagcacatcagcctcatgaccttggacagtctacagaaatgtgtcttcagctttgacagccattgtcaggagaaacccagtgaatatattgccgccatcttggagctcagtgcccttgtatcaaaaagacaccatgagatcctcctgcatattgacttcctgtattatctcacccctgatgggcagcgtttccgcagggcctgccgcctggtgcacgacttcacagatgccgtcatccaggagcggcgccgcactctccctagccagggtgttgatgacttcctccaagccaaggccaaatccaagactttggacttcattgatgtactcctgctgagcaaggatgaagacgggaagaagttatctgatgaggacataagagcagaagctgacacctttatgtttgagggccatgacaccacggccagtggtctctcctgggtcctgtaccaccttgcaaagcacccagaataccaggagcgctgccggcaggaggtgcaagaacttctgaaggaccgtgagcctaaagagattgaatgggacgacctggcccatttgcccttcctgaccatgtgcatgaaggagagcctgcggctgcatcccccagtcccggtcatctcccgccatgtcacccaggacattgtgctcccagacggccgggtcatccccaaaggcattatctgcctcatcagtgttttcggaacccatcacaacccagctgtgtggccggaccctgaggtctacgacccctttcgctttgacccagagaacatcaaggagaggtcacctctggcttttattcccttctcggcagggcccaggaactgcatcgggcagacgttcgcgatggcggagatgaaggtggtcctggcgctcacgctgctgcgcttccgcgtcctgcctgaccacaccgagccccgcaggaagccggagctggtcctgcgcgcagagggcggactttggctgcgggtggagcccctgagctga

SEQ ID NO: 142478 - DNA, 2263 bp, Homo sapiens
ctggacctgcgtggaggaattcgcgggagcgtctcgacctctgcggcgtcaatgggagcccgacgtttaactgcgcttaaggcttgtctttcccctgcccgaccgattgagccgaccttgcctgcgctacagcttccttattttcgtcgcctgttctcctgatcctgcgtgttctaaaaaccccttaggctttccatgggttcccagaccatggcggtggcgctgcccagggacttgcggcaggacgccaacctggcaaagaggaggcacgcggagctgtgcaggcagaagcgggtcttcaacgccagaaacaggataattgggggagacactgaagcctgggatgttcaagttcatgaccagaagataaaagaagctactgaaaaagctagacatgaaacctttgctgctgaaatgaggcaaaatgacaaaatcatgtgcatattggaaaaccggaaaaagagggataggaaaaatctctgtagggctatcaatgacttccaacagagctttcagaagccagaaactcgccgtgaatttgatctgtccgaccccctagcccttaagaaagatcttccagcccggcagtcagataatgatgttcggaatacgatatcaggaatgcagaaattcatgggagaggatttaaacttccatgagaggaagaaattccaagaggaacaaaacagagaatggtctttgcagcagcaaagggaatggaagaacgcccgtgctgaacaaaaatgcgcaggtaatgaaacagaagagacgagctggtctcaacgctctcttcaacaaaccaaccctacagttttttttaacgaagacgacaacatccctgctctcttggggtgtgtcagcgggtgatggaatagtgaggagctatgaggaagacaaaacagggaccaggcacagagatatgccctccctgctccactggaactgccctggccaacctcaccagtgacctccatgtcgcccaatccaaggtcggtttttgaccttcatctggacctaacagtcgatcacctcctgctcctggaaatgcgcatgcaagatagagcaggacagcaaggggcacaccaccagcctgtcccaggacgcaaaggcacgaacggccacacgtgggaaggtgctcctgtggccaggtcgatctgattgcttcttgcctcctttcagaggccctctacacagagacacaccaccagaaaggcagtttgtgcatctgtgaaagacttcaacaagagccaggtataggtactccgcgacctcgggctcgacgactggaggggaggatgagcccactacggcttcccaatcaccaacctcctgcgtggggacctgctctccgagaacccgcagcaggcagccagctccttcgggccccaccgcgtggtccctgaccgctggaagggcatgacccaggagcagctggagcagatccgcctagtccagaagcagcaaatccaggagaagctggtgactgccccgcccctttttccagagcccatagagccaggctctttgctcccactgccttccaggcccaccctgctgtttgagcggcagcagtggcggcggcagcgcgacctgcgcagagctctggacagcagcaacctcagcctggccaaggagcagcatttgcagtgagtgctgggtgggaccagggccaggtgggggaccgggtggagggaccgcggggctgtggaggtcggaagagcactgagtctgctgggggagtcaggaaggcttcctggaggaggcttcattggtgagacccaggaggaggatggcactgcctattcagggacggctttccaggtagagagaggggctcctgggctgccccagaaaagcctggagtctcttggttatagacaggactccaagagttcagagctccagctacaagaagatgtcaaatgcaagcaaacaggtgaacttgcacctgaaaaacacagtatttatttacttatttatctagctcttggcttaaactcaggagtcgatcaagtaatgctgccacccccaggctggtgtgggaccacgggtgggacccaggggactgcctcaggacctgtaactagagtgtggattgtgatggcctccccgacgagcgccgccccgtgctccacggcgcccagtcccatcgaccgcccaagggctgaggagtgcgagcgcacggcgcgggactagcaggcagctccacctgcagccccggtgcggaatccactggatgaagccagctgggctcctgagtctg

SEQ ID NO: 142479 - DNA, 731 bp, Homo sapiens
gccttcagtgagaaaagtaactgcagatatggtggaaatactaagataactacaataatggagcctgaagctataactaagtttcagaaatcttgtgaaatacactcaggagcccagctggcttcacctagtggatcccgcaccggggctgcaggtggagctgcctgccagttccgtgccgtgcgcccagcactcctcagcccttgggtggtggatgagactgggcgccgtggagcagggggcggcgctcgttcggggaggctcgggccgcacaggagcccaccgagggggtgggaggctcaggcacggcgggctgcaggtcccgagccctgccccacgggaaggcggctaaggccccggcgagaaatcgagtgcagcgccggtgggccagcactgctgggggactcagtacaccctctgcagccattggcccgggtgctaagtctcccattttgcccagagccagcagggctggctggctgctccgagtgcggggcccaccaagtccatgcccacccggaactccagctggcccgcaagcaccgcacgcagccccggttcccactcgcgcctctccctccacacctccctgcaagctgagggagtgggctctggccttggccagcccagaaaggggctcccacagtgcagtgggggctgaggggctcctcaaatgccgccaaagtgggatcccaggcaggggaggtgccgagagcaagcgagggctctga

SEQ ID NO: 142480 - DNA, 405 bp, Homo sapiens; identical to SEQ ID NO: 116870

SEQ ID NO: 142481 - DNA, 438 bp, Homo sapiens
tttcgaattcccgggtcgagatcccgctcctgcaccagcagatgctgcagtcggagatccaggccattatgaagctgtttcacaaacacatcctggcgctgtacgccgtggtgtccgtgggggaccccgtgtacatcatcacggagctcatggccaagggcagcctgctggagctgctccgcgactctgatgagaaagtcctgcccgtttcggagctgctggacatcgcctggcaggtggctgagggcatgtgttacctggagtcgcagaattacatccaccgggacctggccgccaggaacatcctcgtcggtgaaaacaccctctgcaaagctggggacttcgggttagccaggcttatcaagtggacggcccctgaagcgctctcccgaggccattactccaccagatccgacgtctggtcctttgtgattctcg

SEQ ID NO: 142482 - DNA, 403 bp, Homo sapiens
cggacgcgtgggttcaaccagtgggaggatctgtgagagaccagggaagaggggcgtgtccgagccaggaactggactcacctgggcaacttcccgcacgagaccagggaagaggggcgtgtccgagccgggaactggactcacctgggcgacttcccgtgcgagaccagggaagaggggcgtgtccgagccgggaactggactcacctgggcgacttcccgtgcgagaccagggaagaggggcgtgtccgagccgggaactggactcacctgggcaccttcccgagagagaccagggaagaggggcgtgtccgagccgggaactggactcacctgggcaccttcctgtgtgagaccagggaagaggggcgtgtccaagccgggaaattgactcacctgggca

SEQ ID NO: 142483 - DNA, 1335 bp, Homo sapiens
atggttcctttcaaactattactgctcattgacaatgcatgtggtcacccaagagctctgccgaagatgtacaaggagataaatactgttttcatgcctgctaacacaacatccattctgcagcccatggatcaagaactaattttgactttcaagccttacttaagaaatacatttaataaggctatagctgccatagacagcaattcctctgatggatgtgggcaaaaacatacttcttactttttaaagaaagtctgtgaaaagcaaaaaagggacctttttaccagagctgactgtaatgtcagctacttgcggaatgtgacaactgcttgtcattctcaatgtccgatcaccagaaggtttctccccaatcatggattcatgcttcgaaccgtggccaacagttccagaggactgcgtggacccgtgagctcaggagcctcagacgcctacctggagagccaagctggtgttcgaggtggcgccttcagggtccaccctgctgtccaacagccccgtggccaccagagggccgtgcctggcccggatgtgtgccctggaaaatccagagaagacataaagagagtctctgagttaaatgaagatttaggcagtgcagcatggtcccccatccgtggcagctgtagcagcagcatcactttggaacttgtcagaagggcagattctcaggcccatccagacctcctgaatcaggaactctttgtaggcccagcctcctgtgttgtcataagccctccaagtgattctcattgcactcaaggtgacctggggtctcaggtcccaaataaactgtccccaaggtccacaggaaacaggaaagatgcccctgcagcattgtctgtggtgttggtggggcagtggtttagagatcatccacatgcccaccacgggacggatgaaaaacacgatcatgccggcttctgggagcagaggcctggagtgcttcctgagtccagccacctggtgggcacccccagagactcagccctgactccaggcggccagccggcagcacaggtacagccggatgcccgacacacagacatgcaggcacaaatgaacagacgcacgagcacatacatcctgaccgtttccaggggctccaggacaccccgccaagttctcccctgcaccccacacagccacccacaggtatgcacagctcacccaggtcacacacacgcaccagggtatggatgtaaccctgtgcctgcagccccactccgggacacactaagtcacccacaaggacagtcattcccacagtcacagcacatgggaaatccccggggtcccattgtggaggcctga

SEQ ID NO: 142484 - DNA, 2152 bp, Homo sapiens
gaggggtgtcatcttcgagtgcgtctctgactacatccagcctgtttgcacgttcgcctggcaccatgggttctacccagagaaaggccctctgctgaatcgctggcgccgtcctcgcaggcaagtaacctcaaggcctccccagtgtcccacgtcactgggctgcactaagcgaccagagaacatgaagattgtactgccagaactggctgctcctgccgatcaaggccagctcatctgtccccaaagtcctctggtgtcacaggtggcctcccacacgccccctcctatgccttcaggcaaatggagaagctgtggcaatcgtccccgttctgtggcagatatatcgacaaggtcatctagcgccacaccaggtggatggttcagaaaggctgggttctccaagctgcacaccagaggctgcacagagctgaagtccggcgagtcccaaggctcccagggcggcccgctgccccacaccctccggcaaacacgaaggcgccaccctcggcacccagcagcatctgcctcagcccctgcagagggcggcgctggtgtgggctgcagagagtatggcccgcaggcagccgccatgggcctgcccgagctgagtggctttcagcagaccaggcggccactcaggcctgcgtggactggatgtgtccccagaatccacatgctgaaaccctcactccagtgtgatggtgaaggtgcccaggtgagtccagttcccggctcggacacgcccctcttccctggtctctctcgggaaggtgcccaggtgagtccagttcccggctcggacacgcccctcttccctggtctcgcacgggaagtcgcccaggtgagtccagttcccggctcggacacgcccctcttccctggtctcgcacgggaagtcgcccaggtgagtccagttcccggctcggacacgcccctcttccctggtctcgtgcgggaagttgcccagccgggagttagtgcgcgcgagtggctgtgtgtgcgtgcgtgtgagcgtgtgggcaagtggttctttggctgcatctcccgctcggaagctgtgcgtcggctgcaggccgagggcaacgccacgggcgccttcctgatcagggtcagcgagaagccgagtgccgactacgtcctgtcggtgcgggacacgcaggctgtgcggcactacaagatctggcggcgtgccgggggccggctgcacctgaacgaggcggtgtccttcctcagcctgcccgagcttgtgaactaccacagggcccagagcctgtcccacggcctgcggctggccgcgccctgccggaagcacgagcctgagcccctgccccattgggatgactgggagaggccgagggaggagttcacgctctgcaggaagctggggtccggctactttggggaggtcttcgaggggctctggaaagaccgggtccaggtggccattaaggtgatttctcgagacaacctcctgcaccagcagatgctgcagtcggagatccaggccatgaagaagctgcggcacaaacacatcctggcgctgtacgccgtggtgtccgtgggggaccccgtgtacatcatcacggagctcatggccaagggcagcctgctggagctgctccgcgactctgatgagaaagtcctgcccgtttcggagctgctggacatcgcctggcaggtggctgagggcatgtgttacctggagtcgcagaattacatccaccgggacctggccgccaggaacatcctcgtcggggaaaacaccctctgcaaagttggggacttcgggttagccaggcttatcaaggaggacgtctacctctcccatgaccacaatatcccctacaagtggacggcccctgaagcgctctcccgaggccattactccaccaaatccgacgtctggtcctttgggattctcctgcatgagatgttcagcaggggtcaggtgccctacccaggcatgtccaaccatgaggccttcctgagggtggacgccggctaccgcatgccctgccctctggagtgcccgcccagcgtgcacaagctgatgctgacatgctggtgcagggaccccgagcagagaccctgcttcaaggccctgcgggagaggctctccagcttcaccagctacgagaacccgacctga

SEQ ID NO: 142485 - DNA, 3026 bp, Homo sapiens
atgagcagaattcagacgtacgtggtgcccagctccagcggaggagacagtcagtcttcgcccaggcggccagggcagcagcggattccacgcgggcgctgtcccttcagcacctccagcaccatcctctccccggaacctgcaagcccagccccttctctggtctcctccaggcaagtaacctcaaggcctccccagtgtcccacgtcactgggctgcactaagcgaccagagaacatgaagattgtactgccagaactggctgctcctgccgatcaaggccagctcatctgtccccaaagtcctctggtgggctccctccccagcagaaagcaaaccacaggggctgtgaccgcctactgcccgggctcccccgggcttcccgaactgtcctccctggagcctggcgcagagaggggcccagagtcaatggttgttggaggacaaactgaagcacatctgggtcactgccagggagaacccacagggacaaggtcatctagcgccacaccaggtggatggttcagaaaggctgggttctccaagctgcacaccagaggctgcacagagctgaagtccggcgagtcccaaggctcccagggcggcccgctgccccacaccctccggcaaacacgaaggcgccaccctcggcacccagcagcatctgcctcagcccctgcagagggcggcgctggtgtgggctgcagagagtatggcccgcaggcagccgccatgggcctgcccgagctgagtggctttcagcagaccaggcggccactcaggcctgcgtggactggatgtgtccccagaatccacatgctgaaaccctcactccagtgtgatggtgaaggtgcccaggtgagtccagttcccggctcggacacgcccctcttccctggtctctctcgggaaggtgcccaggtgagtccagttcccggctcggacacgcccctcttccctggtctcgcacgggaagtcgcccaggtgagtccagttcccggctcggacacgcccctcttccctggtctcgcacgggaagtcgcccaggtgagtccagttcccggctcggacacgcccctcttccctggtctcgtgcgggaagttgcccagagactcagccctgactccaggcggccagccggcagcacaggtacagccggatgcccgacacacagacatgcaggcacaaatgaacagacgcacgagcacatacatcctgaccgtttccaggggctccaggacaccccgccaagttctcccctgcaccccacacagccacccacagatcccaccagccagcaagctaaagcatggcggccatcccctccagcggctcgctcgtggccacccacgactactaccggcgtgagtagcccctgccccccatccacgcggatgctctgctggcgccagtgccggccccgtgcaggctgcggaaccagcgctcggcctgaaggccggccgcctgggttccacttccagcaacagctcctgcagcagtaccgagtgccccggggaagccattccccaccccccaggagctggcagcatcaagaccccacttcgcttctctcaggtctccccaaggctgacccgggtcattggtgggccagcttctttttcgggaagtccaccctcccgttcatggccacggtgttggagtccgaaaagcactcggaacctccccaggcctccaacagcatgaccgcctgtggcctgggctcgggacgccccgaggaagcagcccggcgccatccatggtggccaggctgctggcaccaaagggaggcgaacctcaggcggcaatgctggctcacctcttcctaacaagccatggacctgagactggggaccactgccatatggtaaaggccctggccaaaatgcaaacctccatcaggtggttctttggctgcatctcccgctcggaagctgtgcgtcggctgcaggccgagggcaacgccacgggcgccttcctgatcagggtcagcgagaagccgagtgccgactacgtcctgtcggtgcgggacacgcaggctgtgcggcactacaagatctggcggcgtgccgggggccggctgcacctgaacgaggcggtgtccttcctcagcctgcccgagcttgtgaactaccacagggcccagagcctgtcccacggcctgcggctggccgcgccctgccggaagcacgagcctgagcccctgccccattgggatgactgggagaggccgagggaggagttcacgctctgcaggaagctggggtccggctactttggggaggtcttcgaggggctctggaaagaccgggtccaggtggccattaaggtgatttctcgagacaacctcctgcaccagcagatgctgcagtcggagatccaggccatgaagaagctgcggcacaaacacatcctggcgctgtacgccgtggtgtccgtgggggaccccgtgtacatcatcacggagctcatggccaagggcagcctgctggagctgctccgcgactctgatgagaaagtcctgcccgtttcggagctgctggacatcgcctggcaggtggctgagggcatgtgttacctggagtcgcagaattacatccaccgggacctggccgccaggaacatcctcgtcggggaaaacaccctctgcaaagttggggacttcgggttagccaggcttatcaaggaggacgtctacctctcccatgaccacaatatcccctacaagtggacggcccctgaagcgctctcccgaggccattactccaccaaatccgacgtctggtcctttgggattctcctgcatgagatgttcagcaggggtcaggtgccctacccaggcatgtccaaccatgaggccttcctgagggtggacgccggctaccgcatgccctgccctctggagtgcccgcccagcgtgcacaagctgatgctgacatgctggtgcagggaccccgagcagagaccctgcttcaaggccctgcgggagaggctctccagcttcaccagctacgagaacccgacctga

SEQ ID NO: 142486 - DNA, 7487 bp, Homo sapiens
ccatgggcgcttccaggccgcactcacggtccttgcctgccccctggcgtccgtgtggaggaaggcagtgcccgtttcttcagccgtgggtgcccctggctctgcctccccggggatcccccaaaaccctcgggccctcctcttccgggaagtcctccgggccgacccacacagctgtcgctgccctgattccactccctcttccctgcttggcccttacccgagggcgggcctgcccatgaggccgctctcaggacgcctgcccacagcagctcctgacattgggccctgtgctcaggggtggagtctggggctgggtgagggcaccgacgggtggaggggaagctgccggaagcggggagagaggcggcccccacctgtgcccccgcagctctgagggttgggaaggcagcgcctgcagccctcaccttcctgccctcaggctgcgaggcttgttcccagagggccgttggcttccctgagtgcctgagtgtccataagttggacccccaagaagccccaaccgggaggtcctcctccccctctcctgcgctcaggccggccctggcggtgcttgcccagtgggttcccatagtgcgggcgctaagtgctcagatgggccccagtgggcctgaggacttgtggggccggctgggccctcaggaggagccggggtgctctggagcgcctgtgggtgctgggtgtggctgcttcccggcctgtcatgaggaagtgggacggcccgcctgccacgcccagctctgggtgctccagctgggccacagcctggtcctgccgctgcgcccgcccgccatggtgtcccgggaccaggctcacctgggccccaagtatgtgggcctctgggacttcaagtcccggacggacgaggagctgagcttccgcgcgggggacgtcttccacgtggccaggaaggaggagcagtggtggtgggccacgctgctggacgaggcgggtggggccgtggcccagggctatgtgccccacaactacctggccgagagggagacggtggagtcggaaccgtggttctttggctgcatctcccgctcggaagctgtgcgtcggctgcaggccgagggcaacgccacgggcgccttcctgatcagggtcagcgagaagccgagtgccgactacgtcctgtcggtgcgggacacgcaggctgtgcggcactacaagatctggcggcgtgccgggggccggctgcacctgaacgaggcggtgtccttcctcagcctgcccgagcttgtgaactaccacagggcccagagcctgtcccacggcctgcggctggccgcgccctgccggaagcacgagcctgagcccctgccccattgggatgactgggagaggccgagggaggagttcacgctctgcaggaagctggggtccggctactttggggaggtcttcgaggggctctggaaagaccgggtccaggtggccattaaggtgatttctcgagacaacctcctgcaccagcagatgctgcagtcggagatccaggccatgaagaagctgcggcacaaacacatcctggcgctgtacgccgtggtgtccgtgggggaccccgtgtacatcatcacggagctcatggccaagggcagcctgctggagctgctccgcgactctgatgagaaagtcctgcccgtttcggagctgctggacatcgcctggcaggtggctgagggcatgtgttacctggagtcgcagaattacatccaccgggacctggccgccaggaacatcctcgtcggggaaaacaccctctgcaaagttggggacttcgggttagccaggcttatcaaggaggacgtctacctctcccatgaccacaatatcccctacaagtggacggcccctgaagcgctctcccgaggccattactccaccaaatccgacgtctggtcctttgggattctcctgcatgagatgttcagcaggggtcaggtgccctacccaggcatgtccaaccatgaggccttcctgagggtggacgccggctaccgcatgccctgccctctggagtgcccgcccagcgtgcacaagctgatgctgacatgctggtgcagggaccccgagcagagaccctgcttcaaggccctgcgggagaggctctccagcttcaccagctacgagaacccgacctgagctgctgtggagcgggcatggccgggccctgctgaggaggggcctgggcagagggcctggacctgggatcaaggcccacgcgcttccctggggtttactgaggtgatgggtgcaggaaaggttcacaaatgtggagtgtctgcgtccaatacacgcgtgtgctcctctccttactccatcgtgtgtgccttgggtctcagctgctgacacgcagcctgctctggagcctgcagatgagatccgggagactgacacgaagccagcagaggtcagaggggactctgaccacagcccgctctctggctgtctgtctgcagtgcccggctgagggtgggaggcaaacacgccttgttcctgctcttcccagttcagcttggtgggagaaagtcattcgcgtggctcgggacgctcatgtaaatttggttttggtgctcaagggttctttcctcccaggggcaggtgtttctttcctgtttgtcttgtgtcttgagagcttggccttatgaccagtgagaactctctccctggtctctgccagcccaagcatcactgcccgaggcgccagctcagtttcaccgtccacgtccacaaggggcttttcccaccttcacctttgtcgctgggtcagtgctggaaagcgcccctcactcctgcgctgacaagggcccttctctactgtctgtggggtggttccgggctgggggggctgcctcctttgcacctgattttgaaggtgtctctttcatccatggttaagtcataaaaagcttattggttttggttttgactcacctgaaagtttttttggtttaaaagaagaataggcggggcacggtggctcatgcctgtaatcccagcactttgggaggccaaggcaggaagatcacttgaggtcaagagttcaagaccagcctggccaacatggcaaaacccagtctctactaaaaaatacaaaaaattagctgggtgtggtggtgggggtgggcgcctgtggtcccagctacgtgggaggctggggcacaagaatctcttgaacctgaggggcgcaggcttgtagtgagccgagatcatgccactgcactccagcctgggctacagagtgagactctgtctaaaaaaagaacaaaacaaacaaaaaagaccaggcgcggtggctcacgcctgtaatcccagcactttgggaggccaaggtgggcagatcacgaggtcaagagatcaagaccatcctggctaacatggtgaaatcccgtctctactaaaaatataaaaattagctgggcgtggtggcacaaacctgtagtcccagctactcaggaggctgaggcaggagaatcgtttgaacctgggaagcggaggttgcagtgagccgagattgcaccactgcactccagcctgggcgacagagcaagactccgtctcaaaaaaaaaaaataataataataatagctaaatactggaaacaaccaatattccatcaacaggagaatgaataaacaaattgtggtatagctatacaatccaatactatgcagcaataaaaattgaatcaatcactgatacacataacatgcaaggatgaagctcaaaaacattacactgaacaaaagaggccagacacaacagtatgtctgagtccatttacatgaaattctaggaaaggtagaatatcctacagtgtagagaacacaataataagaaaacaaacaacctgatttaaaaataggcaaaccaagagtagtagtgtgtgcctgtagtcccaactacttgggaggctgaggcgggaggatcccctaagcccaggagctcaagacctgcctgggcaacatagcaagactctgtctcaaaaaaaaaaaaaaataaatgggcaaaagatataaacagaaaactaaccaaagaggtatacagatggcaaataagcacatgaaaatcatttgttgcctgtggctggggtagggataggtactgaaggtaaatgggtacaaggggactttttagttgacgaaaattcactatattttgcttacagtggaagttaaacaggtttatacattagtcaaaattcatagaactggactttaagttgtgtgcatttgtttgtgtatgcattctaactcaatatacttaactataaaaaaagaatgaaaacaaaatttactcaagaaagaaagtaacaggccaagataacttccctagtgaattctaataaatatttaaggacgacataagttttaaaaaaaatcaatcttactcaaactaaagcataaaaaagaggaaatacttcacagttcattttataaagtcaacataactttgaggcctaaacctgacaaggacattacaaaaaagtaaaattacaggccgatctgtctcatgaacatagatgcaaaattcctaaacaaaatattagcaaactgaattcagcacgaaatagaatgaataaaacatcacaaccaaaccgaaattatttcaggaatgtaagattattttttcattcaaaaattaagcaacataatttagcacattaacaaaagaatggagaaaaatcaagtgatcatcaaaatcaatgcaggaaagcatttgacaaaattcaacaccaatttaggattttaaaaatttaggcaattttggccaggcgcagtggctcatacctgtaatcccagcactctgggggaggctgaggcgggcagatcacatgaggccaggagtttgagaccagcctggccaatgtggcaaaaccctgtctctactaaaaatacaaaaattagccatgcttggtggtgcacgtctataatcccagttacttgggaggctgaggcataagaatcgcttgaacctgggaggtgcaggtaggagtgagctgagatcctgccactaaatctcagaaagctattttgtaaatactgacaaggtgattccaaaatttacagtcatgtgctacataacaatgtttgggtcaagagaccactcacatatgaagatggtcccataagattataatgaagctgaaaaatcctgcaacctagggatgtcatagctgacagaaggtcaagtgcaaagcattactcacatgtttgtggaggtgctggtataaataaacctactgtgctgccagctgtataaaagtctagcatatacaattatgtacagtacatacttgataataaacaactacgttactggcttatttattttattgtactacattttatattgttattttagagtactcctacttacatataaaaaaaaagttaactgttaaatagcctcaggcaggtctttcaggaggtattccagaagaaggcatgttaggagataacagctccatgtccgttactgccccgaagaccttccagtgggacatgatgtggaggcggaagggattgatactgataatcctggctctgtgtaggcctagtaagtaatgtgtttgcttctgtctcaatttttaacaaaagtttaaaaacttaaaaatattttttaacagaaaaaagcgtataggccaggcgcggtggctcacacctgtaatcctagcacttttgaaggccgaggcgggtggatcacttgagatcaggagttcaagttagagatggtgaaaccccatctccactaaaatacaaaaaattagccgggcgtggtggtgcatgcctgcaatcccagctactcgagaggctgaggcaggcgaattgcttgaacccaggaggtagaggttgcagcgagccaagatagcgccattgcactccagcctgggcaatagagtgagactccgtctcaaaaaaaaaaaaaaaaaaaaaaaaagaaaagggccgggtgcagtggctcacgcctgtaatccctcgggcagatcatgaagtcgggaaatcgagatcacggtgaaaccccatctctactaaaaatacaaaaaaaattcggtgacgggcacctgtagtcccagctactcgggatgctgaggcaggagaacggcgtgaacccggaaggcggagcttgcagtgagccgagatcgcgccactgcactccagcctgggcaacagagcgagactccgtctcaaaaaaaaaaaagaaaaaagaaaagaaaagagcttatagaataaggatacaaagtaaaaagccagatgtggcagctcacacctgcaatcctagcacttggggagattgaggcaggaggactgtttgagcccaggcgtgtgaaactggcctggccagcgcaggaagaacttgtctctacaaaaaatacaaaaattagctgggtgtggtggcgtgcacctgtggtcccagctactcaagaggctgaggtgggaggatcactggagctagagaggtcaaggctgcagtgacccatgatcgcgtcactgtactccagcctggatgacagagcaagaccctgtctcaaaaaaaaaaaaaaagaaaaaaagaaaaaaatttgtacagctatacatgtttgtgattaagctaagtgtgattacaaaagagtaaaaagtttcaaaaaattaaaaagtttataaaatgaaaagttacaataagccaaggttaattattgaagatagttttttaaaataaatttcgtgtgtatccttagtatttataaagtctacagtagtgtacagtaatgaactgagccttcacattcacccaccactcactcaatgactcaccgaaagcaacttccagtcctgcaagttctattcacagtaagtgccccatgtagataggtgtatcgtttgtcttttataccagatatatctttcagtgccagaaagtaagaaaatgctcaacacacacacacacacagacacacacacactgagggagtaaaagggacacaagagccacctgaaagagctcccacagctaaagttgtaacaaatagagcaaaaaaaaaaaaaaaaagaaagaaagaaaagccaaattataagctaaagtacaaaataagtatctatgagtctacactgatatatgtaagtgattgaataaattaatatgtagaggagaagaggtaagttttttgtgcagaagaattccaaataatttatgtggataatacccctggttcaaggaggtagaacattactttctatcacttaaatatgggctacacacagtgacttccttccagagagcagagtctggaaatgggaagtgaggagaggagtaacttatagtggagaaaccagatgaaaacaaggtcatcatcaaggttaacataaacagtgatgtcatgttgatcacatgtacctttaatatgatataatgaaaatggccctttatctttgtggtcttcctgtcccaaacccataatccatgaaattgtgagaaaaaca

SEQ ID NO: 142487 - DNA, 591 bp, Homo sapiens
ttacagagaggatttgaggaaggaatatttcctttgatttttatcaggctccttgactgtggttataatggaggtggactcagtctcagcacatgctgagcagtaagttatgtgagtgcagggaccttctgtcttgcttgctgattcatccccagtgcctccaacagtgcctggcacagtaggtgcctctacacaatggtgttcttggtggaaagtcgcctctccatcagcaatggttggtccagggctcaaacccaggtcttctgactccaaggccaggacatcctctggtgcttcctcgctgtttgtggaccatttggtggagattctacgagcatcttgcattatctcagtttcagccctcatcagctctttgcggtgtaatgctccccatgagtcaccaaattcccctatattctggtgtcgcgtgcgctggcggcccgcgcggcagccaagccaaaggccgaggccgaggccgagcgcggcgcccagcagcacggcgggggccagcagggcgggcgccggccgcagcgcgtcccgccccagcagcagccgcgcgtcgctcttgcaggccgccccgccgcgggccat

SEQ ID NO: 142488 - DNA, 536 bp, Homo sapiens
  misc_feature (1)...(536): n = a,t,c or g
aggagatttcccggctgggtgcgagtgggtccttgttgctcctgctggaaggcttgtcaccatcaacttctacttcatcagcattgacgatccaggagactgtgtccagaactatctcacactctatgatgggcccaacgccagctctccatcctctggaccatactgcggaggcgacaccagcatagctcccttcgtggcttcctcaaatcagcacgctggacagcactctgccatcctgatacatgacccctgctgatgccacagagaataagctgaacttgtatggtttttcaccaaaccatggatagaatcaatatttgtnnnnnnnnnnnnnnnnnnnnnnnnnnnnnnnnnnnnnnnnnnnnnnnnnnnnnnnnnnnnnnnnnnnnnnnnnnnnnnnnnnnnnnnnnnnnnnnnnnnnnnnnnnnnnnnnnnnnnnnnnnnnnnnnnnnnnnnnnnnnnnnnnnnnnnnnnnnnnnnnnnnnnnnnnnnnnnnnnnnnnnnnnnnnnnnnnnnnnnnnnnnnnnnnnnnn

SEQ ID NO: 142489 - DNA, 363 bp, Homo sapiens
  misc_feature (1)...(363): n = a,t,c or g
catcctgatacatgacccctgctgatgccacagagaataagctgaacttgtatggtttttcaccaaaccatggatagaatcaatatttgtnnnnnnnnnnnnnnnnnnnnnnnnnnnnnnnnnnnnnnnnnnnnnnnnnnnnnnnnnnnnnnnnnnnnnnnnnnnnnnnnnnnnnnnnnnnnnnnnnnnnnnnnnnnnnnnnnnnnnnnnnnnnnnnnnnnnnnnnnnnnnnnnnnnnnnnnnnnnnnnnnnnnnnnnnnnnnnnnnnnnnnnnnnnnnnnnnnnnnnnnnnnnnnnnnnnnnnnnnnnnnnnnnnnnnnnnnnnnnnnnnnnnnnnnnnnnnnnnnnnnnnnnnnncggcaa

SEQ ID NO: 142490 - DNA, 3366 bp, Homo sapiens
atgatggcctcatttcccgtgtctcatcctggctttgttcgccctcatctgtctggatttaccttatcccatatcacacaactggtcctcagccataacaagctaacaaacttgaatgattttctaatcatgtggcaagaatttgtgaaggagctttccgagtccagtgaaattgagcagaatgtcatgttgagggatttgtgtcatgaatttatgtgtatggtcagcttttgtggaagcatggatcatttcatattcttcctgaatgcctgtgactgggcccttagtggcttcgcagtaattacctgtataaaccgagtgttcattgctcccaggagaatcctttttctagaggtcctgttttgtgctaagcggaagccagctaacgtgctaattcctccacaatatatttttaaatggaaccaccccaatcgtgagaacttcagaacggtggcaggctgtggagaaaataagacgggggagtgtcagtgtaggagctccatggacgaagcgttcctgtggctctggatccttactccttccagtcgaagaacgggagaattcctaagcctgtccagcaaagtggaggtgcttctggccaaagagaagttaatgaacccttcaggcactttgggctgcttgtggaaccttccagaaactgctgggggagatgggagtgctgaattgccaagtctgggctggcacgtcagatggacaaaactcttgaatcacattcagttcttcagtttaggaggacctgaaggaaagaaggtcatgccggtggtgccaccgaacatcgcagaactgaagaatttggaggtgctcaacttttttaataaccaaatcgaggagctgcccacacagatcagtagccttcagaaactcaaacacctgaaccttggggaaatccaagcacccactatttcgatggatgtttctagaagggagccatggttgggaattgttctgggtgctggcgacaccacagtgaagaagtcagacagagtctctgtctccccacacgtgggacttacatccttgttgggaaagagaccggacaaacttcacctgaggaaggaagagcagcaggaacagggctgtggacaggagtcctcctgggatgaaggaagtgcagctagcagtgaggtgtgggcagcctgggaaggaggcacaggccagagcagctggggcttgcagactgtgggagggagctggaattttactttaggtgcaatggggatctgccgaagcattttagacagagcaggagcatcacctcattggagtttgcagacatgcaggcagttcagtggagaacactatggctgctccggaattaggcctattaagaagatgtttcagtgggaacaggtgaaggacgatggagatcacctggagatggagccctctgggatatattttgaagtgccttgtggtggaacgtacaatgcaacttggaccccacaaaatatttcatcacccaattcatcagacccagatgtcccattttccatctgtacttgggtcattgattcccctccgcatcagcaggtcaagataactgtgtgggcattacagctgacctcgcaagactgcacgcagaattacttacagcttcaggactcaccgcagggtcacggaaattcaagatttcagttctgtggcagaaatgcttcggctgtgccagtgttttattcttctatgagtactgcaatggtcattttcaaatctggagttgtaaacagaaactctagaatgagtttcacctatcagattgcagtgtggataaacttcgtttctctgatgcaaaacggagtttaccttcaacttcttgatattgggcatgtgaatttttccatgcagtacttgaggaaagcaattagacattgtgttttgaaggcttcccggatcctgctgattggtgcattttacagagcgttgattggtgcattttacaatcctcttgctagctacagagcgctgattggtgcattttacaatcctcttgtaagacagaaaagttctccaagtccccacttgacccaggaagtccaactggcttcacctctcacctggactcaaagctcccagccagcccctgttgcccagagcacacatgctgatgacgagggccactgtctgccttcctccacctggggtatttgtcacatggagactgagtcaggttgcattaagaaatgtatgcaaaagggcactggaagcaagaaagaagggatctatggtacttggatgttccgtggaagaaaggacacaggactgttagaggatgcacctcagagaatcacactgtgcaccttctcagtagtggtcaaccagagacaggcagagatactatccagacaacctcaggaaaatgtcagccgtatagaatggatatcgcagaaacactgtgctcttgtcatggcaccctacctaggacacacgacttccatttatcccattgataaggatcttcactttgatcgcagctacataaaatggttatcttacagtgaaaccgggacagctctgtgctcatctgcaaggacacctggaagtttggtactgattcttaatcaagataaggaggagtgggccagcttaaagttaaaaacgcccctggtggtccccagagccagcttgcttgaacattcagggaggtgcggatcggatcgatgccttacacctggacacagggcctgggttggcttggtgactggccaagcacagaagacagtgcttgatgtttctgcccaggctctcctgacaccaagattccttggacacgtgttgatggttcataatctggagacaaaatgtgccctttggagccacaacatatggtccaaagaatggaaagctggcgttgggcccatcatagagtgtgagatagttttggacacagtctcctggattgtcaatgctgatgaagtaaaagttgatggtgacaagccttccagcaggagcaacaaggaccccctcccagtacgtgttgtttggtgctttcctgtacaaagtgcaaatgtcttaccagagggtgatgaagtccagatgatttcatatccacgatcagaagttacactatcactcttaaatcgaagaatggggccacctagagcagtgggcatctctgggacatcagaggatcttgaaaggggaggtgaaggcatgaaaacagattccaagcatggtctagagctcggccctcgcttggtagtaacacagtcagaattctcagtcagacatttccgttcccaccgcagttcacaagaacggaatgctgaggcttcctggtacagctgccaagaaactatgcccacagccttcccactgagagccagatggagctacattttacaggcctaa

SEQ ID NO: 142491 - DNA, 921 bp, Homo sapiens
atggttcatgtaaactctgataccaagactatccagaagcaccaaaggatgtttttagaactagtgattcctgagctagggctggcccagagcatgaaagccaggggaccaagcctctttgaaaaaagtgaactgatggctgaacctctgcttccagtgaaggatgctcagtgtgggggaagagtaacagggcaaagtggtgttgttgaaagcattggccatctaatgcttccatatagagacaacttattctgtgattggcatctccaggggctctccagacactatctcaccatctcttttgaagattttaaccttcagaattcctctggctgtgaaaaagactttgtggagacctgggactatcatacttctgagtgtggtggggatcttcagggctctgctggaacatctacttctcccaactacccgaacctaaatcctcatggccggatctacaagtggagaatcaccgccccagaaggaaggcagatcaccctaacatttagcaacctgaggctggccacgcatccgtcctgcaacaggcatgtgggtctgcctttgctgccactctacttgattgacaacttgccaaaaagaggaagaagacgaaagaggcagaagaaggagaaggaggatgagaaggaggaggagaagagggagaagaagaagggggagaagaagaagggggagaagaagaagggggagaagaagaagagggagaaggagagggagaaagagacagagggagaagggaaggagaaaaaagaagaaggagaaaagaggaaaaggataagaagaagaaggagaaagagaagaaggaggagattgagaaggagagggagaaagagaaaagaagaaggagaagaaaaaaaaagagtaaagaagaaagaagatctgctggtgcagaggcagctttaa

SEQ ID NO: 142492 - DNA, 1422 bp, Homo sapiens
atgaggaagaaagagaaaggtgagaccatgcgacaggaccggagcagaagtcagcagctggtggatcttgagagaaaattccaaggcttgcagcagactgttgacaaaaaggtttgcagcagcaatccttgccagaatggtggaacctgcctcaatctgcatgattcctttttttgtatctgtcccccacagtggaagggtcctctctgctcagctgatgttaacgaatgtgagatttactcaggaacacccttgagctgccagaatggaggcacatgtgttaatacaatgggaagttacagctatttttacttaactgaagaaaagctcatgagtcctttactctcaccccgtgaagaaatccttgctctaacatccccaaggaaccggaagaaggctcccgtgattggcacagagaaaactgccaaaaagctgccaccccagcaattggttctggggcccaccacaggcaagccgaatcctgtgcctggaggctggcaaggcaatggatatatttgcgaagatatcaatgaatgtgagataaataacggcggctgttctgtggctccacccgttgagtgtgtgaatacacctgggtcttcccactgccaggcctgtccaccagggtaccagggtgacggaagagtgtgcacactcacagacatctgctcagtcagtaatggaggctgccacccagatgcctcatgctcctcaactctaggttccttacctctctgcacgtgtctcccgggttatactggaaatggttatgggccaaatggatgtgtgcagctcagtaatatttgcctaagtcacccctgtctaaatggacaatgcatcgacactgtctctggttatttttgtaagtgtgactcaggttggacaggtgtcaactgtacagaaaacatcaatgagtgtttgagcaacccctgtttgaatggaggaacttgtgttgatggcgttgattctttcagttgtgaatgcacacgtctctggactggagctctctgtcaggttcctcagcaaggtacagtcagcatttcttatgccacggatgctcacagcatagcagcagcatcctttatttgtggagagtccctctcaggaataaatggaagcttcagctacaggagcccggatgttggttatgttcatgatgttaactgcttctgggttatcaaaactgaaatgggaaagtatgcagctccaaaaccgccagatgctttggtagccctaaatcagtgtggaggtatcctgactggtccttacggttctattaagtctccggggtatcctggaaactatcccccaggaagagattgtgtctggattgttgtaactagtcctgacctcctggtaacatttacttttgggaccttgagcctcgagcaccatgatgactgcaacaaagattaccttgag

SEQ ID NO: 142493 - DNA, 11344 bp, Homo sapiens
ctcttacctgccaacctgggaggttgatgatgaacatgtctttaccttttctttggagtttgcttaccttattaatatttgctgaagtaaatggcgaacgtggagaacttgagctgcagagacaaaaaagaagcatcaatctccaacagcctcgaatggctacagagagaggaaatttggtgtttcttacggggtctgctcaaaacattgagtttagaaccggatccctgggaaaaattaaattaaatgatgaagatctcagtgagtgtttacatcagatccagaaaaacaaagaagatattatagagttaaaagggagcgcaattggtctgcctcaaaatatatctagtcaaatctatcagcttaattccaagctggtggatcttgagagaaaattccaaggcttgcagcagactgttgacaaaaaggtttgcagcagcaatccttgccagaatggtgggaactgcctcaatctgcatgattcctttttttgtatctgtcccccacagtggaagggtcctctctgctcagctgatgttaacgaatgtgagatttactcaggaacacccttgagctgccagaatggaggcacatgtgttaatacaatgggaagttacagttgtcactgcccacctgagacgtacggaccccagtgtgcatccaaatatgacgactgtgaagggggttctgtggcacgctgtgtccatggcatctgtgaggatttaatgcgagagcaagctggagagcccaagtacagctgcgtctgtgatgctgggtggatgtcttcacccaacagccctgcctgcacgctggacagagacgagtgcagcttccagcccgggccttgctccacacttgtgcagtgtttcaacactcaaggctctttctactgtggggcctgtccaacaggctggcaaggcaatggatatatttgcgaagatatcaatgaatgtgagataaataatggcggctgttctgtggctccacccgttgagtgtgtgaatacacctgggtcttcccactgccaggcctgtccaccagggtaccagggtgacggaagagtgtgcacactcacagacatctgctcagtcagtaatggaggctgccacccagatgcctcatgctcctcaactctaggttccttacctctctgcacgtgtctcccgggttatactggaaatggttatgggccaaatggatgtgtgcagctcagtaatatttgcctaagtcacccctgtctaaatggacaatgcatcgacactgtctctggttatttttgtaagtgtgactcaggttggacaggtgtcaactgtacagaaaacatcaatgagtgtttgagcaacccctgtttgaatggaggaacttgtgttgatggcgttgattctttcagttgtgaatgcacacgtctctggactggagctctctgtcaggttcctcagcaagtttgtggagagtccctctcaggaataaatggaagcttcagctacaggagcccggatgttggttatgttcatgatgttaactgcttctgggttatcaaaactgaaatgggaaaggtcctgcgtatcactttcacttttttccggttagaatccatggacaactgtccacacgagtttcttcaggtttatgatggagattcctcttctgcttttcaacttggaagattttgtggctccagcctccctcatgaactcctcagcagtgacaatgctctctattttcatctctattctgaacatttaagaaatgggagaggctttacagtaagatgggaaacacagcaaccagagtgtggaggtatcctgactggtccttacggttctattaagtctccggggtatcctggaaactatcccccaggaagagattgtgtctggattgttgtaactagtcctgacctcctggtaacatttacttttgggaccttgagcctcgagcaccatgatgactgcaacaaagattaccttgagattcgagatggtcctttgtatcaggacccccttcttgggaagttctgcaccactttctctgtcccaccgctccagactactggcccctttgccagaattcacttccattcagactcccagattagtgaccaaggcttccatatcacctacttaacatcaccttcggatctgcgttgtggtgggaactacacggacccagagggtgaactcttcttgcctgagttgtctgggcctttcactcacaccaggcaatgcgtctatatgatgaagcagccccagggagaacaaatacaaatcaacttcacccacgtggagctgcaatgccagagtgacagttctcagaattacattgaggttcgagatggtgaaaccttacttggaaaagtctgtggcaacggaaccatctctcacattaaatccattactaatagtgtctggatcaggtttaaaatagatgcttctgttgaaaaagctagtttcagagctgtttatcaagtcgcttgcggggatgaattaactggagaaggggtcattcgctcgcctttttttcctaacgtgtatcctggagaaagaacctgtaggtggaccatccaccagccccaaagccaagtcattctcctcaacttcactgtctttgaaattggaagttctgcccactgtgaaacagattatgttgagattggtagcagttccattttgggttctcctgaaaataaaaagtattgcggtacagacataccttcatttataacatctgtgtacaattttctttatgtcacattcgtgaaaagttcttctactgaaaaccatggtttcatggctaagttcagtgctgaggatttggcatgtggagaaattcttacagaatcaacagggaccattcaaagtcctggccatccaaatgtctacccccacggtatcaactgtacttggcatatattagtccaacctaatcacctgattcatttaatgttcgaaacatttcatctggagtttcattacaattgcacaaacgactacttggaagtttatgacaccgactctgagacatcccttggaagatactgtggaaagtcgatcccgccatctctcacaagcagtggtaactcattgatgctggtgtttgtgactgactccgacctcgcttatgaaggcttcttaataaactatgaagcaatcagtgcagcaacagcatgtttgcaagactacacagatgatttggggacattcacttctccaaacttccccaataattatcccaacaactgggaatgcatttatcggatcacagtgagaactggccaactgattgcagtgcacttcacaaacttctccttggaggaagccattggaaactattatacagattttctggaaatcagagatggaggctatgaaaaatcaccattgctgggaatattctatggctcaaatctacccccaacaatcatctctcatagtaacaaactatggttaaaatttaagagtgaccaaatagacacaaggtctggattctcagcttactgggatgggtcatcaacaggttgcgggggtaatctcaccacttcaagcggtacgttcatatctcccaactacccgatgccctattaccacagctctgaatgctactggtggttgaaatctagccacggcagcgcatttgaactggaattcaaagactttcacttggagcatcatccaaactgcactttagattacctggctgtatatgatggcccaagtagcaactctcatctgctaactcagctttgtggggatgagaaaccccctcttattcgttctagtggagacagcatgtttataaaactgaggacagatgaaggtcagcaaggacgtggcttcaaggctgaataccggcagacatgtgagaatgtggtaatagtcaatcaaacctatggcatcttagagagtatagggtatccgaatccttattctgaaaatcagcattgcaactggaccatccgggcaacaacaggcaacactgtgaactacacatttttagcatttgacttggaacatcacataaactgctccacagattatttagagctctatgatggaccacggcagatgggacgctactgtggagtagacctgccccctccagggagtactacaagctccaagcttcaagtgctgctccttacagatggggttggccgccgtgagaaaggatttcagatgcagtggtttgtttacggttgtggtggagagctgtctggggccacaggctccttcagcagccccgggttccccaacaggtatccaccaaacaaggagtgtatctggtacattaggacggaccccgggagtagcattcagctcaccatccatgacttcgatgtggagtatcattcaaggtgcaactttgatgtcttggagatctatggaggccccgatttccactctcccagaatagcccaactgtgtacccagagatcacctgagaaccccatgcaggtctccagcactggaaatgagctagcaattcgattcaagaccgacttgtccataaatgggagaggcttcaatgcgtcatggcaagcagtcactggaggttgtggtgggattttccaggctcccagtggagagattcattctccaaattaccccagtccttataggagcaacacagactgttcttgggtcattcgggttgacagatatcatcgtgttctcttgaacttcactgactttgatcttgaaccacaagactcttgtattatggcatacgatggcttaagctccacaatgtcccgccttgccaggacgtgtggaagggagcagctggctaaccccatcgtctcctcaggaaacagcctcttcttgagatttcagtctggcccttccagacagaacagaggcttccgagctcaattcaggcaagcctgcggaggccacatcctcaccagctcatttgatactgtttcctctccacggttccctgccaattatccaaacaatcagaactgcagctggatcattcaagcgcaacctccattaaatcatatcaccctctcttttacccactttgaacttgaaagaagcacaacgtgtgcacgtgactttgtagaaattttggatggcggccacgaagacgcgcccctccgaggccgttactgtggcaccgacatgccccatcctatcacatccttcagcagcgccctgacgctgagattcgtctctgattctagcatcagtgctgggggtttccacaccacggtcaccgcatcagtgtcggcttgtggtggaacgttctacatggctgaaggcatcttcaacagccctggctacccagacatttatccccctaatgtggaatgtgtctggaacatcatcagttcccctggcaaccggctccagctgtcttttatatctttccagttggaagactctcaggactgcagcagagattttgtggagatccgtgaaggaaatgccacgggtcacttggtgggacgatactgtggaaactccttccctctcaattattcttccatcgttggacataccctgtgggtcagatttatctcagatggttctggcagcggcacgggcttccaggccacatttatgaagatatttggcaatgataatattgtgggaactcatgggaaagtcgcctctcctttctggcctgaaaactacccacataactccaattaccaatggacagtaaatgtgaatgcatctcacgttgtccatggtagaatcttggagatggacatagaagaaatacaaaactgctattatgacaaattaaggatctatgatgggcctagcattcacgcccgcctaattggagcttactgtggtacccagactgaatctttcagctccactggaaattctttgacatttcatttttactccgactcttcaatctcggggaagggattccttctggagtggtttgcagtggatgcacctgatggtgttttacctaccattgctccaggtgcttgtggtggcttcctgaggacgggagatgcacccgtgtttctcttctccccgggctggcctgacagttacagtaatagagtggactgtacgtggctcatccaggctcccgactctaccgtggaactcaacattctttccctggacattgaatctcaccgaacgtgtgcctatgatagccttgtgatacgagatggagataataacttggcccagcagctagcagttctctgtggcagagagatccctgggcccatccggtctactggagagtacatgttcatccgcttcacctcggactccagtgtaaccagggcaggcttcaatgcatcctttcacaagagctgcggtggatatttgcatgcagacagagggatcatcacgtcccccaagtatccagagacttacccatccaacctcaactgttcttggcacgtcctggtccaaagtggcctgaccattgctgtccattttgaacagcctttccagattccaaatggagattcttcttgcaaccagggggattacttggtgctaagaaatggtcctgatatctattctccacccttgggaccccctggaggaaatggtcatttttgtggcagtcatgcttcatcaactctgttcacctcggataatcaaatgtttgttcagtttatttctgatcacagtaatgaagggcaaggatttaaaatcaaatatgaggcaaagagtttagcctgtgggggcaacgtctacatccatgatgctgattctgctgggtatgtgacctcccccaaccaccctcataattatcccccgcacgctgattgcatttggatcttagcggctccaccggaaacacgcatacagctgcaatttgaagatcgattcgatattgaagtaacacccaactgtacttccaactaccttgagttgcgggatggagtggattcggatgcaccaatactttccaaattttgtgggacatctttgcccagcagtcagtggtcctcaggagaggttatgtatttgagatttcgatctgacaacagccccacacatgtgggattcaaggccaagtattctatagctcagtgtgggggaagagtaccagggcaaagtggtgttgttgaaagcattggacatccaacacttccatacagagacaacttattctgtgagtggcatctccaggggctctctggacactatctcaccatctcttttgaagactttaaccttcagaattcttctggctgtgaaaaagacttcgtggagatctgggacaatcatacctctggaaacatcttgggcagatactgtggaaacaccattcctgacagcatagacacttctagcaatactgctgtggtcaggtttgtcacagacggctctgtgactgcctcaggattcagactgcgatttgaatccagtatggaagagtgtggtggggatcttcagggctctattggaacatttacttctcccaactacccgaacccaaatcctcatggccggatctgcgagtggagaatcactgccccggagggaaggcggatcaccctaatgtttaacaacctgaggctggccacgcatccgtcctgcaacaatgagcatgtgatagtattcaatggcattagaagtaactcaccccagctagagaaactgtgtagtagtgtgaatgtaagcaatgagattaaatcttcaggaaacacaatgaaagtcatttttttcacggatggatccaggccatatggcggcttcactgcttcctatacctccagtgaagatgcagtgtgtggtgggtctcttccaaatactcctgaaggaaactttacttctcctggctatgacggagtcaggaattactcaagaaacctgaactgcgaatggactctcagcaatccaaatcagggaaattcatccatttccattcactttgaagatttttacctagaaagtcaccaagactgtcaatttgatgtcctcgagtttcgagtgggtgatgctgatgggcccctgatgtggagactttgtggtccttcaaagcctacattgccattggttataccttattctcaggtatggattcactttgtcaccaacgaacgtgtagaacacattggattccatgcaaagtattcctttacagattgtggcggaatacagataggtgacagtggagtgatcacaagccccaactatccaaatgcttatgacagcctgacccactgctcttggctgttggaggccccacaagggcacaccatcactctcacatttagtgactttgatattgaaccccatacaacttgtgcttgggactctgtcactgtcaggaatggtgggtcccctgaatcacccatcataggacaatactgtggaaattcaaaccccaggacaatacagtcaggttccaatcagctggtcgtgacttttaactcagaccattcattgcaaggtggtggattttatgctacgtggaacacacaaactttaggttgtggtggaatatttcattctgataatggtacaatcagatcccctcactggcctcagaattttcccgaaaacagcagatgttcctggacggccattactcacaaaagtaaacacttggagatcagctttgacaacaacttcctaatccccagcggtgatggacaatgtcagaatagcttcgtgaaggtgtgggcaggaactgaggaggtggacaaagccctgctagccactggctgtgggaacgtggctccgggtcccgttatcacaccaagtaacacattcactgccgtcttccagtctcaggaggcaccagctcagggcttctccgcgtcctttgttagccgatgtggaagtaatttcactggcccttcaggttacatcatttctccaaattacccaaaacaatatgacaacaacatgaattgcacctatgtcatagaggctaatcctctgtcagtggtcctcttgacttttgtgtccttccacttagaagctcgttccgctgtgacgggaagctgtgtcaacgatggcgtgcacattatcagaggttacagcgtcatgtccaccccatttgctactgtgtgtggggatgagatgccagctcccctcaccatcgctgggccggttctgcttaacttctactccaacgagcaaatcacagacttcggattcaagttttcctataggataatctcctgtggtggtgtgttcaatttctcttctggaatcatcacaagtcctgcctattcatacgcagactacccaaatgatatgcactgtctgtataccatcaccgttagtgacgacaaggtgatcgagctcaagttcagtgattttgatgtggttccctccacctcctgctcccatgactacctggcaatttacgatggtgccaataccagcgatccccttcttggcaaattctgcggttccaagcgcccaccaaatgtgaagagcagcaataatagtatgctcctggtgttcaagacagattcatttcagacagcaaaaggctggaagatgtctttccggcagacattggggcctcagcaaggatgtggtggttatctgacaggctcgaataatacctttgcctctcctgattctgattcgaatggaatgtatgacaagaatttaaactgtgtatggatcataattgcacctgtaaacaaagtaattcacctcaccttcaatacatttgctctggaggcagcaagtactaggcaaagatgcctttatgattatgtaaagttatatgatggggatagtgaaaatgcgaacttggctggaacgttttgtggttccacagtacctgctccttttatctcttctggtaacttccttacggttcaattcatcagtgacttaacattagagagggaaggatttaatgctacatacaccatcatggacatgccttgtggtggaacgtacaatgcaacttggaccccacaaaatatttcatcacccaattcatcagacccagatgtcccattttccatctgtacttgggtcattgattcccctccgcatcagcaggtcaagataactgtgtgggcattacagctgacctcgcaagactgcacgcagaattacttacagcttcaggactcaccgcagggtcacggaaattcaagatttcagttctgtggcagaaatgcttcggctgtgccagtgttttattcttctatgagtactgcaatggtcattttcaaatctggagttgtaaacagaaactctagaatgagtttcacctatcagattgcagattgcaacagagactatcacaaggcatttggcaacctgagaagccctggatggccagataactacgacaatgacaaggattgcaccgttactctcacagccccccagaaccacaccatttccctcttttttcattcacttggcatcgagaactcagttgaatgcagaaacgatttcttggaggtgagaaatggaagtaacagcaattcaccattactgggcaagtactgtggaactctgctgccaaaccctgtcttctctcaaaataatgaactatacctacgatttaagagtgatagtgtaacttctgatcgtggatatgaaatcatctggacttcatcaccctctggatgtggtggaactctttatggagacagaggctcattcaccagccccggctatccaggcacatacccaaacaacacgtactgcgagtgggtccttgttgctcctgctggaaggcttgtcaccatcaacttctacttcatcagcattgacgatccaggagactgtgtccagaactatctcacactctatgatgggcccaacgccagctctccatcctctggaccatactgcggaggcgacaccagcatagctcccttcgtggcttcctcaaatcaggtcttcataaaatttcatgctgattatgcacggcgtccatccgcattccgattaacttgggacagctaagtgggtaacaactcgtgttcactcagcactttccctctgcagcacgctggacagcactctgccatcctgatacatgacccctgctgatgccacagagaataagctgaacttgtatggtttttcaccaaaccatggatagaatcaatatttgtaggccaggccgtggtggctcacccccctgtattctcagcactttgggaggccgaggcaggttgatcacctgaggtcaggagtttgagactagcctggccagcatggtgaaacctcatccctctaacaatataataattagccaggcgtggtggtgggtgcctgtaattccagccactcgagaagctgaggcaggagaattgcttgaacccaggaggcagaggttgcagtgagctaagatcacaccactacactccagcctgggcgagacggcaagactccatctcaaaaaaaaa

SEQ ID NO: 142494 - DNA, 718 bp, Homo sapiens
ctgggaagaaatggcttcctcttaggaattgagacagtggttcctgttcaggattttgtactacatatttcctaatagtggtctgtggatatgtagtaagtttcactgttggagaatgaagttcctgttcagtattttgggttatatgtagagtacttggggcacatgtagatatttttaaagttggagaatggagttcctgagaatggtcgctccaaaccaaattttggtaggaggaggtggttttgagaggggagagcacttcccgtgagttgaaggggtccaaggcctgcaccaccttgttcatgggcccactgtaggtcctcactcgctcatacactacatttttttctggaggctgctgggcttggcttgactgatggtagcagtggtaatgctggggctggcactgcagcacctctgggagctgctgggttccacagctgctgctgctcgtctcactccaatagctcgagctcatcttcttccagtggtcagcaagggacctcccagatgttctaccctcagattttgctatgcaatatacttcagcaccacttaaatccagaatactctcattcaaagtgactttagtaaaaagtatcttcctaatgtgtatatgtgcaataggacctagtatactaccaccattaggttgaggactttcagtcccacaagactgtccccattcagacaccagtcgcaagccccagatcat

SEQ ID NO: 142495 - DNA, 3365 bp, Homo sapiens
ggggagggcgaatcattcggtatgatcctgtgactatccaagttaaaaaggctgggtccttaaacaatgagagcggactggtcagctgctactttgggcagcttctctccaaattagacaggatcaagactgattacacactgagtattgccaacaggctttatggagagcaggaattcccaatctgtcaggctggtcccttaacaattgagagcggactggtcagctgctactttgggcagcttctctccaaattagacagcatcaagactgattacacactgagtattgccaacaggctttatggagagcaggaattcccaatctgtcagcttgaagagaaactcactgctgagaaattgatggaatggacaagtttgcagaatatgagagagacatgtgtcgatttacacttacctcggttcaaaatggaagagagctatgacctcaaggacacgttgagaaccatgggaatggtgaatatcttcaatggggatgcagacctctcaggcatgacctggagccacggtctctcagtatctaaagtcctacacaaggcctttgtggaggtcactgaggagggagtggaagctgcagctgccaccgctgtagtagtagtcgaattatcatctccttcaactaatgaagagttctgtgattccaccacattgggatgcttagaagcatcggcgaccctacttagaggccagtggcatcctcctcctatttgtgagaacccagaatgtctccagacatggccagattatcccagagtgggaaggggagacaaatctgtccccactgagaaacactcccataaagtgatgcccttaatactcacacagaaggatttccaaacttggagaacgatgaagctgggttataatttctatccaattcaaagaccagagagagagattgatacaagagacaccatcatcaggcaggaatcagatttcaggacaagtgcctctagccagagtctgtctagtccctctgggtgctttagcaaatgccaggttgataggtcaggaaatgttcatcaccagtttcaaaagcttctgactgaattcaacaaatccactgatgcatatgagctgaagatcgccaacaagctcttcggagaaaagacgtatcaatttttacagccagtaaggataatcgggcaggccattgaagatttttcgcggggaaggaagtggtttttttatcgccctaaaaagaatgccggcgatgaaaaaggctatgaatctttcctgggtttatcaaacgtgcgcacagtccatccagagggctttccagtgtacatatcaaacccatatctcattccctcttttatcgggttacagaaccggtttacgcagtttcggcttagtgaaacaaaagaaatcaccaatccgtatgccatgcgtttatacgaatccctgtgtcagtatcgtaagccggatggctcaggcatcgtctctctgaaaatcgactggatcatagagcgttaccagctgcctcaaagttaccagcgtatgcctgacttccgccgccgcttcctgcaggtctgtgttaatgagatcaacagcagaactccaatgcgcctctcatacattgagaaaaagaaaggccgccagacgactcatatcgtgtttcactctgaaaaagagacgaagagctcaagaataaaggctgaagaaaaagaggtgctccaagaattcccacctgtggctagctccttttatgcacccagcacaggcaggttaatgtttgatcaaaatcttcagctcgaaggaggagaaggtaaagggaatcctggcaatttggccatcactattaaaagaagacaagagcctgactatattgaaggaaaagaaggggttgtctgggaccacggtcccactcgtatcgtcggtctgattattagtctgggaccacggtcccactcgtatcgtcggtctgataatcagactgggaccacggtcccactcgtatcgtcggagttcatcagctctacgaagagaccctatgcaaaggaattggaaactgttgacttcaaagataaattggaagaaacgaaaggtcagatcaacaactcaattaaggatctcacagatggcaagtaccctttaattgttctgctatcaatcaccaaaactcacgttgcacccggcgtgactatgatttaccactcacagttcagggtggggacactgaaatacgaggctcatagagtctggtggtactgggtcttggtgagtaggagcaagcaaggcactgcccaaaagcacttctacccgtatgagcatccgtccacagctgccaccagtcgttcagtgtggccacgcagtttttttgcagaaggcagtgagctcaagtgttgcaagtatctgtttgaagcacagtgtgaagacaatgatctctgcctgagcagctcatctgtccatgcaataccatacagcttgaataacatcatgggacctgtacgaagtgccaccagtgatgctgaaagtgtgcccaagaaacagagaaaagcaataacattacaagaaaaagttgaattccttgatatctaccatagattgagtgttcctggtgctcaaagggggggatctctacagaaaactgggcttgcagcacagaaggtccgaaaagatggtttttggcccttgaacgtgggaggccacgtcctttataagggaactttgttccaaactggaccaacactcaaccccatttcggggataatagataaaataagtcctgagaaattggtagagtggactagtccagggcatatggaagaaagaaaggtgaatctgcacttgccccggtttgaggtggaggacagttacgatctagaggcggtcctggctgccatggggatgggcgatgccttcagtgagcacaaagccgactactcgggaatgtcgtcaggctccgggttgtacgcccagaagttcctgcacagttcctttgtggcagtaactgaggaaggcaccgaggctgcagctgccaccggcataggctttactgtcacatccgccccagcctcctcttcatggaagcttccccaggtagacccagcccttgtccaggcgacaccagtttgtccagatgtggggcccatgataaggcaggggggtaggcacaagaatctccacgggcctcaagttcaaacagtgctctcagatccaaccttagcaataattaagccgagacttgaatccttatctgatactatttctcaattgattcaaaattcagcccagagagtgacaggattgattaaatctcttaaacccctttccctaactgcatacaaacttgactctgggctgaatttttctgaagcagaaaccacatatctctggtcatga

SEQ ID NO: 142496 - DNA, 1854 bp, Homo sapiens
atgagggcctctcctttagaggggaacagtgggaaaaacacagattcatcaaacatcactcagaagccagaattagtaccacctgatctgtggacacaccctgagaggttagcaacccctcagcaaactcctactgaacttcaagaatcatttgcatctaccatagagacaacctctttaatctcaaacaacctgctcttgaagatgagtcagagcaaagccactgttgaaggtcttaaggaagctaaactagggtggtccctgtctcccggccccacacacctggtgctcacagagccacatcagatcgttataagttttacaatggactctcttgttacagcaaacaccaaattttgctttgatctttttcaagagataggcaaagatgatcgtcataaaaacatatttttctctcccctgagcctctcagctgcccttggtatggtacgcttgggtgctagaagtgacagtgcacatcagattgatgaggtactacacttcaacgaattttcccagaatgaaagcaaagaacctgacccttgtctgaaaagcaacaaacaaaaagtgctggctgacagctctctggaggggcagaaaaaaacgacagagcctctggatcagcaggctgggtccttaaacaatgagagcggactggtcagctgctactttgggcagcttctctccaaattagacaggatcaagactgattacacactgagtattgccaacaggctttatggagagcaggaattcccaatctgtcaggaatacttagatggtgtgattcaattttaccacacgacgattgaaagtgttgatttccaaaaaaaccctgaaaaatccagacaagagattaacttctgggttgaatgtcaatcccaaggtaaaatcaaggaactcttcagcaaggacgctattaatgctgagactgtgctggtactggtgaatgctgtttacttcaaggccaaatgggaaacatactttgaccatgaaaacacggtggatgcacctttctgtctaaatgcgaatgaaaacaagagtgtgaagatgatgacgcaaaaaggcctctacagaattggcttcatagaggaggtgaaggcacagatcctggaaatgaggtacaccaaggggaagctcagcatgttcgtgctgctgccatctcactctaaagataacctgaagggtctggaagagcttgaaaggaaaatcacctatgaaaaaatggtggcctggagcagctcagaaaacatgtcagaagaatcggtggtcctgtccttcccccggttcaccctggaagacagctatgatctcaattccattttacaagacatgggcattacggatatctttgatgaaacgagggctgatcttactggaatctctccaagtcccaatttgtacttgtcaaaaattatccacaaaacctttgtggaggtggatgaaaacggtacccaggcagctgcagccactggggctgttgtctcggaaagctccaagaattcccacctgtggctagctccttttatgcacccagcacaggcaggtgtcaagagaagtgctgctggcattgtggacggctggcctccgtatgcccctctctctgccttctggccacctgaatgttctgccatgaccactgacacgtccaactcacatctctttggagtcagtctctttcctatcgagctgccaccagtcgttcagtgtggccacgcagtttttttgcagaaggcaggcctggaacagacaaaggaaatggcattattctccattagagatgagatagatacagacgtgtccctggaacttctgaccgcatttgaggagtcttgccagttgcacgtggcctga

SEQ ID NO: 142497 - DNA, 749 bp, Homo sapiens
ggggagaatcgatgacattaggccactggaggccattagcgagtgagctgagctgcgcggcgcggcgcggcgcggcacggcacggtgggagtgtctccggctggcctgcagggagaacaccgactgagacctctaaccctggctccagtggcatgtgataaccagtcgttctgctcagtggtgggggtggtatttgccgagccagaatgtgtgtgctgttttaggaatccgtcacctttgaggatgtggccgtggagttcatccaggagtgggcattgctggacagcgcacggaggagcctgtgcaaatacaggatgcttgaccagtgcaggaccctggcctccaggggaactccaccatgcaaacccagttgtgtctcccagctggggcaaagagcagagccaaaggcaacagaacgagggattctccgtgccacatgtgttgcctgggaatctcaacttaaacccgaagagttgccttctatgcaggatcttttggaagaagcatcctccagggacatgcaaatggggccggggctgttcctgaggatgcagctggtgccctccatagaagagagggagacaccattgactcgagaggaccgaccagctctccaggacccgccttggtctctgggatgcacgggactgaaggccgctatgcagattcagagggtggtgataccagtgcctactctgggccaccgcaacccatgggtggccagggattctggtgccattggaaatggg

SEQ ID NO: 142498 - DNA, 419 bp, Homo sapiens
cttgtggaatagaggacaacaacttcagcttggccttgaaccctgacacggacattttactctcacctctggcgggaggggcgcggaagcaccaaccatgtgcctaaagctaactgtgtcaaaaagagcatgcttcgaggggctggagtgagcaattcaacttgtggagaaataagaaataatagtgttgagacaagaaacataaaaccgcaggctgcagcatatcatgagtgatgagatctgtgtacaggtgactgacctttacctggcagaaaataataatggggccaccggaggccagccgaacacacagaactcaagaagcctcctggagtcaacgtatccacagaaagccaagcagctaatgtcagatgagaaatgctttaagacacagccttcctcatccctggaggactcaa

SEQ ID NO: 142499 - DNA, 4584 bp, Homo sapiens; identical to SEQ ID NO: 122705

SEQ ID NO: 142500 - DNA, 838 bp, Homo sapiens
ctttgacccagcactgctggacccatctagtccgttcctcacactcgcggactggaagctccaggctgcacaaccaccaactgcaccaaccatgtgcctaaagctaactgtgtcaaaaagagcatgcttcgaggggctggagtgagcaattcaacttgtggagaaataagaaataatagtgttgagacaagaaacataaaaccgcagggtaagaacttttggagaaagatttcttgggaggaagctatcctgaacgcttagagacttttctcatttactggcacaccagctttagagtcctaggtcttcatcctggctcagccaccctccagctgtgtgaactttgagaagttgcttgactacactgagtctcgttgtcactatgagtggaggttgctacgttgctactgtgtggagcacctacccccaagcactcttataagctgcagcatatcatgagtgatgagatctggttacaggtgactgaccctttacctggcagaaaataataatggggccaccggaggccagcccgaacacacagaaactcaagaagcctcctggagtcaacgtatccacagaaagccaagcagctaatgtcagatgagaaatgctttaaggtgagagttgctcatgtagtcaaagaccttgctggtgacaatgtaagttgttaggattctctgaatcggaagttatagccagggtactttgaccccgtgattctactcctggaactttttagagttcctaatgagttcaccagagaactacagagtggaagtaattgtcttcctggacaatgtagtgtgtttctttcctgcctttaaagaaaaaaaaa

SEQ ID NO: 142501 - DNA, 1406 bp, Homo sapiens
tcaggcctgagcggtgttcctggaggtgacgagaggcctctgcaccagctccccaagaaggagactgtcacgtggctccaggtagctgaggactcctcggttcaaagtacatgtggggtactggtccatggagatttctagctggtgaatgttgatgtggatgctgaccttgtggggctgtgcgtcagtcacaggcacactgttgaggagcaatacagtaccctggcccttctcaaccatggaccacaggtggccctcaaatatgtccacatggatgaagtccccatgccagcctgctgcctggaaggccaagggtgcctgccagctctgtgtggtgagtgtaaactccagggttccttcatcctgagtgccccaggcaggcaaggcagccagagagtgggacctagagaagcccagggccacatcgtcattggcagaaaactcttcagcacagccctcatgcttattgggggtcagaggctggaggagtctgcggccattgagagcggctgcatggaggcaacccctcaggggatggctggttcccctcaggtagggcaggccaagtctcccagtgttcccaacaaagagcccataggggacttctaggggggctcccaggactacagaggaggcattcagaaacccattgactgacaatgtgggccagtcctctgagacagtcagaactgtggtgtgggggacggagtcactcagtagaatttctgctggggtctgcagcctcagctcctcctggcccaggacaagcctgacctgcaggtgtccagagtagagctgcagcaggaggtggtcagctgggcctgctgccaggagaaggagggcttcgggttgggacatggagaactgcagctgcaggtctatgtcagtcagagccatggccacagtcacctccgggtggttcttttcatgtttttctgcctgctttatattcgctagcagcgaactgttctccttagtatcttctagacgttccagaactgatgtcagatttggctcatcagagtccacagaccatatcggtgaagaagatgaataggattcctgctgcatccagggtacaatgtgcctttccagaacacagcagcgacccgggatagagggatcgctcaaacagcaccagaggctgcattccaacttttcctccatcaacaagcccgttttcattgttagtttctccttaaacacgattggctgaacatgcgggaacaaggaaaacctgaccggcccggggaaccggggcctctcctgggcaggttcccctttgtcccgggactccgggctcttcctctccgccctcgccctgccgtgtaataacaccgctcggcgcctcaccgtgatgttgcagtggagcatgaaaagccgcggcggctcctggttctctcacc

SEQ ID NO: 142502 - DNA, 1938 bp, Homo sapiens
atgagtgatgagatctgtgtacaggtgactgacctttacctggcagaaaataataatggggccaccggaggccagccgaacacacagaactcaagaagcctcctggagtcaacgtatccacagaaagccaagcagctaatgtcagatgagaaatgctttaaggtgagagttgctcatgtagtcaaagaccttgctggtgacaatgctggggctgccaccgcgcaggcgctcggcccggcgcggggggcgcttacctggcggcggcggcggcgactgcagccagagtctcgccgcgcgcgtcaaactccgaattccgggaacaaagggaacccgcccaagaagagccccggttccccgggcgggggagaaactaacaatgaaaacgggcttgttgatggaggaaaagttggaatgcagcctctggtgctgtttgagcgatccctctatcccgggtcgctgctgtgttctggaaaggcacattgtaccctggatgcagcagattttgagatacagagtgaaaatggggagaactgtaatcaagacatgtttgagaatgaatcacgtaagatattctcggaaatgcctgaaggtgaaagtgctcagcactccgatggggaaagtgactttgagagagatgctggcatccagaggctccagggacacagcccaggtgaggaccacggggaggtggtttctcaggacagggaagttggccagctcataggcctgcagggcacctacctaggggagaagccctacgaatgtccccagtgtgggaagaccttcagccggaaatcccacctcatcacacacgagaggacccacacaggagagaaatactacaaatgtgatgaatgtggaaaaagctttagtgatggttcaaattttagtagacaccaaaccactcacaccggggagaagccctacaaatgcagagactgtgggaagagctttagccggagtgccaacctcataacccaccagaggatccacacgggggaaaagcccttccagtgtgccgagtgtggcaagagcttcagcaggagtcccaacctcattgcacatcagcgcacccacacaggagagaaaccctactcgtgccccgagtgtggaaagagctttggcaaccgatccagccttaacacgcatcaggggatccacactggagaaaagccctacgaatgtaaagaatgcggcgaaagctttagttacaactccaatctaatcagacaccagagaatccacacaggagagaaaccctacaaatgtaccgactgtgggcagaggttcagccagagttcagccctcatcacccaccggagaacccacacaggagagaaaccctaccagtgcagcgagtgtgggaaaagcttcagccgcagctctaacctggccacacaccggagaacccacatggtggagaagccctataagtgtggggtgtgtgggaagagcttcagccagagctccagtctgattgcacaccagggcatgcacacaggggagaaaccctacgagtgcctgacatgtggggagagcttcagctggagctccaacctcctcaagcaccagaggatccacacgggagagaaaccctacaaatgcagcgagtgtgggaaatgcttcagccagcgctcccagctcgtagtgcaccagcggacccacacgggcgagaagccctacaaatgcctcatgtgcggcaagagcttcagccggggctccattctggtcatgcaccagagagcccatttgggagacaagccctacaggtgccctgagtgtgggaaaggctttagctggaactcagtcctcattatacatcagcgaatccacactggggagaagccctacaaatgccccgagtgtggcaaaggcttcagcaacagctctaactttatcacacatcagagaactcacatgaaagagaaactttattga

SEQ ID NO: 142503 - DNA, 1573 bp, Homo sapiens
atgctgtcggtgctccgtaaatgctccctgcttcccctttctgctgcctgtttgcagctggccccgctccctggccactctggggaggctgaagcagcagttagtgagaaggaggcaaaaccagagaagggcgatgctgccattctcattacccgattccgagcctggcctggagatcctggtagatgctgctcatttgggttcagaccctggaccctgcagcagatgctgctggaaacttctggctgcaaagcaacaggacctggctactgtaggaggaagagagatttatgtaaagggctttgtccactataaagtccgggctctgtttccctgtgagaagccgcctcggcccaccgagatgtcccggcaccatagccgcttcgaaagagattaccgggtgggctgggaccgccgcgaatggagcgtcaacgggacgcatgggaccaccagcatctgcagtgtcacctcgggggccggtggcggcacagccagcagcctcagcgtccggcccggcctcctgccgctgcccgtggtgccctcccggctgcccaccccggctacagctcctgctccctgcaccaccggcagcagcgaggccatcaccagcctcgtggccagctctgcgtctgcggtcaccaccaagggccagccgctggacctgctggccacatctggcaggcgctctgcagggccagctgttggccatatggagaatggcagccgctggaaccgactgctcggggctccagaccctggcgtggtatctgaggccacaaagctggagcagccagagggttggactcagatggagaaggctggaggacaaactaccctcaaggctcaagtctttgccactgagggggccagaggtgggtgtgagtggtggtgggaagctgctgccaactcagatgccaccagagttccagcgactggaggcgagggacacagaatatctggacttgggaagattttggaggaaaaacgcacagtccattgctggacgcggcggttactaatttctgctcggtgctcattttacaaagccatcggccgtgccagatgcagacttcccctgtggtccggtgagtggtcagatcaatggggccccatcagcccgagaaatggaccacaaaaacgctcctccacggctctggtgtccaccacaaccctctttcttaagggcctgacccgcccactgtgcttggcagtaaacttgcggccggccaggcagctccgagcctgcagagctgctgctgttgggggaggagcaaatgggagaggggagaggctgtctacccagatcaggttacctgtggcgctgagctcacagggaagacagtggcaaatcgtggctgctctgcccccaacatacacaaacatcctgccaatgattctgctgcacccccacttcccagcccaggttcaaatccaccaagaacgaccgagggaccagcaagagggagctgcttccctgagcttggatatattcaaggcctgcccagcaacacctgcagatggtcctgatggccgtgactgcccttctgcgaaggaactgggccaacacctctga

SEQ ID NO: 142504 - DNA, 361 bp, Homo sapiens
cccacgtccattctattccaagaacttttataagattttgtctttgtattcttcagagtttaacaactcctttgtggatgccattgggttctgacccaggactctggaaatgaggatgtttttgatatggagtacacagaagctgaagctgaggaactgaaaagaaatgctgaggtaattgttttcattcctgagtacagttggtcaaattcagtgtcactcttcccactctgtcctggggcaaagggccccactttcagtgtccactgcagggttcattttggccctttcagtagccattagatggtctcattttctcttgtcatttgctgttcatttttcacatacaagatttaaaaaa

SEQ ID NO: 142505 - DNA, 1332 bp, Homo sapiens
ttttattcttacagatgtggagagattatccccataagagaacagtttaatgacctctctattgaccttcctcgtaggaaaaaaccactccctcctcgttcaattcaagattctcttgatcttttctttagggccgaagaactggagtattcttgtgagaagtgtggtgggaagtgtgctcttgtcaggcacaaatttaacaggcttcctagggtcctcattctccatttgaaacgatatagcttcaatgtggctctctcgcttaacaataagattgggcagcaagtcatcattccaagatacctgaccctgtcatctcattgcactgaaaatacaaaaccaccttttacccttggttggagtgcacatatggcaatgaaattcaccttcaaatccaagagctccttggctttatgccttgattcagacagtgaggatgagctaaaacgttctgtggccctcagccagagactttgtgaaatgttaggcaacgaacagcagcaggaagacctggaaaaagattcaaaattatgcccaatagagcctgacaagtctgaattggaaaactcaggatttgacagaatgagcgaagaagagcttctagcagctgtcttggagataagtaagagagatgcttcaccatctctgagtcatgaagatgatgataagccaactagcagcccagataccggatttgcagaagatgatattcaagaaatgccagaaaatccagacactatggaaactgagaagcccaaaacaatcacagagctggatcctgccagttttactgagataactaaagactgtgatgagaataaagaaaacaaaactccagaaggatctcagggagaagttgattggctccagcagtatgatatggagcgtgaaagggaagagcaagagcttcagcaggcactggctcagagccttcaagagcaagaggcttgggaacagaaagaagatgatgacctcaaaagagctaccgagttaagtcttcaagagtttaacaactcctttgtggatgcattgggttctgatgaggactctggaaatgaggatgtttttgatatggagtacacagaagctgaagctgaggaactgaaaagaaatgctgagacatcagtggagatgcagtcaactgcagatattgtgggaatatcaagagaactacaagtggagcctgcagatgtgactgaattgctgcaatctcatgatcagactttaatggatgtggagttgcttcctacggatgagcaaagaaagaagtctcctgagatgaaatctaatcctggtaaagaaaccatgaatattgttgaagttacaacatag

SEQ ID NO: 142506 - DNA, 1920 bp, Homo sapiens
ggcagcgatggttgcacagtgctacgaatgtgccagacgccaccacactgcacgctttacggcagtcctccagctcgtccgccagcccagccccaaccgtccctgtcacagggacgctagtcacacaactgtcccgcctcctgggctggcgactgcccgggtggcctcggccctgccctccccacctctggtacccaaccaaggtgctctaatggacaccgtgaccctggggtctgtgaggtggagggtcccactctctggctggtggacccctcaggccgtgccccccaggccggtgctgccccactcccgtcagcctgggagctcgatgcggcagtgcccccgccgcaccccagggcacctggaggcagaggctgagaggtcgcagagcccagaattcgcctcctcggcccgggtggtcccactggttccccgggtctgcaggtcaggggacaaacacgggcagttccgctcggctcagcccacagggaggtgccaagtgaaagcaggttcaagacaaaatgtggagctgggcgcccccccccgccaccgtgtggctcgagcctgcagccatctggggaaaccgagtcacagcgaggctccaggacggtcctcaggccacatcagtcccggaaggttccctgacatcccacctttgctctcagccacttcggggggatccctggtgcccagtaatggaggccgtcggtgtgtaccaggcaactgggagccgcatcctgctctgggactgagtggctggagcttccccactgacctggctgggctgaccccacccctcactcccccggccctggtggacaccatggcacagatggacacgctcctgaccaagcagccggccccacagaccattccagttgtcccccaaagctgtgcgacgtggcctgagccgcagctgtgtcatgcctcggacaccatgaccgtgcccttctccatcgccaccaacaacctgcagtaccacgagcaatgctggcacccttacctcgtgggcgactacgtggagacggagctgctgaaagtgctgcggcctcggggtggcccccagtgccctctcctccgaacgctctgtcccttccgaatccagcacgacctgtccgtgaagcagccttggcaggttccggggtctggggctcaggggcgcctcctcatccaggaagctgagctcatcgggagcattccggagctgctggaaaggcccaccgtgcaagccggaaacagatccagagggtcctgcaacctgagggctgcccaggggatggcccctgaccctcacccccggctggccctgaggcaggacatggacaacagctggggctccctcaggctggggaatgaggtggaggggctgcatgcgtccctggtggtgctgcgggagaagcttctagaagtggagcagtcgctgggcaacctggagtacgtgcaggagcctggagaaaaacatcgccgtcaagaccaacagcctctatgtcgaccgccaggcgtgcatggccaccacgccgctaccccacggtcctgcagctgcgcctgcctctaggcccccagcctcaacttcatatcctttgagactgggcactcgctctgcccggagctcctcccactgctggtgcaccagctgggaggataccacagccaacagggtgaagatggctgtccccagagggggccgctgggcctagtgggtgccgctgccaagggtgagctgtcaccgcccagggccacctggaggggggagcctggaaccggctcgtccagcacctcccacaacaggggccggcttgtggaggaaggacctgtggggaatggccgcgtgtccgtgtccagaggcccagggtcggagcgggacaaggccaaggtgctgtgtgggcttggcctggggcccacagagaatggagcccccgc

SEQ ID NO: 142507 - DNA, 2055 bp, Homo sapiens
ttagggcagcttgtgggagcaatcgttgagcgcccagtgtatgccagccccgctgtggtccccgtcgtggggaggtgaggccgggagcggtgctgtgggcagactggggccatctgggtcccctgtggcttctgggctgaccctggcacaccgggcacctggactcccacgcagcccgcgggctgtctccagaccactgtccttccggaatgcatgctccacaggcagccagagggagccgcaaacatggcgtgttggatttccatgctggtccctgaggagcggagagccacaggccatcttcacaatcactctaaaaactgtgtggtcgccatggtggtgcccatctccaagccctgcttcagccttgtacacggcaccgccgccagggtggggtcccagctccgcgcccgagtcggagtcgctgtggccggctttggcgctcttcctgcgccgtggctggtacttgtagtcggggtggtccttcttgtgctgcacgcgaaggcgctctgcctcctccacgaagggccgcttctcgctctcgctcagcaagctccaaccgcctgtgcggcaggacttgggggagcaggggcctgccgtccacagcgccccgtggctgcgccctgcacgatgggaatgaccctggagttctggggaacttggtgagatcaggaccttcccccagcagtgccccccaggtgcctgacgtactgttgtgctgttggtggtattattaccacctcgggccatgcgatgacccttttgcttatctggctcggggtgcaccgtcagggcgtgcggctctgcgtgcttgcgtctgttcattgtttccatgtttttctgctgaatgaccgatgagatgcagccgggaggctctggccggctccggaatgataatggccggcgggtgctttgtatgcgcgaccagcaggcctctgtgccgggcactgtggcgctgccgttggggccggcagacctgcggtcctgcctctccaagcagggcagggagtgggaatgccggacaaaatccgagtgtgaatttctgatggggacgaggctatgaccaaaggcacagatgtgggctgtgggtggccgggaccagactggggagctcggcagggccatgaggctggggcctgggacggacagggaccggggtcctgggggcttcaggctggacaaggtggggagcagggtggcccgaggcttgtggccgggtcgaatgggctgggggtcaacgggcgtcttcacccgagagtgagggcactggcgcctctgtctgcccctcgtggctgccggcccaggaaccctgagacagaccaaaggggaggaggcaaagcggcagggacccgagtgatacgtccacaagccgggggtgcccggagcctccaggggctccaagctgttattaagcccaggcaacagatttttcagtacagatactgtactttcccccctgtggggctctccttcccggttgatcacgagaacgcaggccagcccaggcccggggctcttccgcgccggacaccgtgctgtacggcgctctcgccccggggcttcatcgcccctgccggagccttcccggctccctgtttgtgccggcttaatcccacactgattagatgtctgcgtggctgtcactcccacagccattttctccctagaaactttcctccaaccagacagctctgccggctcctgcggggcgctttcatccgctcccagcctggctccatgccaaggcccgaaagatgccgtcggcttcctggcattgcacagccacccagaaaccagctctgggattcgccaaggaggccctccaggaaggaagacgaggagctcggttcccagaggccgcgacgggattcgcgaagggcatggctgtttccattctgactgaagcctgctgacgcctggtggcacgacgggctgcccctgccgctcgggggtccgggtgggctcgcggccgccctccttgccgcccagcgtggagggcactggggtgaggccggcggccgcgtggcacggcctgatcctgcctttgccggacat

SEQ ID NO: 142508 - DNA, 2400 bp, Homo sapiens
atgaccgcagaattcctctccctgctttgcctcggcccgttcttccgctaccgcacctacctggactggctggagcagcccttccccggggcagtgcccagcctgcggcccctgctgcgccgcgcctggccggccccgctcttcggcctgctgttcctgctctcctctcacctcttcccgctggaggccgtgcgcgaggacgccttctacgcccgcccgctgcccgcccgcctcttctacatgatccccgtcttcttcgccttccgcatgcgcttctacgtggcctggattgccgccgagtgcggctgcattgccgccggctttggggcctaccccgtggccgccaaagcccgggccggaggcggccccaccctccaatgcccaccccccagcagtccggagaaggcggcttccttggagtatgactatgagaccatccgcaacatcgactgctacagcacagatttctgcgtgcgggtgcgcgatggcatgcggtactggaacatgacggtgcagtggtggctggcgcagtatatctacaagagcgcacctgcccgttcctatgtcctgcggagcgcctggaccatgctgctgagcgcctactggcacggcctccacccgggctactacctgagcttcctgaccatcccgctgtgcctggctgccgagggccggctggagtcagccctgcgggggcggctgagcccagggggccagaaggcctgggactgggtgcactggttcctgaagatgcgcgcctatgactacatgtgcatgggcttcgtgctgctctccttggccgacacccttcggtactgggcctccatctacttctgtatccacttcctggccctggcagccctggggctggggctggctttaggcccatcgctgtcttctgtgctgaacgagctgcccagtgctgccacccttcggtaccgagaccctggggtgctgccttggggggcgctggaggaggaggaggaggatggaggaaggagcagaaaggccttcacagaagtcacccagacagagctgcaggaccctcacccttcccgggaactgccctggcccatgcaggccagacgggcacacaggcaaagaaatgccagcagggaccaggtggtctatggctctggaactaagacggaccgatgggcgcggctacttcggaggtccaaggagaaaacaaaggaaggcttgcgaagcctgcagccctgggcgtggacactgaagaggatcgggggtgcgatttcagtggccttggcccagccccacagcccccagccaggactgtggcctttcctggcagctgctggggtcgtcctgtgctctgaggtgcctccagggtcagggccgatgtctgtcattgctgtgggggtgacggtccctgcgctggcctggagagaggttcggggccaacgggcagcgggcaccccggtgaaagtccctcgaggctgcggtggcgacaccacgtccagccacttctcaggtcgtcctagccagagcctgacgcaccccagggctgccgccatggagcccctgttcccagcctccacgcccagctggaacgcctcctccccgggggctgcctctggaggcggtgacaacaggacgctggtggggccggcgccctcggcaggggcccgggcggtgctggtgcccgtgctgtacctgctggtgtgtgcggccgggctgggcgggaacacgctggtcatctacgtggtgctgcgcttcgccaagatgaagaccgtcaccaacatctacattctcaacctggcagtggccgacgtcctgtacatgctggggctgcctttcctggccacgcagaacgccgcgtccttctggcccttcggccccgtcctgtgccgcctggtcatgacgctggacggcgtcaaccagttcaccagtgtcttctgcctgacagtcatgagcgtggaccgctacctggcagtggtgcacccgctgagctcggcccgctggcgccgcccgcgtgtggccaagctggcgagcgccgcggcctgggtcctgtctctgtgcatgtcgctgccgctcctgctgtgcacccaggtctgggagcgacagagctgggcgtgttacaaagcccctcaccgtgtcggggcaggcgtgctggggacggagctggcaccagcttttgtggtcctgtccagcaacccccgcaaggctagcgagggagaaaccatcactcaagcttggagctgcgcaggggacccggccaccccgtctgtcctgtccacggaaaccgtcacccaaacttggagctgtgcaggggacccggccaccctgtccgccctgtccacggaaaccgtcacccaaacttggagctgtgcaggggatccggccaccccgtctgtcctgtccgcggaaaccgtcgcctga

SEQ ID NO: 142509 - DNA, 4014 bp, Homo sapiens
atgggagccacagggggacagagccccgagctgaacgagatggaaagaagagctatgcccagacatggacgttacgatgcagggaacacacgaaccacgctatgggctacagcgagccacgccacacagaaccacgctatggctatactgagccacgctacacagagccacgctacacgctataccaagccacgctatgcagaaccatgctacacgctacagcaagccacgctacacactacactgaaccatgctacacgctacaccgagccacacttcatgctacatgataccccaaaccacgtggagtcatcgcttcctgagtccgtggccagtgctgtcttaggactgggtgtcccaagtgtccgcagctgccccggggggacagggcacaagttccttggggcagtgcccaactcttcgtacgtcttcagcgaatcctccacgaaacacttaagcaaacagatgctcagagagcatatctgtacgacatggtttccaacacaaaaacatgaagattttatcattccagcccaaaatgaaaatcttactaccaaaccacgtgaagcggaagagcagactcagaggtgtggttctgtcccagaaacagggatcatgagcatgcccgggaaaagccagccggtccccagcattcaaacacagccgctgaaggggcagaagagtgcgcagctggccaggccaggccgacaggaggacagagggcggcgggggaggaaggaaacagcctcacctctcctagaagcctcacaggttagaagagccaccgttattccccaaacaccacgcagaagagctccacttactgctccaagcatgatcctgaagatcagccaccggaagccccacaggacaatccgggatgtgggggtatgctggggcagccttgacagcgtccacagagggcacaggaagatccccaggaaccccgtctccagaagctgggactcccatcctaaaacaacgagacataccaaagtgctggctatctatgcgccgctgctggtcatctgcctgtgctacctgctcatcgtggtgaaggtgagggcggcgggcgtgcgcgtgggctgcgtgcggcggcgctcggagcggaaggtgacgcgcatggtgttggtggtggtgctggtgtttgcgggatgttggctgcccttcttcaccgtcaacatcgtcaacctggccgtggcgctgccccaggagcccgcctccgccggcctctacttcttcgtggtcatcctctcctacgccaacagctgtgccaaccccgtcctctacggcttcctctctgacaacttccgccagagcttccagaaggttctgtgcctccgcaagggctctggtgccaaggacgctgacgccacggagccgcgtccagacaggatccggcagcagcaggaggccacgccacccgcgcaccgcgccgcagccaacgggcttatgcagaccagcaagctcccatgccggccttccctctggggagcgacttttccagaaggccggccaggcgagagggtcttcctgacggcggagctgacctgcccggcccaccagctgcatgtcagctccgagccaccgggggctctggcccgggagagggaacggggacaggagcagaggacggtcatccaggcgcagcggggagctgctccccaggccacagcagacagcactgctgagaggcagcggccgcgcggggccggcagccacgaggggcagacagaggcgccagtgccctcactctcgggtgaagacgcccttgacccccagcccattcgacccggccacaagcctcgggccaccctgctccccaccttgtccagcctgaagcccccaggaccccggtccctgtccgtcccaggccccagcctcatggccctgccgagctccccagtctggtcccggccacccacagcccacatctgtgcctttggtcatagcctcgtccccatcagccccatcagcaggggtgccctgggggggatgtgggggtctgtggaggacctggaaagcctcctggggagggaagggggcagaggcgaccggcagccatgggtcccccagaagcagccactggcccagggcccggggaagccgtttcctcccaccagacgagaccccaagagagtggggcctgctggactccccagttctccctcccggggcctgctgggctctccagtggccgaacgcagctggaagctcttggttttgtctatagtggtcggcaactcatgtagagcagtgggatggccttcttcctctggagtgaaaagcaaatctagacttcgtactcttttacctataaatagtgtggacctctaccgggtactctttcgcctctgccatcagccttcccagtatgcacggagggcagtgatgggcgcttgtgatctgatccgtgcctcctccctggatgtgggagctcctgggcttccaggccccgggcacctagagacggatggtcgcacgcatgattgtcggcatctcacagggcgcaggcagaggggccggtctttgctgcctgctcttaagttcaaggagacgccactgtgggtgacctatcagaccaggcctgcagagcttggggagaggattcagggatcattgcagcaggaagctggccctttccaacaaccaccacgactaaagtctgaaaaatatttgaagccacaaggattttatgaacacgagggccaggaatgggtctgggcgcttgttggtgccctggctggagagaccccagtctcccatgaaggctgtatagagcagaagcacgcgacctgtgggtctgggcacacggctgtctctctgaggccagctgctggaggaggcctgtccctgggtggacatcagcaggaggagtgggcttcaagtgaccacagttcccagggccagccccgcacggaggcccctcagacccacagctcaaagcagaagggcccggggtcctcagccaagacccctgctcccaggacggctgcgcccacccctgtgagtgcagctccgccctgtccaccgccctgtccgcctcttgtcggctcttctggaaacctctgcagtggactcgacacaatcctgaaacaccagcatccccggggcctgcaggaatgtgctcctgccggccatcccagctacagggaggacaccgaggccaggaaggggggcgcgtccattgccccccagctgcatgacgcagagttggacccacgtccagggcatgcctccgggtgcagctgctctaagcccagagcactgtggcctctggagcaccaccagtctccacagcccactggcctgcccctgggtcaccccaggccccgcccaggccccctggcagcctctgcctgcccaagatccgccaccaccctccacagcaccgtggcctccggagcacggtccgatgcagcccagcccaggacagagctgagcaagcagatgctcaggaccagccggaggggccacttaggcgggcagaacgcaggggccaaggagcaccacaggaagatcccagccccgctggcgatgggcacctgcgtgcaggcagagggcagcacatggaacagcaacacaggcctgcaacaggacgcaccatggggaggacttgctgaacagggggccggaaaggggccctgtctctcccggagatgccgtgaatgcagcctggcttccctgcggctgtgcctgggcagctgccggggtcctcaccccagtgtgcctgtgggacgtgagcgtgttcggaagcggggccttggaggtgtaattggcagcattaaggttatattggctgagagtgggcgtggatccagtgagtgggtccttaggagaaaaggaggtgacacaggtccagggaggccgagcacagatggaggcagagactggagcgaggtggccaccaccaggaccgcccaggacagcggcagccgccagaaaccaggagaggcaggaggacacccaaggatccccacaggacccacagagcggccgacactgtggctttga

SEQ ID NO: 142510 - DNA, 5133 bp, Homo sapiens
ccctgttcccagcctccacgcccagctggaacgcctcctccccgggggctgcctctggaggcggtgacaacaggacgctggtggggccggcgccctcggcaggggcccgggcggtgctggtgcccgtgctgtacctgctggtgtgtgcggccgggctgggcgggaacacgctggtcatctacgtggtgctgcgcttcgccaagatgaagaccgtcaccaacatctacattctcaacctggcagtggccgacgtcctgtacatgctggggctgcctttcctggccacgcagaacgccgcgtccttctggcccttcggccccgtcctgtgccgcctggtcatgacgctggacggcgtcaaccagttcaccagtgtcttctgcctgacagtcatgagcgtggaccgctacctggcagtggtgcacccgctgagctcggcccgctggcgccgcccgcgtgtggccaagctggcgagcgccgcggcctgggtcctgtctctgtgcatgtcgctgccgctcctggtgttcgcggacgtgcaggagggcggtacctgcaacgccagctggccggagcccgtggggctgtggggcgccgtcttcatcatctacacggccgtgctgggcttcttcgcgccgctgctggtcatctgcctgtgctacctgctcatcgtggtgaaggtgagggcggcgggcgtgcgcgtgggctgcgtgcggcggcgctcggagcggaaggtgacgcgcatggtgttggtggtggtgctggtgtttgcgggatgttggctgcccttcttcaccgtcaacatcgtcaacctggccgtggcgctgccccaggagcccgcctccgccggcctctacttcttcgtggtcatcctctcctacgccaacagctgtgccaaccccgtcctctacggcttcctctctgacaacttccgccagagcttccagaaggttctgtgcctccgcaagggctctggtgccaaggacgctgacgccacggagctgcgtccagacaggatccggcagcagcaggaggccacgccgcccgcgcaccgcgccgcagccaacgggcttatgcagaccagcaagctgtgagagcggccttccctctggggagcgacttttccagaaggccggccaggcgagagggtcttcctgacggcggagctgacctgcccggcccaccagctgcatgtcagctccgagccaccgggtccccgggcccgggagagggaacggggacaggagcagaggacggtcatccaggcgcagcggggagctgctccccaggccacagcagacagcactgctgagaggcagcggccgcgcgggtgacgcagccacgaggggcagacagaggcgccagtgccctcactctggggtgaagacgcccttgacccccagcccattcgacccggccacaagcctcgggccaccctgctccccaccttgtccagcctgaagcccccaggaccccggtccctgtccgtcccaggccccagcctcatggccctgccgagctccccagtctggtcccggccacccacagcccacatctgtgcctttggtcatagcctcgtccccatcaggtgcacatcccggggcctgctgggctctccagtggccgaacgcagctggaagctcttggttttgtctatagtggtcggcaactcatgtagagcagtgggatgggtgagatcaccccttaataccatcacagtgaccatcagcttcagcataggaattctgggggcacattccgaccacagcacctaccttatggctacagtgagtagttcaccagccacggccaccggccccagcccctcctgtccttggttgtcaccacacttccagaagccctgctaccgcccccccacagacacacaaggtgggaccctgatgttgggggctgtcctctcacagaccctcctggggcaggctgtgggcccagctgctcagagattggtcagtagcaaatacgcaatgtcgaatgaatgtctcctcagcaagggtgcctggcacagcttttataagcagaatggcccctcggccgtgagggcgagtacctgggtgagcatcaatcagtccctgcacacagtcggcgctcaatcaatccctgcacacagtcggcgctcaatcaatccctgcacacagtcggggcacaaccaatccctgcacacagtcggcgctcaatcaatcactgcacacagtcggcactcaaccaatcacagcacacagtcgtcgctcaaccaatcacagcacacagtcggcactcaaccaatccctgcacacagtcggcgctcaaccaatcacagcacacagtcggcgctcaatcaatccctgcacacagtcggcgctcaaccaatccctgcacacagtcggcgctcaacaaatcactgcacacagtcggcgctcaaccaatcacagcacacagtcggcgctcaaccaatcacagcacacagtcggcgctcaaccaatccctgcacacagtcggcgctcaaccaatcacagcacacagtcggcgctcaaccaatcacagcacacagtcggcgctcaaccaatcacagcacacagtcggcactcaaccaatccctgcacacagtcggcgctcaaccaatcacagcacacagtcggcgctcaatcaatccctgcacacagtcggcgctcaaccaatccctgcacacagtcggcgctcaacaaatcactgcacacagtcggcgctcaaccaatcacagcacacagtcggcgctcaaccaatccctgcacacagtcggcgctcaatcaatccctgcacacagtcggcgctcaaccaatccctgcacacagtcggcgctcaaccaatcactgcacacagtcggcgctcaaccaatcacagcacacagtcggcgctcaaccaatccctgcacacagtcggtgctcaacaaatcacagcacacagtcggcgctcaatcaatccctgcacacagtcggcgctcaaccaatcacagcacacagtcggcgctcaaccaatcacagcacacagtcggcgctcaaccaatccctgcacacagtcggcgctcaacaaatcactgcacacagtcggcgctcaaccaatccctgcacacagtcagcgctcaacaaatcactgcacacagtcggcgctcaaccaatcactgcacacagtcggcgctcaaccaatcacagcacacagtcggcgctcaatcaatccctgcacacagtcggcgctcaacgaatccgtgcacacagtcggcgctcaatcaatccctgcacacagtcggcgctcaaccaatccctgcacacagtcggcgctcaacaaatcacagcacacagtcggcgctcaatcaatccctgcacacagtcggcgctcaaccaatccctgcacacagtcggcgctcaaccaatcactgcacacagtcggcgctcaaccaatcacagcacacagtcggcgctcaaccaatccctgcacacagtcggtgctcaacaaatcacagcacacagtcggcgctcaatcaattcctgcacacagtcggcgctcaaccaatcacagcacacagtcggcgctcaaccaatcacagcacacagtcggcgctcaaccaatccctgcacacagtcggcgctcaacaaatcactgcacacagtcggcgctcaaccaatccctgcacacagtcagcgctcaacaaatcactgcacacagtcggcgctgaagctccgggcgttttcgtcggggtggtgcaccaaagggccctgtgcccccgttcacacgtacacgaccactgctgtcctgggctctgtgtcccagggccgtgcgcccccgttcacagacggacatcgtacagcaattgtagagtgtgggggcgcaggcgatcatggggtcactgccagtgggaccagggctgtgggcgagtgcgccagggttcccggaggccagacgtgggacccgggagtcgagcagccggcgcccgggagcccggagccagtgccgcgcggacatcggggctcccccgttcagagggcgccgccgcccagagaccccaacgacctgtcagtcaacagagaccccagcagcctgtcggtcaacagagaccccagcagcctgtcagtcaacagagaccccagcggcctgtcagtcaggtgtggaggctcacaggggagcaggttcctgacctcactaggcagtcagagggagcgtgttaaccccgaccatccaaaagcaaaatctacgtcccactgtccggtaccgagcacgatggtatcattcgattacctgattgatctcgccacccgcagccgtcgccgtctgatgattcgcctggtgaaaggcgcgtactgggatagtgaaattaagcgtgcgcagatggacggccttgaaggttatccggtttatacccgcaaggtgtataccgacgtttcttatctcgcctgtgcgaaaaagctgctggcggtgccgaatctaatctacccgcagttcgcgacgcacaacgcccatacgctggcggcgatttatcaactggcggggcagaactactacccgggtcagtacgagttccagtgcctgcatggtatgggcgagccactgtatgagcaggtcaccgggaaagttgccgacggcaaacttaaccgtccgtgtcgtatttatgctccggttggcacacatgaaacgctgttggcgtatctggtgcgtcgcctgctggaaaacggtgctaacacctcgtttgttaaccgtattgccgacacctctttgccactggatgaactggtcgccgatccggtcactgctgtagaaaaactggcgcaacaggaagggcaaactggattaccgcatccgaaaattcccctgccgcgcgatctttacggtcacgggcgcgacaactcggcagggctggatctcgctaacgaacaccgcctggcctcgctctcctctgccctgctcaatagtgcactgcaaaaatggcaggccttgccaatgctggaacaaccggtagcggcaggtgagatgtcgcccgttattaacctgcgggtggctcggagtccttgtcaagccagcgcgctggaggcgaaggggctgcgccattccgggtcaggcagccaacgcgggacacgcgcgtctccgagcttgcggcccgcgaaacccgggtga

SEQ ID NO: 142511 - DNA, 4881 bp, Homo sapiens
atggttctggagccacttgtccagcaggtgctaggccactgggagccagcggtggccaggctggaggacgtgcaggcacctgtgtttcaggccacgtcgcacagctttgggggacaactggaatgggctgaaacagatgcatctgagggatgcagctcagtccacagcgtggaccggcctccactcggaggacagaccctctttcacacctgggacagcctcgtctgtggctcgacatgctggctgacgcagggtccgcggacggcccggcgagcagtggtttgcattcagcccgccctcactgacccgagctgctcccactgtggccgagtgggcgttggctacctggggctgccgggggacgaccgagcctttcccaactgcagctctagcttctgggggtccattccaggcccagcctctctgctgctggatgccgcatctgcgtcgggcatggctgcaacggtgtccctcctgtcgctgcatcctgacaagcagctgctgaactcctccaggtttgccaagcgcagagaactgggctcggtgccacctcgacagcaggccaggacttcgagctgcagcctcactgcctgcccgcctgaccacactcacatcctcacctcctcgtccatgcccctgtgtccctgtctctgtggggccccacacttccaagggaagccctcccgcccaggcactgccaccctgtgcacccagtcctcttgctcccgtgaccggccctactcacccccgggggaagctcagggctgcctgaggtgctctaatggacaccgtgaccctggggtctgtgaggtggagggtcccactctctggctggtggaccagagaggccgtgcaccccaggccggtgctgccccactcccagcaggaccccatgtctggatcctggctctgggtctcttctctggcctcgtgagactggcgccatctccactggagccaataggcgttcggcacagctacccccagctccctctgtctctggacgagttggtggccgctcccacgcaggaatgccgacggcctttggcatcacacaggtgcaggcccggcagtggcttctacctggggctgggagggggcaggtctttggtgctcatgggacgtcactccacactgggcactggtccagggcccagcccagtccggggactaagacgagaggcctctggggtgttccagactctcgacgagggaccccctggactcctgctggcggcaggacccccaccccaagctggggtctaccacagagcggacagcaagaaaatagggtgggggcgcaggcgatcatggggtcactgccagtgggaccagggctgtgggcgagtgcgccagggttcccggaggccagacgtgggacccgggagtcgagcagccggcgcccgggagcccggagccagtgccgcgcggacatcggggctcccccgttcagagggcgccgccgcccaggcccctgtgaagactgcccccttctccgaggagcccagcggcctcctggatgctggggaaatgctgggctgcttagggcagcttgtgggagcaatcgttgagcgcccagtgtatgccagccccgctgtggtccccgtcgtggggagctctcctttccttgtctaccagatttcagtggccttggcccagccccacagcccccagccaggactgtggcctttcctggcagctgctggggtcgtcctgtgctctgaggtgcctccggggtcagggccgatgtctgtcattgctgtgggggtgacggtccctgcgctggcctggagagaggttcggggccaacgggcagcgggcaccccggtgaaagtccctcgaggctgcggtggcgacaccacgtccagccacttctcaggtcgtcctagccagagcctgacgcaccccagggctgccgccatggagcccctgttcccagcctccacgcccagctggaacgcctcctccccgggggctgcctctggaggcggtgacaacaggacgctggtggggccggcgccctcggcaggggcccgggcggtgctggtgcccgtgctgtacctgctggtgtgtgcggccgggctgggcgggaacacgctggtcatctacgtggtgctgcgcttcgccaagatgaagaccgtcaccaacatctacattctcaacctggcagtggccgacgtcctgtacatgctggggctgcctttcctggccacgcagaacgccgcgtccttctggcccttcggccccgtcctgtgccgcctggtcatgacgctggacggcgtcaaccagttcaccagtgtcttctgcctgacagtcatgagcgtggaccgctacctggcagtggtgcacccgctgagctcggcccgctggcgccgcccgcgtgtggccaagctggcgagcgccgcggcctgggtcctgtctctgtgcatgtcgctgccgctcctggtgttcgcggacgtgcaggagggcggtacctgcaacgccagctggccggagcccgtggggctgtggggcgccgtcttcatcatctacacggccgtgctgggcttcttcgcgccgctgctggtcatctgcctgtgctacctgctcatcgtggtgaaggtgagggcggcgggcgtgcgcgtgggctgcgtgcggcggcgctcggagcggaaggtgacgcgcatggtgttggtggtggtgctggtgtttgcgggatgttggctgcccttcttcaccgtcaacatcgtcaacctggccgtggcgctgccccaggagcccgcctccgccggcctctacttcttcgtggtcatcctctcctacgccaacagctgtgccaaccccgtcctctacggcttcctctctgacaacttccgccagagcttccagaaggttctgtgcctccgcaagggctctggtgccaaggacgctgacgccacggagctgcgtccagacaggatccggcagcagcaggaggccacgccgcccgcgcaccgcgccgcagccaacgggcttatgcagaccagcaagctcccatgccggccttccctctggggagcgacttttccagaaggccggccaggcgagagggtcttcctgacggcggagctgacctgcccggcccaccagctgcatgtcagctccgagccaccgggggctctggcccgggagagggaacggggacaggagcagaggacggtcatccaggcgcagcggggagctgctccccaggccacagcagacagcactgctgagaggcagcggccgcgcggggccggcagccacgaggggcagacagaggcgccagtgccctcactctggggtgaagacgcccttgacccccagcccattcgaccacggccacaagcctcgggccaccctgctccccaccttgtccagcctgaagcccccaggaccccggtccctgtccgtcccagccccagcctcatggccctgccgagctccccagtctggtcccggccacccacagcccacatctgtgcctttggtcatagcctcgtccccatcagttctccctcccggggcctgctgggctctccagtggccgaacgcagctggaagctcttggttttgtctatagtggtcggcaactcatgtagagcagtgggatggaataccccaccccttaataccatcacagtgaccatcagcttcagcataggaattctgggggcacattccgaccacagcacctaccttatggctacagctcctcctgggatccccccaagcaggaacccctggagccgtgcagctgtcctccggggcctggacaccaagggctcggctctgggcagtgccactttggacctgcaagcccagggcccctcacagctgctctgggggccagggttcaccagccacggccaccggccccagcccctcctgtccttggttgtcaccacacttccagaagcccctaccgcccccccacagacacacaaggtgcttggcaaatacgcaatgtcgaatgaatgtctcctcagcaagggtgcctggacagcttttataagcagaatgcccctcggccgtgaggcgatacctggctggcactcaatcagtccctgcacacagtcggcgctcaatcaatccctgcacacagtcggcgctcaatcaatccctgcacacagtcggggcacaaccaatccctgcacacagtcggcgctcaatcaatcactgcacacagtcggcactcaaccaatcacagcacacagtcgtcgctcaaccaatcacagcacacagtcggcactcaaccaatccctgcacacagtcggcgctcaaccaatcacagcacacagtcggcgctcaatcaatccctgcacacagtcggcgctcaaccaatccctgcacacagtcggcgctcaaccaatcactgcacacagtcggcgctcaaccaatcacagcacacagtcggcgctcaaccaatcacagcacacagtcggcgctcaaccaatccctgcacacagtcggcgctcaaccaatccctgcacacagtcggcgctcaaccaatcactgcacacagtcgtcgctcaaccaatcacagcacacagtcggcactcaaccaatccctgcacacagtcggcgctcaaccaatcacagcacacagtcggcgctcaatcaatccctgcacacagtcggcgctcaaccaatccctgcacacagtcggcgctcaacaaatcactgcacacagtcggcgctcaaccaatcacagcacacagtcggcgctcaaccaatccctgcacacagtcggcgctcaaccaatccgtgcacacagtcagcgctcaaccaatcacagcacacagtcggcgctcaaccaatcactgcacacagtcggcgctcaaccaatttgggcccaaaattggggccttaacctattcctga

SEQ ID NO: 142512 - DNA, 1437 bp, Homo sapiens
cccgggtcgacgatttcgtcagaaatggcacctcgaaaggggaaggaaaagaaggaagaacaggtcatcagcctcggacctcacgtggctgaaggagagaatgtatttggtgtctgccatatctttgcatccttcaatgacacttttgtccatgtcactgatctttctggcaagtgagtacctgggtggagaggcatccagctggcaaaaggctgaggaaggtaatggctgggacgggctatcagttcaggggattctctctaaagaaatgctgttttgtccaggtaagaaaatgtgcttgtccatttagcccacaaatattgtgatttcccaggggttacaagagaggagacacattcttcgtccttaacagcgtgatggtcattgaatccttggtttcttgggaattatcttctttccctagttccctttgcaggagcagcagtggactgcaagtgggctctgggtgcgggttcgacggccatttatcaagttgtgacttgtgtgaaatcactcagattctgagttttggtttcctcatatgtaaaattaggacagtaatgtctaccttgtggagtaatggtaaggattaaatgcacaagtagatatataaaatgttaatactgagtatagctatattgggccattcaaccccactggactgaactccatgagggcagagcccatgaccatcatcctccaccatgactgagctgtgttgctcttcactcattaggatatcgtaagcactccttgttggacaaggaagaaatgaccctgtgctttttgtccccagggaaacccatctgccagtgtgacctggtgggatgcaaggtaaaaggcaagaccgaagatgaatccctcacccatatgctgcttatgttgggctgccccaggatgtggcccagaggtgcaaggaagcttggggtatcaccgccctacacattcaaactccggggccacagggaggaaaatagggaccaaggacccctgggacctgggggcccagtcggccctcaagagccccttccccgctcgggttatgaagatcgggccggattggtaagtgcccccctctagctaatgcttgggtttattttgaagcattggccccaaaaagcacgtgctgtgcccagtggatgtgcagcggctggtctggtcacttttggcagttaagtttgttaagggaggctgcaagaggcaccttgtgacttaaaaatctctccctgaatatctctgtcaccttgatatgaatggcctgtttcatttgtgaatctctgtcctacactgcctggtgcagggaaaactgacaagagatgaattggcctttcctccattctttggggcattgctattaaccattttgtgtgtaccatctcctgcattgtaggatgttcagcatttttggtttccgcctactaaatatcagttgggcat

SEQ ID NO: 142513 - DNA, 396 bp, Homo sapiens
tcagttccttgccatgtaggcttttccatagagctgcacatggcatggtttccccaacagcatatcttctggcagccacttccagagcccctggaactctggcccaaggctctccgactgactccttcccagatcttctcggcttagcagctgaagactgacgctgcccgatcgcctcggaagcctgacacttatactttctgctcccccggctccttcagttgtacccactctttgttgagtcccacaattaccattgttctcggcccggacttcaatccggtctcccacattattccagataccacacctgaccctcatgactgcatctctctgatccacctgacgttcaccccatttccccacatttccttcttccctgtttctcaccctcat

SEQ ID NO: 142514 - DNA, 1287 bp, Homo sapiens
ttataccaggatctctcccagaaacagtccctgtggccggttcgatgcaggtgtgctgattggcttaggcttggggagagccctgcccagaccatatgcttggtgggggaggggaagagcccattttggaggctgaaagtccaagaccaaggtgccagcagggtccgtttctggcaaggcctctctcctcggcttcagatgatgccttctctctgtgttctcccatggtcttttccctgtgcacacaaagagagagctctctggtgtctcttcttcttgtaaggctatcagtccagttgcagagaacctgctttgtaccaggcactgtgctccagatggagacacaggaagaaggaggagatccagttcccagtctggagaggcttccggtccattatggaagaagatgtctaagcaggaaattcctccacactgtgatctgatttgtgatgcagggaggacttcgttaccatgggtgtgctttgaaggaggtgtggagccagagcgaaggagctgagatggcccttcattattccacttagtggtaagagggcttatcctcttctctcttccaataccattagatgtgggctgctcctggggcaagggcaggactgagcctccttcccacaaagtccccctaacagagcctgcattaatgttctttctgtcctttctctgtctctgtgtttctttctctctttctcgtccctttattgaggaacatactgttttcattcggaggcaatgaatgccagtgatagagtggctgcgtgaaaacgtaaggctggtgagcaatggagagttaatggtattgtaagaggttaagcccaccggccacactgatgtttctgccagtagcgcccttggcatggataccctgggtgacaagcctgtagcccatggttggcaatgtggtctatgaatatgtttccggtgatttgtcaacacctttaaattatgtggcaaaacttcttgcacgcgtctgtaattccagctattcaggagcctggcagccactcccagagcccctggaactctggcccaaggctctccgaccgactccttcccagatcttctcagcttagtggctgaagactgatgctgcccgattgcctcggaagccttctgcccatcggtcaaattctctcctctgaggaggcaaggctcaagtttgctgcagactcccacagatttgccgctggtaacactcggaagccgggctctcatctcagcaaatgacagcgctatttctccatttacaacagcgaaaaacttaggaatcat

SEQ ID NO: 142515 - DNA, 1556 bp, Homo sapiens
ttacaatttggcatgttttttcagtggctggtaccagttgttcctttccaagtttagtgcttccttcaggagctcttgtaaggcaggcttggtggtgacaaaatctctcagcatttgcttgtctgtaaaggattttatttctccttcacttatgaagcttaatttggctggatatgaaattctggattgaaaattcttttctttaagaatgttgaatattggcccccactttcttctggcttgtagagtttctgccaagagatcagctgttagtctgatgggcttccctttgttggtaacccgacctttctctctggctgcccttagcattttttccttcatttcaaccttggtgaatctgacaattatgtgtcttggggtggctcttcttgaggagtatctttgtggtgttctctgtatttcctgaatttgaatgttggcctgctttgctaggttggggaagttctcctggttaatattctgaagagtgttttccagcttggttccattctccctgtcatttatttcgttaatttgatcttcaatcactgataccctttcttccacttgattgaattggctactgaagcttgtgcgtgcatcacgtagttctcgtgccatggttttcagctccatcaggtcatttaaggtcctctctacactgtttattctagttagctgttcgtctaatcttttttccaggtttttagattcctgtgtgcggttgaatgccactcttgcaaagacagcttgggacacactggccctcttcagctcatctctgacttgctggtagatatctggagagacttccacggaagagttggttggctctggcttaactgctctggggatgggtggatggttcaggaactgctggttgatggcttgaggatgctggtgagccaggagccggctaacggcaatctgttggtttatcagatgggccatggctatttgttgccttacaagttgtggactaagctggggagaaagaagaccagggctcatgatgggctgtaatgcgggcacttggtttcggattggagtactgtggtgaatttggctgtgaggagactgttcgttggttttccccagggatgccagctggttcatatttggtaaatgcattggacgctggcccagaacacaatagtctgaaaggttttctcgttccactctttccactggcagccactcccagagcccctggaactccggcccaaggctctctgactgactccttcccagatcttctcggcttagcggctgaagactgacactgcccgatcgcctcggaagccgccttcttttcaagggcctgtttcccttgcctccataactgttgtgggtattgacggccaggcttctaaacctcttaaaactccccaactctggtgccaacttggacaatattcttttatgcactactttttagttattcccacctgcccagttcccttattaggttgaggcattttaactaaattatctgctttcctgactattcctaggctacagccacacctcattgccgccctttcccccagttcaaa

SEQ ID NO: 142516 - DNA, 350 bp, Homo sapiens
ggcacgaggcagccatgagtatgctcaggcttcagaagaggctcgcctctagtgtcctccgctgtggcaagaagaaggtctgggttagacccctatagaccaatgaaatcgccaatgccaactcccgtcagcagatccggaagctcatcaaagatgggctgatctattcgcacgcctgtgacggctcattcttggccttcatgccggaccaacaccttgtcccgtcgcatgggccattcctagtctttgcggacactacttgatcctgtcaacatgtgagggctcctaaacgcatcatggatcacgaaatgctagctacttctataggagtccatattagatttcttgtg

SEQ ID NO: 142517 - DNA, 1127 bp, Homo sapiens
atggcttcggcgccccggcccacaggggcggccatcttgggctggagaggcagcctgaaggaggccaccgctggccctgctgtcagattcgaaggtcataataagggagtgacccggcgacgactcgccccaacgatggcgaggcggcgagagctgaagcgctgcctgcagctgctggcgtcctcggcggagccagcgcggcgggctcgggttaggaagaacccgagcgcctgccgcggtcgcccctcccgctacggcggcgctttgcgcggggactctgtggccggaagccgcggaactgaggcggcgcgcgctcccggccaccccaagcgcgagctagagctcgatatggtagatactcttccatgggttccgggatcacatgcattcattatacgtcagttaaacctggaaaatattaagggagctttcctgctacaagaattatgtttaaaaagctccacaggggagctctttcctttcgctgctgtggctgcagccttgagtatgctcaggcttcagaagaggcttgcctctagtgtcctctgctgtggcaagaagaatatctggttagaccccaatgagaccaatgaaatcaccaatgccaactcccgtcagcagatccggaagctgatcaaagatgggctgatcatccgcaagcctgtgatgggcaggcatatgggcataggtaagcggaagggtacagccaatgcccgaatgccagagaaggtcacgtggatgaggagaatgaggattctgcaccggctgctcagaagataccgtgaatctaagaagattgatcgccgcatgtatcacagcctgtacctgaaggtgaagaggaatgtgttaaaaaacaagcagattctcatggaacacatccacaagctgaaggcagacaaggcccgcaagaagctcctggctgatcaggctgaggcccgcagatctaagaccaaggaagcacacaagagctatgaagagcacctccaggccaagaaggaggagatcatcaagactttgtccaaggaggaagagaccaagaaataaaagctgcccctttgtgtgtacatactggcctccgtgattacatagatcagccattaaagtaaaataagcctttatctgcttgc

SEQ ID NO: 142518 - DNA, 1004 bp, Homo sapiens
tgcctgtatatcagaaacacccacagaacttttaataattatctagagaaactgccccacctgacattttgattcagtagcctcgggtgtagtttaaaaagctccacaggggagctctttcctttcgctgctgtggccgcagccttgagtatgctcagggcttcagaatgaggctcgcctctaggtgacctccggctgtggcaagaagaaggtctggttagaccccaatgagacccaatgaaatcggccaatgccaactccccgtcagcagatcccggaagcttcttcaaagatgggcctgatcatccgcaagcctggtgacggttccattcccgggcttcgatgtccggtaaaaacacctttggcccgccggggaaggggcagggcaacatggggcattaggtaaggcgggaaggggtacaagccaaatgcccggaatgcccagagaaagttcacatgggatgagggagaatggaggattatagacgcgcggctgcctcagaaagatacccgtgaatcctaagaaagatcgaatcgccaacatgtattcacagccttttacctgaagggtgaaggggaaatgtgttcaaaaacaaagcggatttctcatgggaacacatccacaagcttgaaggcagacaaaggccccgcaagaaagctccctggctgacccaggcttgaggccccgcagggtcttaagacccaaggaagccacgcaagcgccgttgaagagcgcctcccaggcccaagaaggaggagattcatcaaagacttttttccaaggagggaagagaccaagaaataagaacctcccactttgtcatgtacatacttggcctcttgtgattacatagactcagccattaaaataaaaacaaagccttaagcaaaaaaaaaaaaaaaaaaaaaaaaaaagtcggcgcggccgcaaatttgtaggggtagttgcgcccgggatttggtgcgggggttgcggggtgggagaaggttgtccccagggggga

SEQ ID NO: 142519 - DNA, 350 bp, Homo sapiens
ggatcaaatattccatctgcactttaaacaaatgcaattgttatgcttgtgcacatggcaggccagaggccctgattgtcccccttccactaaggtggtcctccagttgaccaggcatgggctgcagggtagctattttccaggtttctacagcttggagtaataagtcatgccaagctctctctgctatatcccaaagtccctgcgggtcagcccctgagggccgtccagcttccgtctcccaacactaagttcacttcatgtctctcatggcagggaggagacttagcattccttggagacctgaagggatgcagtgagcttaagaattttcaagagcttatcagtca

SEQ ID NO: 142520 - DNA, 2271 bp, Homo sapiens
gcttatccaccatgatcaagtgggcttcatccctgggatgcaaggctggttcaatatatgcaaatcaataaatgtaatccagcatataaacagagccaaagacaaaaaccacatgattatctcaatagatgcagaaaaagcctttgacaaaattcaacaacccttcatgctaaaaactctcaataaattaggtattcatgggacgtacttcaaaataataagagctatctatgacaaatccacagccaatatcatactgaatgggaaaaaactggaagcattccctttgaaaactggcacaagacagggatgccctctctcaccactcctattcaacatagtgttggaagttctggccagggcaattaggcaggagaaggaaataaagggtattcaattaggaaaagaggaagtcaaattgtccctgtttgcagaagacatgattgtatatctagaaaaccccactgtctcagcccaaaatctccttaagctgataagcaacttcagcaaagtctcaggatacaaaatcaatgtacaaaaatcacaaacattcttatacaccaacaacagacaaacagagagccaaatcatgagtgaactcccattcacaattgcttcaaagaaaataaaatacctaggaatccaacatacaagggatgtgaaggacctcttcaaggagaactacaaaccactgctcaaggaaataaaagaggatacaaacaaatggaagaacattccatgctcatgggtaggaagaatcaatatcgtgaaaatggccatactgcccaaggtaatttacagattcaatgccatccccatcaagctaccaatgactttcttcacagaattggaaaaaactacttcaaagttcatatggaaccaaaaaagagcccgcatcaccaagtcaatcctaagccaaaagaacaaagctggaggcatcacactacctgacttcaaactatactacaaggctacagtaaccaaaacagcatggtacttgtaccaaaacagagatatagatcaatggaacagaacagagccctcagaaatgacgccgcatacctacaactatctgatctttgacaaacctgagaaaaacaagcaatggggaaaggattccctatttaataaatggtgctgggaaaactggctagccatatgtagaaagctgaaactggatcctttccttacaccttatacaaaaatcaattcaagatggattaaagatttaaacgttagacctaaaaccataaaaaccctagaagaaaacctaggcattaccattcaggacataggcatgggcaaggacttcatgtccaaaacaccaaaagcaatggcaacaaaagacaaaattgacaaatgggatctaattaaactcaagagcttctgcacagcaaaagaaactaccatcagagtgaacaggcaacctaaaaaatgggagaaaattttcgcaacctactcatctgacaaagggctaatatccagaatctacaatgaactcaaacaaatttacaagaaaaaaacaaacaaccccatcaaaaagtgggcgaaggacatgaacagacacttctcaaaagaagacatttatgcagccaaaaaacacatgaaaaaatgttcatcatcactggccatcagagaaatgcaaatcaaaaccactatgagataccatctcacaccagttagaatggcaatcattcaaaagtcaggaaacaacaggtgctggagaggatgtggagaaataggaacactcttacactgttggtgggactgtaaactagttccacatattctcactcataggtgggaattgaacaatgagatcacatggacacaggaaggggaatatcacactctggggactgtggtggggtggggggaggggggagggatagcattgggagatatacctaatgcaagatgacgggttagtgcctggttggaatggatcaaatattccatccacacgttaaaaaaaagcaattgttatgcttgtgcacatggcaagccagaggcccagattgtcccctttccactaaggtggtcctccagtcaaccaggtgtgggctgcatggtaacccttttccaggattctacagcctggagtaataagtcatgccaagctctctctctgctatatcccgaagtctggcaccctgtgggtcagcccccgagggccatccagcttcagtctgccaacactaagatcacttcgtggccctcacgactggggaggagattaagcataccttggagacctgaagggatgcagtg

SEQ ID NO: 142521 - DNA, 1866 bp, Homo sapiens
atgcatttctttgatcccccaacgcctgcaccttcctctaagccttcttccaaaacctctcacaacggaataattgctcctcctccatctaacgacaagaccaagatagctatcgtaaaagttaaagacttaaaacaaactttggcaattaagacaggataccagttggaatggatcaaatattccatccacacgttaaacaaaagcaattgttatgcttgtgcacacagcaggccagaggcccagattgtcccctttccactaaggtggtcctccagtcgaccaggcatgggctgcatggtagctcttttccaggattctacagcctggaataagcctgtgaccacactaccaccgggcccgggggacgacgccctccaccagccgccgctgtcgtccaccatggtggtgctccgaggaccccgccgctgccgccactgcccacgccgatgccactacccgctccgggcccctggcaaacccactgcttttcccctcctcccagcgcccgcgctgcccgccctgggcccgctgtcgccggtgcgacggtaccaccatcccagctgtgaggctgccatcaacacccacatcagcctggagctccacgcatcctatgtgtacctgtccatggccttctacttcgaccaggacgacgcggccctggagcactttgaccgctacttcctgcgccagtcgcaggagaaaagggagcacgcccaggagctgatgagcctgcagaacctgcgcggtggccgcatctgccttcatgacatcaggaagccagagggccaaggctgggagagcgggctcaaggccatggagtgcaccttccacctggagaagaacatcaaccagagcctcctggagctgcaccagctggccagggagaacggcgacccccagctctgcgacttcctggagaacgacttcctgaaccagcaggccaagaccatcaaagagctgggtggctacctgagcaacctgcacaagatgggggccccggaagcaggcctggcagagtacctctttaacaagctcaccctgggccgcagccagaaacacaccagagcccagacaggccccacagccacgggggcacagtggtgcaggggatgggctcctatggcctttggcagctccacacctgtggctttgcaggattcaggacccatggttgctttcacagcttgttatgtgcctgtggcttttccaggcacaaggttcaagctgcctgtggctctaccattctggggtctggaagatgaccctgtggcaaccaccaccgcctggtcccgaggaccctgccctccactggtcgcctccgtcgtccaccatgttgtgctcagaggcacccgccgcggccgccactgccgatgccgatgccgccgcccgcttcgggaccctagcgaccacaccgctttaccctgcctgctcctcgcgcccgcactgcccgccctgggcccgctgtcgcaggtgcaccagaacaaccatctcagctgcgaggtcgccatcaacatcaaggtcaccctggagctccacgcctcctatgtgtacctgtccatggccttcttcttcgaccgggacgacgtggccctggagagcttcagccgctatttcttgcaccagtggcacgagaagagggagcacgcccaggagctgatgagcctgcagaacctgcgcggtggccgcatctaccttcgcgacatcaggaagccagagtgccaaggctgggagagcgggctccaggccatggactgcgccttctacctggagaagaacgtcaaccagagcctcctggagctgcaccagctggccaaggagaacgacgaccccacctctgtgacttcctggagaaccacttcctga

SEQ ID NO: 142522 - DNA, 1308 bp, Homo sapiens
gggcagtgaaggagcaatggcaagtggcagaggagagatcaaagtgaccacccagctcattcccttgctggatgagacttcacagcctcttacatcctacagaaatcagggtgaaatggcccacacgtgccgtggaaccatcaacctgtccaccgcgcacattgacacggaggactcttgtggtatcttgctgaccagtggggccaggagctaccacctcaaggccagctcagaggtggaccggcagcagtggatcaccgccctggagctggccaaggccaaggctgtccgcgtgatgaacactcattcaggtagtgagcacttgggacagcgggtgtgtatatggtggtgtcatgagtctggaggaagtgggaattgcaagccactggtgggcagtggtggccaggagacccaggccagcgtggatcttgccttattttttaggaacttcttgaaaataatgcagcaggtggcagtcatgggattagtcatccggcaacagttttcctacgacagccagtgcgaggggtttcttttgcagttttttcagtttacagccctatatgaactcaaacttcaggagcaaggtgtcaccttctaccttcaggcaggggtgatagggccctttgctgagcacacgtacacatgctatgcagccacgttctgcagtgaccctcccagccatgcagacaacactcctcaaacccagggtatctgctgtgtggtgaccccttccaaccatgcagaccactcctcttgcgctctagacccatccagcttctgctgtcttcactggcacaccatcttgctgccagccagcgtgaatgctgtatggttttctatccagggtcaactggtggcagggaacaaaaccccgctgagactggctgaaacacaagtggggcctgtgctcagggtgcaggaagtggatatctttggtcttcagggctttgaccgccctcctcccaggctcggagaggcggtggcagccggcactgcacccagatggactgagagcgcggcggcgggaaggcggcggcggcggcggcagcagcagcagctgcaagagccctcgcagcctcggggcaggacccacgtccacacccggggctatgctgtccagagcagacctgatgaggtgagtgcagatgcatgcctggacaaccgcacaggtagcctctcctgggcagccacagccattaatctcaaggtcactggtgtccacggccatgagcttcagccggactcactccctgggcaggacacctactccttcgatatcttctgtacttcctctgtcctcttggg

SEQ ID NO: 142523 - DNA, 1929 bp, Homo sapiens; identical to SEQ ID NO: 121630

SEQ ID NO: 142524 - DNA, 435 bp, Homo sapiens
atgggccaggtgtgctggctcacgcctgtaatccgagcactctgggaggccgagaatcagaggaaataccaggcacctgttggccagttaaaaacgattagcatggctgctggacttaacactcaggaacccagcccaactctagaactcacccctgagcgcaaaggcaatgtcgggtatgctggtaaaggaccactagaatccagcagccccaacccctttctctgtggtcaagagaggcaggaaaagaggtgcaggactgctacatcaaatagaagctgtgaagctgtaaaactacaaattgttcttcaaatagagccccagatgcagttcatgactaagatctaccacggacccctggaccagcctgctagcacatgctatgatgttgatgacaccgaaggcacccctcctgaggaaatctcaactgcatga

SEQ ID NO: 142525 - DNA, 4317 bp, Homo sapiens; identical to SEQ ID NO: 117716

SEQ ID NO: 142526 - DNA, 333 bp, Homo sapiens; identical to SEQ ID NO: 127246

SEQ ID NO: 142527 - DNA, 1428 bp, Homo sapiens
atgactctggtggagatttatttcagtcagatcatgcatgccccgcggtccagggacaggttcacagcgccgtccttcatccagagggatcgcttcagccgcttccagcccacctacccctatgtgcagcacgagattgatcttcctcccaccatctccctgtccgacggtgaagagccacctccttaccaggggccctgcaccctgcagctccgggaccctgaacagcagatggaactcaaccgagagtccgtgagggccccacccaaccgaaccatatttgacagtgatttaatagacattgctatgtatagcgggggtccatgcccacccagcagcaactcgggcatcagtgcaagcacctgcagcagtaacgggaggatggaggggccaccccccacatacagcgaggggcacgagaaaggagaaaagaatgggcatttcagtacagctgggctggctcgttccacagcccaagacaagcgccaggacggtccagctcaagactggaaccttgtccagttcctcctgcagctggtgtggccttacgaatgtggattgtctctctgttcatgggctctgctgggctctctgagctcagaaccttcagatttgttgggtgggaccacagatagtcatgggtgtgggcagcagacgcacacagtcgtagccactggggaggcaccacctgatctctgcctgcatcgccccacgtatgagcggatacacttgacagatatgcctccccactggccggggcctgagccctgctgcggcacatcggagctggagttcgcccaaatcatcatcatcgtcgtggtggtcacggtgatggtggtggtcatcgtctgcctgctgaaccactacaaagtctccacgcggtccttcatcaaccgcccgaaccagagccggaggcgggaggacgggctgccgcaggtctcccctggatctttgctgcccgacgtggctttgccagcttctgagctgtgcacgaacgggaccggccctgggtggtccctcgtgcctggctcctctggcttggcagtgcacttcaccttgtgtcctgaacaccagcacactggccacacccttaccaaccaagaggcccagcagaaaagcaaaaagtgtcaaaaaagtgtcttctgtgtcatgtggcggcagatttgtgtgatgccctttcccgggaagcgctggctgccccacctgcagagcctcccttccctgaaatcaggaagaatcgaagctgtaaaactacaaatagttcttcaaatggagccccagatgcagtccatgactaagattcactgtggacccctggaccggcctgctagcccatgctccgatgttgatgacatcaaaggcacccctcctgaggaactctcaactgcacgacccctactatgccccaattcagcaggaagcagttag

SEQ ID NO: 142528 - DNA, 1174 bp, Homo sapiens
acaatgaagaacagatagaacataactgtcaacaagtaattgctcaaacctacgccactcgaggggaccttctagaggttcccttgactgatcccaacctcagcttgtatactgatggaagttcttttgtagaaaaaggacttcaaaaaggggggtatgcagtggtcagtgataatggaatacttgaaagaaatcccctcactccaggaactagtgctcagctggtggaactaatagccctccctcgggcactagaattaggagaaggaaaaaggggctcatcagaatctatatgcttcctctcattcttagtgccccctatgaccatctacactgaacaggatttatacaatcatgtcgtacctaagccccgcaacaaaagagtacccattcttacttttgttgtgggagcaggagggttaggcggattaggtactggcattggcggtatcacaacctctactcagttctactacaaactatctcaagaactaaatggtgacatggaatgggttgctgactccctagtcaccttgcaagatcaacttaactccctagtagcagtagttcttcaaaatcgaagagctttagacttgctaaccgccaaaagagggggaacctgtctatttttaggggaagaatgctgttattatgttaatcaatccggaatcgtcacagagaaagttaaagaaattagagatcaaatacaacgcagagcagaggagcttcaaaacaccggaccctggggccttgtcagccaatggatgccctggattctccccttcttaggacctctagcagctataatattgttattcctctttggaccctgtatctttaacctccttgttaagtttgtctcttccaaaattgaagctgtaaagctacaaatcattcttcaaatggagccccagatgcagtccatgactaagatctaccgcggatccctggaccagcctgctagcccatgctccgatgttaatgacatcgaaggcactcctcccgaggaaatctcaaatgcacaacccctactatgccccaattaagcaggaagcagttggagcagtcgacggccaacctccccaacagcacttgggttttcctgttgagagggggtactgagagacaggactagctggatttcctaggccgactaacaatttctaagcttagg

SEQ ID NO: 142529 - DNA, 2224 bp, Homo sapiens
  misc_feature (1)...(2224): n = a,t,c or g
atgcagtccatgactaagatgtactgtggacccctggaccagcctgctagcccatgctccaatgttgatgacatcgaaggtactaatgcttcagactttcctttcctatcccaagtattagagcaagttgtatctccaaagggatctaaggaagctcaatgctgcgtcctcaggcctctaggctgtgaatccaacttgaagcaaattaaaatagacctaggtaaattctcagatacccctgatggctatattgatgttttacaaggagaggacattctagcaaaagcaggggccattagacacctgaacataggagaaggaacacacgtttgttgtcccctacttgaggaaggaattaatcctgaagtctgggcaacagaaggaaaatatggacgagcaaagaatgctcatcccattcaagttaaactaaaggattctgcctcctttccctaccaaaggcagtacccacttagacccgaggcccagcaaggactccaaaagattgttaaggacctaaaagcccaaggcctagtaaaaccatgcagtagcccctgcaatactccaattttaggagtacagaaacccaatggacaatggaggttagtgcaagatctcaggattatcaatgaggccattgtccctctatacccagctgtacctaacccttatactccactttcccaaatactagaggaagcagagtggtttacagtcctggaccttagggatgcttttttctgcatccctgtacatcctgactctcaattcttatttgcctttgaagatcctttgaacccaatgtctcaactcacctggactgttttaccccaagggttcagggatagcccctatctgtttggccaggcattagcccaagacttgagccagttctcatacttggacactcatgtcctttggtacatggatgatttacttctagctgcccgttcagaaaccttgtgccatcaagccacccaagcgcttttaaacttcctcgccacttgtggctacaaggtttccaaaccaaaggctcagctctgcttacagcaggttaaacacttacggctaaaattatccaaaggcaccagggccctcagtgaggaacgtatccagcctatatcggcttatcctcatcccaaaaccctgaagcaattaagaatgttccttggcataacaggcttctgccaaatatggattaacaggtatggcaaaatagccaggccattatacacactaattaaggaaactcagaaagccaatacccatttagtccgaaggaccagcttgcaacccgtggcatacctgagtaaggaaactgggaccagcttgcaacccgtggcatacctgagtaaggaaattgatgtagtggcaaagcgttggcctcactgtttacgggtagtggcagcaatagcagtcttagtatctaaagcagttaaaatgatacaaggaagagctcttactgtgtggacatctcatgatgtgaacagcatactcactgctaaaggggacttgtggctgtcagacaaccacaatgaagaaaaaatagaacataactggcaacaagtaattgctcaaacctatgccgctcaaggggaccttttagaggttcccttgactgatcccgacctcaacttgtatactgatggaagctcctttgtagaaaaaggacttcgaaaggcggcttacgcagtgttcagtgataatggaatacttgaaagtaatcccctcactccaggaactagcactcagctggcagaactaatagccgtcactcaggcactagaattagaaggaaaaagggaacccgaaaatccagcagacaatgctagctattcctgtgaacctctagaggatctgcgcctgctcttcaggcgacaaccaatcgaagctgtaaaactacaaatggttcttcaaatggagccccagatgcagtccatgactaagatctaccgcggacccctggactggcctgctagcccatgctccaatgttgatgacattgaaggcacccctcccaaggaaatctcaactgcacgacccctactatgccccaattnnnnnnnnnnnnnnnnnnnnnnnnnnnnnnnnnnnnnnnnnnnnnnnnnnnnnnnnnnnnnnnnnnnnnnnnnnnnnnnnnnacaggactagctggatttcctaggctgactaagaattcctaggcctagctgggaaaggtgaccacacctacctttaaacacagggc

SEQ ID NO: 142530 - DNA, 1666 bp, Homo sapiens
atggggaacatcactgcagacaactcctcgatgagctgtaccatcgaccataccatccaccagacgctggccccggtggtctatgttaccgtgctggtggtgggcttcccggccaactgcctgtccctctacttcggctacctgcagatcaaggcccggaacgagctgggcgtgtacctgtgcaacctgacggtggccgacctcttctacatctgctcgctgcccttctggctgcagtacgtgctgcagcacgacaactggtctcacggcgacctgtcctgccaggtgtgcggcatcctcctgtacgagaacatctacatcagcgtgggcttcctctgctgcatctccgtggaccgctacctggctgtggcccatcccttccgcttccaccagttccggaccctgaaggcggccgtcggcgtcagcgtggtcatctgggccaaggagctgctgaccagcatctacttcctgatgcacgaggaggtcatcgaggacgagaaccagcaccgcgtgtgctttgagcactaccccatccaggcatggcagcgcgccatcaactactaccgcttcctggtgggcttcctcttccccatctgcctgctgctggcgtcctaccagggcatcctgcgcgccgtgcgccggagccacggcacccagaagagccgcaaggaccagatccagcggctggtgctcagcaccgtggtcatcttcctggcctgcttcctgccctaccacgtgttgctgctggtgcgcaggtactgggaggccagctgcgacttcgccaagggcgttttcaacgcctaccacttctccctcctgctcaccagcttcaactgcgtcgccgaccccgtgctctactgcttcgtcagcgagaccacccaccgggacctggcccgcctccgcggggcctgcctggccttcctcacctgctccaggaccggccgggccagggaggcctacccgctgggtgcccccgaggcctccgggaaaagcggggcccaggaggaggaagtgaccaagtttgaaggcggcagaaatggccacacagccaagaagagcccatgcaactcagtccaggattttactggaatcaaagctgtaaaactacaaatagttcttcaaatggagccccagatgcagtccataacttaagatctacagcagacccctagaccggcctgctagcccatgctccgatgttaatgacatcgaaggcacccctcccgaggaaatctcaaccgcacaacccctactacgccccagttcagcaggaagcagttagaggcagtcgtcgatcaacctccccaacagcacttggggttttcctgttgagagtggggactgagagacaggactagctggatttcctaggctgactaagaatccctaagcctagctgggaaggtgacggcatccacctttaaacacggggcttgcaacttagctcacacccgaccaatcagggagtaaagacagctcactaaaatgctaattaggctaaaacaggaggtaaagaaatagccaatcatctatcgcctgagagcacagcaggagggacaatgatcgggatataaacccaagtcttcgagccggcagtggctacccgctttgggtcccctctgtttgtatgggagctctgttttcactctattaaatcttcaactgc

SEQ ID NO: 142531 - DNA, 720 bp, Homo sapiens
atggtggagatggtagagcttgtggtgatggtgcttgtggaggaggcggtgatgaccacgctgacacatcttcccatgagtgggaactgcgggttcaccctcgtctttgtcgtccagcatgtggccctcggggagcagcctttcctcacagtcacccgcttccctctgggccttgaccctgctactgccgagaaggctacgtgctcaccaaaaatgctccctgatgcccccaacgcctctcctatgtccaaggaaatacttctgcagagcacgttagagtttccaatgcatgtgtgttatctcagagacaaagggcagaaaggggaaaaaacagaaagtacagtacgagaaggcttcctgcaggacaggatgtctcagctgagaccttcggaatgcctcggattcaaccagcagaagggagaaactgaaatggcatgggaacctagccagactcaggcctcagaagcagcagacacagagacgggtcgcagctcctcgccagcagcagaacaaagctggacaaagaatgactttgacaagctgacagaagtagacttcagaagccctgttaatacattggctgttcaggaccctttccccagagccccaggctgggttctggcacgaaggcccacacccacaatggaaaggctcgaggtattggaaatgctaaggctcacacagaccatggagcccagcgacctggagcagctgtcgtag

SEQ ID NO: 142532 - DNA, 774 bp, Homo sapiens
agcacaagaagaagaagctaaggtaaatgaaattgcctttataaatacccttgaagcccagaataaacgtcatgatgttttatcaaaattgaaggaatatgaacagaggcttaatgagctacaggaagagcgtcagagaagacaggaagaaaagcaagcacgtgatgaagctgtgcaggaacgcaagagagctctagaggcagagcggcaggcccgtgtagaagaattgttaatgaagaggaaagaacaagaagcccgaattgaacaacagaggcaagaaaaggaaaaagcccgtgagggtgcagcccgggaaagagctagagacagggaagaacgattggcagcactcacagctgctcaaccaagaagctatggaagagttacagaaaaaaattcagctcaagcatgatgaaagtattcgaaggcacatggaacagattgaacaaagaaaagaaaaagctgctgagctaagcagtgggcgacatgcaaatactgattatgcccccaaactgacccctttatgaaagaaagaagcagtgttctctctgcaatgtcctgatctcttcagaggtatatctttttagccatgttaaagggagaaaacaccagcaagccgtgagagagaataccagcatccaggggcgtgaactgtcagatgaagaagtggagcatctttccttgaagaagtacattattgacattgtggttgaaagtacagctccagcagaagctttgaaatatggagaagagcggcaaaaaaaaaaaaagtcgacc

SEQ ID NO: 142533 - DNA, 678 bp, Homo sapiens; identical to SEQ ID NO: 121908

SEQ ID NO: 142534 - DNA, 399 bp, Homo sapiens
atgcacgtgcatgtttacagcagcacacttcacgattgcaatgacatgaaaacaaaaatggaacatgacaatgcagatcccagtccttacataccagagctcttcttccgcttcatcgcaagtgtagccaccacagctcaagtaaccacatctccaatgaaatttgatagtgcataccagagtatcttagtttttaatctccctaaaaccctcacccagtgcctgagagcgctcaatcagaatgcgagagcagcgcggcggcgcccccgtgtggccacagggacgaggacagaggaccggaccccgctcccctttctcaccaaccaggacctccgaggctctccctctgctcccagcacctggacagggctctgcactcaaggagcctccgggtctcaa

SEQ ID NO: 142535 - DNA, 660 bp, Homo sapiens
caggagctgccatgccaggcccaggggccctggggtcatgggcagagagcaggtccctctgctggcagccaaggagatgttgttcttggagggtcaaagacttacttagctgggagtctgaaggtggtcatgggttacaaaggggttacaaagagctcagcgatacattcccttgattttggaattcccatcctcgacaaccatgagccaattaaatttgtgttcattactccagtgcctgatcatctgaggtggaacagtttcatcccgaaacccatccccgcctacctgtgccgcctgccctggtcagtggaaaagttttattccatgaaaccagtacttggtgccaaatatgttgaggtgcatcttggaatgggagactggagggacccatggatcccaaccctggacctggttcccccagtacaatccatgagccagttgaatctgaatgcgaagatggaacgacgactgaccagagtcatgctgacatcaacccccataacatggggactgatcaagaaaaccacacaggaagctgagaaactgctggagtgccagggtgtcaccttttgctggaactcagaagtacaatcgatgtttaacggaccagtgctttctgactcagctcctctctaccctgaatacaagagaccctaa

SEQ ID NO: 142536 - DNA, 1773 bp, Homo sapiens
atgcacgtgcatgtttacagcagcacacttcacgattgcaatgacatgaaaacaaaaatggaacatgacaatgcagatcccagtccttacataccagagctcttcttccgcttcatcgcaagtgtagccaccacagctcaagttggattctataagaaccgcattcgcgccctcacccagtgcctgagagcgctcaatcagaatgcgagagcagcgcggcggcgcccccgtgtggccacagggacgaggacagaggaccggaccccgctcccctttctcaccaaccaggacctccgaggctctccctctgctcccagcacctggacagggctctgcactcaaggagcctccgggtctcaacaggagctgccatgccaggcccaggggccctggggtcatgggcagagagcaggtccctctgctggcagccaaggagatgttgttcttggagggtcaaagacttacttagctgggagtctgaaggtggtcatgggttacaaaggggttacaaagagctcagcgatacattcccttgattttggaattcccatcctcgacaaccatgagccaattaaatttgtgttcattgtgcatcttggaatgggagactggagggacccatggatcccaaccctggacctggttcccccagtacaatccatgagccagttgaatctgaatgcgaagatggaacgacgactgaccagagtcatgctgacatcaacccccataacatggggactgatcaagaaaaccacacaggaagctgagaaactgctggagtgccaggggtatctggcagataaaatttctaagcagcaaagcattcaaagagtgacttgggtgctcctaaaagcattccattttcaaagggaaacagagcataaaagttcagaaaatttacagcctgacaatgcagtagaaaagaaaaacccattttttgaggagaaactcaagctggctgcagaaatttgcataagtaacaacaagccaagtgttgatccccaagacaagggggaaaatgtctccagggcatgccataggtcttcatggcagcccctctcatcacagacccagaagcataggaggaaaaaatggtttcatgggcagggcccagggtccccatgctatgtacagcctagggacttggtgccctgcatcccagatgctcccactgttgctaaaaggggccaaggtgcacagaagtcaagaatggaggtttgggaacctccacctagatttcagaagatgtatggaaatgctaggatgcccaggcaaaagtttgctgcaggggcagggccctcatggagaacctctgctagggcaatgtggaagggaaacgtggggctggagcccccacacagagtccctactggggcactgcctagtggagctgtaagaagagggccaccgtgttccagaccccaaaatggtagatccaccaacagtttgcactgtgcatctggaaaagtcacagacactcagcgccagactgtgaaagcagccaggagggaacatataccctgcaaagccacaggggcagagctgcccaagatatggggacctacctcttgcatcagcatgacctggatggccactagagggctccttggtctggcggtaacgccagtgcctgagaaggcacccatcactcagcagatcgggaaagggagtctccctttgcccgggggagttagagaagcctctgctccaccacctcttgtggaaggcccgacatcagtcaagcccgcccacagccatctggaggactaa

SEQ ID NO: 142537 - DNA, 246 bp, Homo sapiens
aactgcttaacaaaatcccaagctcagggcttctcagcatttacctaatttctgaaaggctcttctgaaagaattgagctgcagaaagtgcaagacatgccaatttgagacacacggtcttctaagactgaaggataaatttaatgcatttcagaaactaaacatcacagcaagctctatctctgagctataatttgtttttaatgcaaagacactagtttgataatatatactgtaatcctgaaa

SEQ ID NO: 142538 - DNA, 445 bp, Homo sapiens
tttttttttacattgggatgctttttgataacttgactcctttcttggccagctgaaactcgtcgcacagggcagaaaataaaccagctctccacaagagttcctctctaaacttctccatgggcaaggtccggagttctttcagaagagcctttcagaaattaggtaaatgctgagaagcccctgagcttgggattttgttaagcagttgccaggggacactctcagtaaagaaatggtgagtgatccggaagcttgaaagccgtgtcacaatgttgtaggctgcccggcaccttcaatttttattctcaaagttttcagtcttgcagagatttgagatccatgtaaaaaggcagtaaaaacgtgacttcactttgagaaatagtcattcttgaatttcacactccctatcttcactccaattttttaaaagagtttctgactg

SEQ ID NO: 142539 - DNA, 5877 bp, Homo sapiens
  misc_feature (1)...(5877): n = a,t,c or g
ttttttttttttgatttgagtattttatttataaatgtacatttactataaaagctgttgcattttagacaacttgttgtttttattttttactgtttctcagaggcattttagaataaatactttaaatgaaagttagtataaccgatatagaagcactggcccacccagagcagtaacatcttttgggacgggactcacatatgagggtgggatcatttcagtttgttaaatcttacactgcgtataggataacctataatatggtattgcattaatcacactacatgggaaggggaattgcatgggggaaggtccgcttaggtggaaaaaaccaaaagggttacccattatttttattaaagagtagggactagcttttgggagtatgagaaaaaaaaatcagatattcttcctcaggaacaataaatcactcacttgcctcccctgctcttttaaacaaacacatttacattatagctcaatggagcagagcattttttttttcctgggatctcaaagattatttgaaaagaaatagatcatactcattatgctgcattggaaaaaacaagatctagtctgcctaagctagccatgtaacagactccaaatgaaatataaatcaaattataaatagaaaccagttggcaattggaatttagaaaatgttggagattattctgtgctggtgactagtgttcattatgggaaagcacattttgcagttggagaatggggctttatttttcttgactcggattctagcttcaatacatgtacaatgagcctcactaagaaatatgtataaatgggtttgtgaaaccagaagggaatgtgcaatattcatgtaatccttacataacggatggagttgccacatgtaaaaaagtaatcctataaaaatcggttatgaatgacccatattgtacatgtttgtgccattacctagtggtactctgcctaatatcatgcaaagtgtaaacatcccacattatcaaaatatttaataaaacatgcaggtggataatcaaaatattggacttgatctgtacattttcaaaacaatttttctttttaattttttttctttttttcttttttttatttttattttttcctgtaaaacagcaaacacctccattgagaagtcttggaaacttggggaagtgactccatctctcctccaatggtactggcatcccataattttatcggccatgtgcaaacagctttgcgttttcctaaggcacaaatttttaatgaaatgatgtgtagatttcaatcctaataacagctcatccaaatgacaaatatgggtcgaaaatccctccagtgggctgagggaaatttctggcaccctatatgggaacccacatggcaaaggaacccatctaggcatggtaataaataatccgctagcccatactcaataaggacacggggaaaaattattgctttaccataacaggaaaaacatcttctttggccccccctttttatggacctaccatccaatctatttagggagtgttatcccctgggtcttaccatttccaccaaaatggtccatcttggacttatttggccattggatttaagggcagaataaataggtcccccatatcaccagtctttaacaaccaaaaacaaaaaaccagcctggaggatctacattgtgatgctttttaataacttgactcctttcttggccagctgaaactcgtcgcacagggcagaaaataacccagctttccaacaagagttcctctctaaacttctccatgggcaaggtccggagttcttgatagcaaaaaaagtgatggagaatggaggagagtaggtattcattgaagtgggcagggcataatctgtgctgtaggttcttggctggatcaacagacccaggggctgaccacatcatataccacatagattctattaagatggacttaacgcttttcctttgggaaaaccctgtgccttccaggccccttaanggaagaaacttggcccagccaaggggtgagcagtgcctcaacaccctaaatgaatgaacttatcctcgggtgccctcatcctccccaaataccctccatgttaagtctccttattgaagactccctaatcctagtgccctcgagagaagcaggccaacagaggcctgatgtctgacattgactctttggaagattaaacttccctcacagattttgataatgactttggaaatgatgactgaaatatttccctctgctttcttcctacctttgggcaacgtcccggagtgtaaatctagctgatattgcaaggttttgctttatttgatgaaccagcctatattaatgacataacttccaaggtacacagaacctaatacctaacggtgccaataatttaattggtataatttcctacctccaaaggtaagtaacacaaatgtttcaggattacagtatatattatccaaactagtgtctttgccattaaaaacaaattatagctcagagatagagcttgctggtgatgtttagtttctgaaatggcattaaatttatccttcagtcttagaagaccgtgtgtcctccaaatgggcatgtccttgcactttcctgcagctcaattctgtaaacataaaggtgtttaattcctagacattcctaaaacaaaacaggtttattgccatcatttagctaattcccaaagaagagaataacacattttaaaccataagcctgtttgaccatgctaaaaccttttttgagctattcaggatcattacaaccccatattcttttgtgtatactgtgcaaatgcaaaaaaaaaaaaaaaaccaaaacaataaacaggaaaaacataaacactgtgctacgaaagaacagataccacctttcagaagagcctttcagaaattaggtaaatgctgagaagcccctgagcttgggattttgttaagcagttgccaggggacactctcagtaaagaaatgagtgagtgatccggaagcttgaaagcccgtgtcacaatgttgtaggctgcccggcacttctggatcgcatgtagcaatcattacagttcaggagaccatttcgaatcctaacattccgtcacactcactgcatctccaagctggccctttaacaaattcccacacctgaaaacactggaatgtgaaaaataagaagattgagggtcctcgatgatcattgaaagctccctttacccaaaagaaagcccaacaggaaaaacaacagcttctttcccacttaatagacttccgcctttgcactgggagactcgaatctgatggttaaatgcttttattccagcgggaagggtttttggcttcacatcttctgaactgtgccgttggatttgatgtcctgactgattcctgggatggatccctgaagcaagctgtgggtttgttccacagtgtgggggccccagcctcggtatccagctgatggtccttcatggactcctttttgatacagggttcccagaatgagccaaggccccttcagttaggctgcccttctacctaccagtcgatcactttccctaggtcttcagcaataagtcactgtcatctccctggaatgatttcttccatcttctgtcttgtttttcagtcttgacagtttcccaggtctatcttattcattgtcccactgccttcagtcatggaggaaagaggtagacaagctggtcagcggaacttgaaagaaacagtaaatggaaccacagggtcttcaaataatctaaggctcctcctcatagtatctgcgttcttcctcttccacctccttttgggccttttcccaactcttctttcaggcttgtcctgctccttcttggtatctctcctggagcaaacgttcctgttcctgttgccatttttcctgtcgcctgcgctcctcttctgggtcccatgcccagaacttaaaaggtgtcgtaacaggtgacttctcactgcttggagaatccacttgagaattgagatttggcaaatgtagttggttggcttcaggcattttgtccagaaatggaaatgtcagcgttgcttcgggttctggagattttggctttaccaccttttgtgacagcaccaactccacctttccactcatttcattttctggtttcttctggtctttttcttccgacacatcattcttcagctgggggctggagggaaattccacaaaggccacggtcgggctgcatcgagtcacagttgttgtaaaatgctgtggttctgatgaggcaagttctatattcccttttcttgattttccaccatcattcttgtcctcttgactattcggttccgttttctcagtggttgctgcgagctcttgggaaacagagttgggcttctttatgttgatctcgatgctaccgttgtcttgtttcagctccagtggagacccgtgcactctggccacaccttcaaacatttgggatttggttaaggagtgggcaggtgccaccgtgggacactctctttccttctcctcctctctatgaaccgtctctccattcacactgactttcccgtctaccttaaaggtcttcagaacatcttgagaatttttgggctgggagtaaggcctgggtgtcaagcataggcacttgcttttgggaagtgacaagttttgcttggagaccccacttgcctgcttgacatgctggtatcccagaacactggcacgagcaatggtggtttcaacagtggcagtgaatttgggtggaggcagtgactgttgccgcaggtatttcatgggattggggtcattcaggaaggaggataaatttggctctgttgaatggcttctttccagaatttttggcatctccaagcgttcgagaacagcctcactgatggtgaacctctcaatgtactgttgaaggatcccctctgcctcctcctgggaccgagcgttcttatatgcttcatgcagctctctctctctccgctctttttcttgaacaatttctctgtaggttttgatgcttttccttcgttcacttgtcccatcttctccagccagtaacttctccatttttttcctttcttcctctttcttgattaagtcctgagaaacacttcttctacgactcttccaacgagccaggtcatcttgccatttgtcgtcctcttccctcagctggttatttatcagctgcagctgctcctggcgggccctgctgtgcggctgcaccgcggcctcctcctcacaccgcatgtcaaacatgctggtgctctctgcgtcattcagacacaggaagttctcggaccgtaatcttgaagggccttcttccccaacccagcgggggaggtggcgggtaacttccaagcttcttgcggtattcctctcttctctgctttcttctttctcagaggcgcggggacgtaggccggtctgattgcttttgttcgggaggtactggttaaaaggcactgctgatttcggctcaccatgggaagtccgccgtgcagacatgtcatccttcttcacatctggcagcttccgatgaggcaagtcggattcagagtcgcttcctctcccatcgctgcttcccctgaggactacatctggtgaaggcgtctgccgacgagcgagagccaaaggaatccaggctgtcgaaggaatcatctctgccgtggcgaggaggagagagggagtcgctgcgctcggaatcccagcagtcgatgtagccactgtctcggatactgcgtttaggactttcaatgtcatcagtgtcctttcgcatctgagccaacaatccttcaaactccttcaggtttagtgtcgttccgctgtaggatgtgcagctgtttgctgcttttcccagccagtaaatggtaac

SEQ ID NO: 142540 - DNA, 1206 bp, Homo sapiens
atggaatgggaggattgccgagcagggttgagagccctgctggactgcacgctgaagatttgtagtggaaccagcctgcagttgcatgtgttctcgggcactcagcagctggggatgagagaggagaaggcagatgggcagttggtccatgagtggacggcgatgccaaaagacttttcccgcctccaggccaacgtggactccaaaggaaaagaaccttgtaaatatgatggcataccccctaaaacacaggattctgtttattatgccaaagaagaaaagaagaaaacattggcagaacctttagtccaaaggggtgcagaaggtgacgtgtataaagcaccgactcctagcaaggaaacccaaggggcgctggacgtcaaagaggagcacaatgtgcagctggaggtgcctgtggaccagtcatggaccgggtgggtggctgcatccgagtgggccaagcctggagaacttgcgcgacgtggctggctgcctggccccactctgcgcctggcccgtgctgcctgctggcacgtcttggctctgcgtcagggtgactggcatacccatggacacagggaagtcaggaaacaggaggcgccagggcctccatcagtaggttacctgagtggctgtgtggacgggacaccccctggccagctggacgcatgtgcagcacccacaccgcatcttctcttcctttgcagtcaggaaacaggaggcgccggggcctccatcagtgggtttcctgagtggctgtgtggacgggactcctcccggccagctgccatgcatgtgcagcacgcatacttgagacaagctgagatagttaaagaagatgaagagatacatgagaacacccctgattttgagggcaacaaggataaagaagatgcaaggctttgtgaagacgttgaaagaaagcagcatgtggagacccacactgtaaacttttgctccaagaactaccgcaggaacataccaggaaagccaagagaatccacagaccctttgaaggaggtggattgctgctacagtctctgtgggacagccgaggaactgacgaggcctgcagaaaaggttacctggaggacagaggcaggtacagccatgaacaatgacactcaaggacttcagaaagaccaacccaaggcctctgtcctacttgaattgggggacaaggggctgtccaaaggccagaactga

SEQ ID NO: 142541 - DNA, 716 bp, Homo sapiens
  misc_feature (1)...(716): n = a,t,c or g
tttcgtgtgcattgtgggagaacgaaagatggcggcgcccgtaaggcggacgctgttaggggtggcggggggttggcggcggttcgagaggctctgggccggcagtctaagctctcgcagccgtggctcttgcagccgcaccctcactgcaacggatccccatggcgcttgttgggcgcgttgtgcctgcagcggccacctgtagtctccaagcccgttgaccccattgcaggaagagatggcgtctctactgcagcagattgagatagagagaagccctgtattcagaccacgagcttcgtgccnctggatgaaaaccagcgactggcaaagaagaaagctgacccttcatgatgaagaagaatgaacaggatatattgctggcgcaagattttggaagatatttgggaggcagaaatttctacagttcaaaacttggagctccgcaataacagaagctgattgaaaagaatgacccgaacatccctgaacaagaagctataacgggaaccttgtcctgttagtcagagagaagtttggagaccaggatgtttggatactgccccaggcagagtggcagcctgggggagacccttcgaggaacagctgaacgaaccctggccacactctcaggttttatcgaatctccgtgtcttgcaattacctctaatttcattgccttcattgcgaagaagagcgcttttccctgcagctaa

SEQ ID NO: 142542 - DNA, 1613 bp, Homo sapiens
atgggaattccaacccagtgtctcctgagcccacagacctctttctacacccttctgaagaggacctgccacatgctagcttctaggctggctgttggggaaggtacaatcaaggctctaacctgccttcttacagctctgaggctgctgccccattggaagattactccccaggcttcccttgccccaagcagtgagctgactggaatggtaccccgggaggcccctgagtctgctcagtgcctgtgcccttccctcaccatcccaaatgccaaggatgtgcttcggaagaggcacaagagaaggagccgacagcaccagcggttcatggcccggaaggccttgctgcaggagcaggggctgctgagcatgcctccagaaccagggtcctccccactgcccacccctttcggggcagcgacagcaactgaagctgccagcagtgggaagcagtgtctgagggctggatctggcagtgccccatgcagcagaaggcctgctcccgggaaagcctcagggcccttgcccagcaagtgtgtggctatcgactgtgagatggtgggcacgggaccccgagggcgggtaagcgagctggcccgctgttccattgtgagctaccatggcaatgtcctctatgacaagtacatcaggcctgagatgcccatcgctgactaccgtacccgctggagtggcatcactcggcagcacatgcgcaaggctgtccccttccaggtggcccagaaagaggttggtgatgatgatgatgatgatgggggtgttgttgctggtggtgtaatatttaggattgagatagagagaagcctgtattcagaccacgagcttcgtgctctggatgaaaaccagcgactggcaaagaagaaagctgaccttcatgatgaagaagatgaacaggatatattgctggcgcaagatttggaagatatgtgggagcagaaatttctacagttcaaacttgggagctcgcataacagaagctgatgaaaagaatgacccgaacattcccttgaacagggaagcttagacagggaacctttgtcctgttagtcagagagaagtttggagacccaggatgtttggattacctcccccaggcagagtggccagcctgggggaagaccctttcgaggaacaagctgaaacgaaccccctggcccacactcctcagaaaaacaacatggaaagcccaagttccctaggaaaatgccacccctgtgggcacctacacattccaagttcccccccagggcaatgcggacagagagtaaccctcggagcccaaggtgttccttccttcaaagcactgctattaactggagacttttccccaggctgggaattaagggccatcatgtgtggggtcactaagggatgaagctggggtgactattttgaaacccaaaatacctggcccaagtttagggaggtttgtttcagacctctgatggggccgagttgcctgttggacggtgctcagacaagtttgggattagagcctcaaggacattgtgtgattgcctcacatttgcaggtaatatcaagcagcaaactaaattttgagaaataaacgagtctatttctgaaaaaaaaaaaaa

SEQ ID NO: 142543 - DNA, 1686 bp, Homo sapiens
gttaggtaatgggaccgaccttatggggccttaataggctgcagtgtgttggactcggctcctctcaatgattgtatgtctcccactggagactttatggcagcttcccatgtggaccgccttggaatttatctatggtgcaatatttccctgtattcagttgtttcagtacggccacttcctgcagattatgtcccttcaatagtcatgcttcgtggtacttgtcaaacccaagatgtagaagtttcagaagaaacagtagaaccaagtgatgaattgatagaatatgattcgccagaacagttgaatgagcaattggtgactctttcacttcttcctgaatcgcgatggaaaaaccttcttaaccttgatgttattaagagggccctagaactacgatacaatatcaatgtgcaaaaatcacaagcattcctgtacaccaacaacagacaaacagagagccaaatcatgagtgaactcccattcacaatggcttcaaagagaataaaatacctaggaatccaacttacaagggatgtgaaggacctcttcaaggagaactacaaaccactgctgaaggaaataaaagaggatacaaacaaatggaagaacattccatgctcatgggtaggaagaatcaatatcgtgaaaatggccatactgcccaaggtaatttacaggttcagtgccatccccatcaagctaccaatgactttcttcacagaattggaaaaaactactttaaagttcatatggaaccaaaaaagagcccgcatcgtcaagtcaatcctaagccaaaagaacaaagctggaggcaccacactacctgacttcaaactatactacaaggctacagtaaccaaaatagcatggtactggtaccaaaacagagatatagatcaatggaacagaacagagccctcagaaataatgccgcatatctacaactatctgatctttgacaaacctgagaaaaacaagcaatggggaaaggattccttatttaataaatggtgctgggaaaactggctagccatatgtagaaagctgaaactggatcccttccttacaccttatacaaaaatcaattcaagatggattaaagacttaaacgttagacctaaaaccataaaaaccctagaagaaaacctaggcattaccattcaggacataggcatgggcaaggacttcatgtctaaaacaccaaaagcaatggcaacaaaacccaaaattgacaaatgggatctaatgaaactaaagagcttctgcacagcaaaagaaactaccatcagagtgaacaggcaacctacaaaatgggagaaaatttttgcaacctactcatctgacaaagggctaatatccagaatctacaatgaactcaaacaaatttacaagaaaaaaacaaacaaccccatcaaaaagtgggcaaaggacatgaacagacacttctcaaaagaagacatttatgcagccaaaaaacacatgaaaaaatgctcaccatcactggccatcagagaaatgcaaatcaaaaccacaatgagataccatctcccaccagttagaatggcaatcattaaaaagtcaggaaacaacaggtgctggagaggatgtggagaaataggaacacttttacactgttggagggactgtaaactagttcaaccattgcggaagacagtatggtga

SEQ ID NO: 142544 - DNA, 430 bp, Homo sapiens
agctctggcagaggactgttccactagacacgctgaagggactggtgtacgtgttttccttcaggaccagagctgagaggagctgggatcgcggcggcaatggaacgggcctcagaaaggcgcacggccagcgcgctttttgcggggttccgggccttgggacttttcagcaacgacattccacacgtggtgcggttcagcgcgctcaagcgccggttctatgtaacaacctgcgtgggcaagagtttccacacctatgacgttcagaaacttagtctggttgcagtaagtaattctgttccacaggatatctgctgtatggcagctgatggcagattagtctttgctgcttatggaaatgttttctctgcatttgcccgtaataaagagatagtacatacctttaagggtcataaggcagaaatccatc

SEQ ID NO: 142545 - DNA, 830 bp, Homo sapiens
atgcttcctggtacttgtcaaacccaagatgtagaagtatcagaagaaacagtagaaccaagtgatgaattgatagaatatgattcgccagaacagttgaatgagcaattggtgactctttcacttcttcctgaatcacgatggaaaaaccttcttaaccttgatgttattaaggttcagaaacttagtctggttgcagtaagtaattctgttccacaggatatctgctgtatggcagctgatggcagattagtctttgctgcttatggaaatgttttctctgcatttgcccgtaataaagagaaaaagaataaaccaaaggaaccacccaaagtacccaaatcagcaccatttttcattccaacaattcctggccttgtacccagatatgctgcacctgaacaaaataatgatccccagcagtctaaagtggtaaatcttggagttttggctcaaaaatcagatttctgcttgaaacttggaaggaaggactgggtaaataataagtatggacactggctcttcaaccttctggaaagaatcagggcccatcagggaatttgaaacagagctggcgaagcttgtctcctgattgtggtgggtccatagaagttatgcagagcttcttgaaaatgattgggatgatgctggacagaaagcgtgattttgagttagcccaggcataccttgcattgtttctaaagaaattgctacagccaccccacctttcagcaaccaccaccctaatcagtcagcagccatcaacatcaaagccagaccttccaccagcaaaaaagttacaatttgctgaaggtttggatgattcttag

SEQ ID NO: 142546 - DNA, 1449 bp, Homo sapiens
ttaagacttgattgtgaccgttgctctccagtggacccatttatctccttctttgtgaggcagaggggagcctctgttagcccttggcttctgtaacaggcaaactgaggccagcccctcttgaaggcagtccttgaactctgccctaggtgggatggttgcctcattaccagtcaagtaatgttgcacctcagagtatttgtgcaatacagccacttcccacaaacttcggatttcaaagtgctttgtaggctcctcccccagcactgaaacaattctcttcatcctttttttcccctcttcttccctctggaaccacagacagggagactgagggtaggagatgcagctcccaacagctgtacctccagagattccaatttggttggcctgtagtagggcctgggcatctggatttttaaaactccccaggttgataatgtgtagccagaggttgagttgcaggccctgaggctttgagcctcccgcaaagccgagtgagttgagagcgcctggaaggcagacgctgcggagggagggactcccgggctcgccaaacagcggggcctcgggcaagagcgtcgctggcgcgtcctcattctgcgattgtataccttcctcctcctcctctgccttggctaatgtgccctgttgcacagtcttccccaacactgtgtccagcacccatacaggagttatactcacaggatggcaagctgtaggtggaagtgggggcattgtcacagtgggataaagatgtacagtatcccctggtactccacacccatggaaggaaaagcgcttggagatgcacatcctcagatagcccacagtcattagggagcagcctttctgtgagctctctattgagagaaatcttgatccatggcaaaccgtctgtggtattctcggctgtagcccttggcgggagatgggaggagggaatgacagtgccaaggaggcagctgaaggatcgtcaccctgggagccacagctctggcttccttttgccaatgggccataaagactcgctttggagccgccgcggccaacaggagtgggcaaaggacgctgccagtgcctgagtgatacgggaaataaggaataggggattcgggtgcaccttgccactgccacgggcataaggggaggggtgtgaaatgtgtgacttgtccagagaggccagcattccagggacagggattgttgccgtctcccattcccggcttcctcctcagaattgtatcgtggtgtggcttcattgctcagagaagagccgtgcaggggtacaaccatcttcttggaggtgggtctgctcctctcatgatcgaggacttcacaaacccaaagtggaaccgccgtgaaaatgacggacaaccggccaggggacccaggcagagacacagaaagaggctcaacaaagactggccgatatgcaaaaatttgcat

SEQ ID NO: 142547 - DNA, 1896 bp, Homo sapiens; identical to SEQ ID NO: 117246

SEQ ID NO: 142548 - DNA, 985 bp, Homo sapiens
tcaaacgtagtcactcagaggagttaagtcttcagcatttcctttgttgagtggattttggtcatagtcaacaggaaaaaaaacccctgcaaatggaaccagtccacctatccttccctgagagcaggaagaacgaggtgggggcatttctcccctgctccctctctgctgaggttcagttctggaggtagctgtggcctctggagcttcttttaaaaggcctcccttccatggtccctggtctccaaacactttttccatcccttgttcttgtagaccacagcctgttcgtacttctgcggctctgattggctcttcatcaacaattcttttattgaaagtctctgaaactctcaactcaatgtgctgtccatggtctccaagaatcctgactgatacatacagctgtcttcttattccgaatgtgaactccgtgagatcagaaatcctgtctatactgttcattttttcctctccagtcatcagaatggcaccagcacacagcacgacttcaggcagcctttgttgaatttgattcactagtctacttgtgcaccccaaaagtagcaactcaccaacgaaagcatcccaatattttggcaagcagtcacatctggcaatttcattaacccacaagtttttcacatttcccttcaagcagccttgcaacattatgggcttggctgaagcttgccaaaaaggaaacagctcaatcctatcccgggtaagcaagcaggtgtgctgataatacttaaaaggtgggaggagcaggggaggcagaattgtaatgctctcttgcttgggagcacttgtctcccagaggaagggttagatcactcagcaaaatatgaaaccagagagcagagtagttttgaaaagttaaaatatttagatatgaataattttcagaggaaagatagcagtaaaggttggaggggtggggatggtgcaagaagaaataaatcttatcaaaggcagccttggg

SEQ ID NO: 142549 - DNA, 1349 bp, Homo sapiens
atgaaccgcaccggggcatgtcgacttcaaggggctggtgggccgtccctgtccttggagactcctctctgcctcaattgctctgtcctccctggagacctgtacccagggggtgcaaggaaccccatggcttgcaatggcagtgcggccagggggcactttgaccctgaggacttgaacctgactgacgaggcactgagactcaagtacctggggccccagcagacagagctgttcatgcccatctgtgccacatacctgctgatcttcgtggtgggcgctgtgggcaatgggctgacctgtctggtcatcctgcgccacaaggccatgcgcacgcctaccaactactacctcttcagcctggccgtgtcggacctgctggtgctgctggtgggcctgcccctggagctctatgagatgtggcacaactaccccttcctgctgggcgttggtggctgctatttccgcacgctactgtttgagatggtctgcctggcctcagtgctcaacgtcactgccctgagcgtggaacgctatgtggccgtggtgcacccactccaggccaggtccatggtgacgcgggcccatgtgcgccgagtgcttggggccgtctggggtcttgccatgctctgctccctgcccaacaccagcctgcacggcatccggcagctgcacgtgccctgccggggcccagtgccagactcagctgtttgcatgctggtcccgccacgggccctctacaacatggtagtgcagaccaccgcgctgctcttcttctgcctgcccatggccatcatgagcgtgctctacctgctcattgggctgcgactgcggcgggagaggctgctgctcatgcaggaggccaagggcaggggctctgcagcagccaggtccagatacacctgcaggctccagcagcacgatcggggccggagacaagtgaccaagatgctgtttgtcctggtcgtggtgtttggcatctgctgggccccgttccacgccgaccgcgtcatgtggagcgtcgtgtcacagtggacagatggcctgcacctggccttccagcacgtgcacgtcatctccggcatcttcttctacctgggctcggcggccaaccccgtgctctatagcctcatgtccagccgcttccgagagaccttccaggaggccctgtgcctcggggcctgctgccatcgcctcagaccccgccacagctcccacagcctcagcaggatgaccacaggcagcaccctgtgtgatgtgggctccctgggcagctgggtccaccccctggctgggaacgatggcccagaggcgcagcaagagaccgatccatcctgagtggagcctta

SEQ ID NO: 142550 - DNA, 930 bp, Homo sapiens
tcatccacctgcaggacggaacagaggctctgttatgggacacggggtgtgccagggctcctgggtctcttccactgccctaggcgctccagatactccctcagcatatggatgatctggaacaagagggtgagctgagctgcctgggttcctagggaggcagacaggctgatgctgcttccagacttggccaggtgcaggggtgtgcgaccagctcggtccagggcatctacacgggcccctgcaggtaccagctgaggtgagcattctgggggtgagggggagaaagaggacagagaggggaagaaaccacatacctcctcgtagcagtgtggacttaagaatccaggaccaccagagcctggctctgcgtggccactggactgcactggaaacaggcaaacccaagaggagttgtcggaggcttccattgcctgcaccctgaacccctaaccgggatccgcgccatcttccagcagctgctgcactgacaccaccaagacagagggaggaagggggagaaagcggcgatgttagctaagctgcagacccgatgccagtttaaaaaaacagccatggctgggtgcggtggctcatgcctagggtatcttgcagcgcagctcgtcgcgcggctccgcatcctgctgccacaggacgtgcaagtagcgcagcggcgactgggccccgccggacgcccggcccgagaggcccgcgccgccgccgcccagcgcagacccgaagtcagcgaaggagaagaggccctcagcgtcagtcagcggctccggcgccaccgcgcactcgccctccgagctcgagtggcctgagcgcggctcgtcgtccgcgtccccggcggcggctgccatggcaacggctccgcgcgggcctggccgcctgagcctcgttcccgaccgaccaacggacctacttccc

SEQ ID NO: 142551 - DNA, 377 bp, Homo sapiens
gtcatctcacctaaagcacttttcactttatctctggcaaccaagggttacagaaaactcagcaccaaaggatgaaaggggaacttgtccccttcggtccccagccctgccctcccctgcagcctaaaataccctttctatgatcacagaacaaagttcacactcaccacacagccattctcacacacactcgcacaaaaagaaaaccaaagcccactaaagcacatggggaaaaaaagattacaaaacatcttcctccccatccggccttgagaccagactccctggctggagaggtcgtgacttccgccgtgcccaaaacagccagttcacgagggtccagggccgccgggggggcaccatgggcgtctctggga

SEQ ID NO: 142552 - DNA, 1008 bp, Homo sapiens
atggataaattcctggacacatacaccctcccaagactaaaccaggaagaagttgattctctgaatagaccaataacatgctctgaaattgaggcaataattaatagcctaccaaccaaaaaaagtccaggaccagacggattcacaaccgaattctaccagaggtacaaagaggagctggtaccattccttctgaaactattccaatcaatagaaaaagagggaatcctccctaactcattttatgaggccagtatcatcataataccaaagcctggcagagacacaacaaaaaaagagaattttagaccaatatccctgatgaatatcgatgcaaaagtcctcaataaaatactggcaaaccgaatccagcagcacatcgaaaagcatatccaccacgatcaagtgggcttcttccctgggatgcaaggctggttcaacacacacaaatcaataaacgtaatccatcacataaacagaaccaatgacaaaaactacatgattatctcaatagatgcagaaaaggcctttgacaaaattcaacagcccttattgctaaaaactctcaataaactaggtgttgacggaatgtatctgaaaataataagagctgtttatgacaaacccacagccaatatcatactgaatgggaaaaaagttaattcaagatggattaaagacttaaatgtcagacctaaaaccataaaatccctagaagaaaaccaagggaataccattcaggacataggcatgggcaaggacttcatgtctaaaacaccaaaagcaatggcaacaaaagccaaaattgacaaatgggatctaattaaaccaaagagcttctgcacagcaaaagaaactaccatcagagtgaacaggcaacctacagaatgggagaaaatttttgcaatctacccatctgacaaagggctaatatccagaatctacaaagaacgcaaacaagtttacaagaaaaaaacaaccccatcaaaaagtgggcaaaggatatga

SEQ ID NO: 142553 - DNA, 2169 bp, Homo sapiens
  misc_feature (1)...(2169): n = a,t,c or g
atggataaattccttgacacatacaccctcccaagattaaaccaggaagaagttgaatctctgaatagaccaataacagactttgaaattgaggcaataatcaatagcttaccaaccaaaaaaagtccaggaccagatggattcacagccgaattctaccagaggtacaaagaggagctggtaccattccttctgaaactattccaatcaatagaaaaagagggaatcctctctaactcattttatgaggccagcatcatcctgataccaaagcctggcagagacacaacaaaaaaagagaattttagaccaacatccttgatgaacatcgatgcaaaaatcctcaataaaatactggattcggcaaaccgaatccagcagcacatcaaaaagcttatccaacatgatcaagtgggcttcatccctgggttgcaaggctggttcaacatacgcaaatcaataaatgtaatccagcatataaacagaaccaaagacaaaaaccacatgattatctcaatagatgcagaaaaggcctttgacaaaactcaacaacccttcatgctaaaaactctcaataaattcggtgttgatgggacatatctcaaaataataagagctatctatgacaaacccacagccaatatcatattgaatgggccaaaactggaagcattccctttgaaaacgggcacaagacagggatgccctctctcaccactcctattcaacacagtgttggaagttctggccagggcaatcaggcaggagaaggaaataaaggcccaaaatctcctcaagctgataagcaacttcagcaaagtctcaggatacaaaatcaatgtacaaaaatcacaagcattcttatacaccaataacagacaaacaaagagccaaatcatgagtgaactcccattcacaattgcttcaaagagaataaaatacctaggaatccaacttacaagggatgtgaaggacctcttcaaggagaactacaaaccactgctcaatgaaataaaagaggatacaaatgaatggaagaacattccatgctcatgggtaggaagaatcaatatcatgaaaatggccatactgcccanagaattggaaaaaactgctttaaagttccaatggaaccaaaaaagagcccgtgtcgccaagtcaatcctaagccaaaagaacaaagctggaggcatcatgctacctgacttcaaactatactacaaggctacagtaaccaaaacagcatgtgtaacaggctctgggccagaaactctcaaaccaattgataataacaagctcaagttcaatgccattggctgtctgcagagccccagggtggacaaggagggccagctgtgtgcagcgtctgttgtgtacagcattcaggacaatgtcctcttggatcccgagctctccacacagacagagcagataaaggaagggcactgctgtgggaccgccttccccatgcccagcgagcctcttctgcatctctttctgctgtggcaaagtgggttaaacagcgcgcggatttgcgaggaacatagccaacaaatgagatatcaaacgcagcttcccatagaatactataagcgcgtgtgtgcaaataaactagaaaatctagaagaaatggataaattcctcgacacatacactctcccaagactaaaccaggaagaagttgagtctctgaatagaccaataacagactctgaaagtgaggcaataatcaatagcttaccaaccaaaaaaagtccaggaccagatggattcacagccaaattctaccagaggtacaaggaggaactggtaccattccttctgaaactattccaatcaatagaaaaagagggaatcctccctaactcattttatgaggccagcatcatcctgataccaaagcctggcagagacacaacaaaaaaagagaattttagaccaacatccttgatgaacatcgatgcaaaaaccctcaataaaatactggattcggcaaaccgaatccagcagcacatcaaaaagcttatccaacatgatcaagtgggcttcatccctgggttgcaaggctggttcaacatacgcaaatcaataaatgtaatccagcatataaacagaaccaaagacaaaaaccacgtgattatctcaatagatgcagaaaaggcgctttga

SEQ ID NO: 142554 - DNA, 1437 bp, Homo sapiens
atggaaactgaacaacctgctcctgagtactactgggtacataacgaaatgaaggcagaaataaagatgttctttgaaaccaacgagaacaaagacacaacataccagaatctctgggacacattcaaagcagtgtgtagagggcaatttatagcactaaatgcccacaagagaaagcaggaaagatccaaaattgacaacctaacatcacaattaaaagaactagaaaagcaagagcaaacacatgcaaaagctagcagaaggcaagaaatatctaaaatcagagcagaactgaaggaaatagagacacaaaaaacccttcaaaaaagtaatgaatccaggagctggttttttgaaaagatcaacaaaattaatagaccactagcaagactaataaagaagaaaagagagaagaatcaaatagatgcaataaaaaatgataaaggggatatcaccacttatcccacagaaatacaaactaccatcacagaatactacaaacacctctatgcaaataaactagaaaatctaggagaaatggataaattcctggacacatacaccctcccaagacaaaaccaggaagaagttgaatctctgaatagaccaataacaggctctgaaattgtggcaataatcaatagcttaccaatcaaaaaaagtccaggaccagatggattcacatctgaattctaccagagttcattttatgaggccagcatcatcctgataccaaagcctggcagagacacaaccaaaaaagagaattttagaccaatatccttgatgaacattgatgcaaaaatcctcaataaaatactggcaaaccaaatccagcagcacatcaaaaagcttatccaccacgatcaagtgggcttcatccctgggatgcaagtctggttcaacatacgcaaatcaataaatgtaatccagcatataaacagaaccaaagacaaaaaccacatgattatctcaatagatgcagaaaaggcctttgacaaaattcaacagcccttcatgctaaaaactctcaataaattaggtattgatgggacatatctcaaaataataagagctatctatgacaaacccacagccaatatcatactgaatgggcaaaaactggaagcattccctttgaaaactggcacaagacagggatgccctctctcaccactcctattcaacatagtgttggaagttctggccagggcaattaagcaggagaaggaaataaagggtattcaattaggaaaagaggaagtcaaattgtccctgtttgcagatgacatgattgtatatctagaaaaccccattatctcagcccaaaatctccttaagctgatgagcaacttcagcaaagtctcaggatacaaaatcaatgtaccaaaattacaagcattcttatacaccaataacagacaaacagagagctaa

SEQ ID NO: 142555 - DNA, 1479 bp, Homo sapiens
tcatgatttggctgtttgtctgttattggtgtataataatgcttgtgatttttgtacattgattttgtatgctgagactttgctgaagttgcctatcagcttaaggagattttgggctaagtcgatggggttttccagatatacaatcacgtcatctgcaaacagggacaatttgacttcctgttttcctaattgaataggctttatttctttctcctgcctgattgccctggccagaacttccaacactatgttgaataggagtggtgagagagggcatccctgtcttgtgccagttttcaaagggaatccttccagtttttgcccattcagtatgatattgcctgtgggtctgtcataaatagctcttattattttgagatacatcccatcaacacctaatttattgagagtttttagcatgaagggttgttgaattttgtcaaaggccttttctgcatctactgagataatcatgtggtttttgtctttggttctgtttatatgttggattatgttttttgatttgcatatgttgaaccagccttgcatcccagggatgaagcccacttgatcatggtggataagctgtcggatgtgctgctggattcggtttgccagtattttattgaggatttttgcattgatgttcatcagggatattggtctaaaattctctttttttgttgtgtctctgccaggcctgggtatcaggatgatgctggcctcataaaatgagttagggaggattccctctttttctattgattggaatagtttcagaaggaatggtaccagcccctccttgtacctctggtagaattcggctgtgaatccatctggtcctggactttttttggttggtaagctattaattattgcctcaatttcagagcctgttattggtctattcagagattcaacttcttcctggtttagtcttgggagggtgtatgtgtcgaggaatttatccatttcttctagattttctagtttatttgcatagaggtgtttatagtattctctgatggtagtttgtatttctgtgggattggtggtgatatcccctttatcatttttattgcatctatttgattcttctctcttttcttctttattagtccagtaattattcaggagcaggttgttcagtttccatgtagttgagcagttttgattgagtttcttaatcctgagttctagtttgattgcactgtggtctgagagacagtttgttataatttctcttcttttccatttgctgaggagtgctttacttccaactatgtggacaattttggaataggtgtggtgtggtgctgagaagaatgtacattctgttgatttggggtggagagttccgtagatgtctgttaggtctgcttggtgcagagctgagttcaattcttggatatccttattaactttctgtctcattgatctgtctaatgttgacagtgcggtgttaaagtctcccat

SEQ ID NO: 142556 - DNA, 795 bp, Homo sapiens
ctagttctccattacagtgcaaggttgcaggttttgcccattcagtgtgatattggctgtgggtttgtcataaatagctcttattattttgagatacgtcccatcaatacctcgtttattgagagtttttagcatgaagagctgttgaattttgtcaaaggccttttctgcatctattgagataatcatgtggtttttgtctttggttctgtttatatgctggattacgtttattgatttgcatatgttgaaccagccttgcatcccagggatgaagccaacttgattgtggtggataagctttttgatgtgctgctgaatttggtttgccagtattttattgaggatttttacatcgatgttcatcagggatattggtctaaaattctctttttttgttgtgtctctgccaggctttggtatcaagatgatgctagcctcataaaatgagttagggaggattccctctttttctgttgattggaatagtttcagaaatggtaccatctcctctttgtacctctggtagaattcggctgtgaatctgtctggtcctggactttttttggttggtaggctattaattattgcctcaatttcagagcctgttattggtctattcagggattccacttctcctggtttaatcagtcgtctgaagccttcttctctcaactcatcaaagtcattctctgtccagctttgctccattgctggcaaggagctgcattcctttggaggagaagtgctctgatttttataattttcagcttttctgctcttgtttctccccat

SEQ ID NO: 142557 - DNA, 960 bp, Homo sapiens
atgcacagaatatatattggtctcagcaccacatcacacttattgcgaagattggacacacagttgggagaaatacaaactaccatcagagaatactacaaacacctctatgcaaataaactagaaaatctagaagaaatggataaattcctggacacatacacactcccaagactaaaccaggaagaagttgaatccctgaatagaccgataacaggttctgaaattgaggcaataattaatagcctaccaaccaaaaaaagtccaggaccagatggattcacagctgaattctaccagaggtacaaagaggagttggtaccattccttctgaaactcttccaatcaatagaaaaagagggaatcctccctaactcattttatgaggccagcatcatcctgataccaaagcctggcagagacacaacaaaaaaagaaaattttagaccaataactctgatgaacatcgatgcaagaatccttaataaaatactggcaaaccaaatcctgcagcacatcaagaagcttatccaccatgatcaagttggcttcatccctgggatacaaggctggttcaacatatgcaaatcaataaacgtaatccagcatataaacagaaccaaagacaaaaaccacatgattatctccatagatgcagaaaaggcctttaacaaaattcaacagcccttcatgctaaaaactcccaataaattaggtattgatgggatgtatctcaaaataataagagtcatttatgacaaacccacagcctccagttttgaatgggcaaaaactggaagcattccctttgaaaactggcataagacagggatgccctctctcaccactcctattcaacatagtgttggaagttctggccagggcaatcaggcaggagaaacaaatacagggtattcaattaggaaaagaggaagtcaaattgtcactgtttgcagatga

SEQ ID NO: 142558 - DNA, 2361 bp, Homo sapiens
ttacccattcagtatgatattggctgtgggtttgtcataaatagctcttattattttgagatacatcccgtcaatacctagtttattgagagtttttagcatgaagggctgttgaattttgtcagaggccatttctgcatctattgagataatcatgtggtttttgtctttggttttgtttatatgatggattacgtttattgatttgcatgtgctgaacaagccttgcatcccagggatgaagccaagttgatcgtggtggataagctttttgatgtgctgctggatttggtttgccagtattttattgaggatttttgcatcgatgttcatcagggatattggtctaaaattctctttttttgttgtgtctctgccaggctttggtatcaggatgatgctggcctcatgaaatgaattagggaggattccctctttttctgttgattggaatagtttcagaaggaatgttaccaactcctgtttgtacctctggtagaattcagctgtgaatccatctgatcctggactttttttggttggtaggctattaattattgcctcaatttcatagcctgttattggtctattcagggattcaatttcttcctggtttagtcttgggagggtgtatgtgtccaggaatttatccatttcttctagatttaatagtttatttttgtagaggtgtttatagtattctctgatggtggtttgtatctttgtgggatcggtggtgatatcccctttatcattttttattgcatctatctgattcttctctctttccttctttattagtctttctagcagtctatcaattttgttgatgttttcaaaaaaccagctcctggattcattgattttttgaagggtgttttgtgtctctatctccttcagttctgctctgatcttagttatttcttgccttcggctagcttttgaatgtgtttttctcttgcttctccagtagtcattcaggagcaggttgttcagtttccatgtagttgagcagttttgagtgagtttcttaatcctgagttctggtttgattgcactgtggtctgagagacagtttgctacaatttctgttcttttacatttgttgaggagtgctttacttccaactatgtggtcaatattggaataagtgtgatgtggtgctgagaagaatgtatattctgttgatttggggtggagagttctgtagatgtctattaggtccacttggtgcagagcagagttcaattcctggatatccttgttaactttctgtctcattgatctgccttcggtctttgatgatggtgatgtacagatggggttttggtgtggatgtcctttccgtttgttagtattccttctaacagtcaggaccctcagctgcaggtctgttggagtttgctggaggtccactccagaccctgtttgcctgagtatcaccagcagaggctgcttatcagcctcgccagggcccccgcgccgcccaatcccagcaactctggttctcctgtgaccccaagccttccagatccctgggtttccccccacgggactgtcacattcttccccgccggagacgccagtcgcggggcctcctccctggggtgtgagcaggtcggcgcgccacacttctctaggtggccggacgcgcgcccagggaggagctggcggcggggcccaggctgttccggagagaagaggtctggaaagtcctggggaactcgcagggcacgggccgctgtcgcggttgggaggcgagggcgcagcgctggggttgtagattccaagacccctgagggtggctgtgttggtttctcgcaggagtcggaggctccctgctttccagccgcccagtgacccaagcttaatcttcagcaccacttggggcgaccttttcggtgcaaacctacgattctgtttctcaggattcctccccatcccgcttcgccccggaaaagctgacaagaacttcaggtgtaagccctgagtagtgaggatctgcggtctccgtggagagctgtgcctttcatcatctatgagggagacatctacacctatcaggatgtagacaaaaggagcagcagagtggcccatgtcttcctgaaccattcctctctgaaaaagggggacacggtggctctgctgatgagcaatgagccggacttcgttcacgtgtggttcggcctcgccaagctgggctgcgtggtggcctttctcaacaccaacattcgctccaactccctcctgaattgcatccgcgcctgtgggcccagagccctctaattgtactttatcagggatgactacatttgcagaagagatatgtttaaaggaaggtacctgaattcctttcttcat

SEQ ID NO: 142559 - DNA, 2286 bp, Homo sapiens
atggatgaattcctggacacatacaccctcccaagactaaaccaggaagaaattgaatccctgaatagaccaataacaagttctgaaattgaggcagtaattaatagcctaccaaccaaaaaatgtccaggaccagacggattcacagccgaattctaccagaggtacaaagaggagctggtacccatccttctgaaactaattcaaacaatagaaaaagagggactcctgcctaactcattttatgaggccaccaacatcctgataccaaaacctggcagagacacaacaaaaaaagaaaatttcaggccaatatccctgatgaacatcaatgcaaaaatcctcaatgaaatactggcaactgaatccagcattaaaaagcttattcaccatgatcaagacagcttcatccctgggatgcaaggctggttcaacatatgcaaatcaataaatgtaatccatcacataaacagaatcaataataaaaaccacatgattatctcagtaaatgcagaaaaggcctttgataaaattcggcatctcttcatgctaaaaacactcattaaactaggtattgatgaaacgtctctcaaaacagtaagagctatttatgacaaacccacagccaatatcatactgaatgggcaaaagctggaagcattccctttgaaaactggtataagacaaggatgccttctctcatcactcctattcaacatagtattggaagttctggccagggcaatcaggcaagagaaagaaataaaagatattcaaataggaagagaggaagtaaaattgtctctgtttgcagatgacatgattgtatatttcaaaaaccccattgtctctgcccaaaatctccttaagctaataggcaacttcagcaaagtctcaggatacaaaatcaatgtgcaaaaattacaagcattcttatacaccaataatagacagacagagagtcaaatcgtgagtgaactcccattcacaatagctgcaaagagaataaaatacctaggaatacaacttacaagggatgtgaagtacctcttcaaggagaactacaaaccactgcataaggaaatcatagaggacacaaacaaatggaaaaatattccatgctcatggataggaagaatcaatatcatgaaaatggccatactgcccaaagtaatttatagattcaatgctagtcccatcaagctactattgaatttctttacagaattagaaaaaaactgcttaaatttcatatggaaccaaaaaagagctcatatagccaagacaatcctaagcaaaaagaacaaagctggaggcatcacactacctgatttcaaactatactacaagtctacagtaaccaaaacaacatggtactggtaccaaaacagatatatagaccaatggaacagaacagaggcctcagaaataacaccacacatctacaaccatctgatctttgatgaatctgacaaaaacaatcaatggggaaaggattccctacataacaaatggtattgggaaaactggctagccatatgcagaaaactaaaactggactccttccttacacattacacaaaaattaactcaagatggattaaagacttaaatgctggtagcaagatccagtacacatgcagacaggacaaaatccagagagagaagagccatcgcttcttcctacgtatcctcttagaaaaaagaaagccttttttggaaattcatcagcagacttccttccacgtttcttggtcacaattggctattcttgaaccagatgggcattcagaaggtcatatgactgcccgaaatctccttaagctgataagaaacttcagcaaagtgtcaggatacaaaatcaatgtgcaaaaatcacaagcattcttatacaccaataacagacaaacagagagccaaatcatgagtgaactcccattcacaattgattcaaagagaataaaatacctaggaatccaacttacaagggatgtgaaagacctcatcaaggagaactacaaaccactgttcaaggaaataaaagaggacacaaacaaatgggagaacattccatgctcatggatagaaagaatcaatattgtgaaaatggccatactgcccaaggtaatttatagattcaatgccatccccaccaagctatcaatgactctcttcacagaattggaaaaaaacaactttaaagctcatatggaaacaaaaaagagcctgcattgccaagacaatcctaagcaaaaagaacaaagttggaggcatcatgctacctga

SEQ ID NO: 142560 - DNA, 1692 bp, Homo sapiens; identical to SEQ ID NO: 123230

SEQ ID NO: 142561 - DNA, 1431 bp, Homo sapiens; identical to SEQ ID NO: 120945

SEQ ID NO: 142562 - DNA, 749 bp, Homo sapiens
ctcatggctgtctttgtgatagtgagtgagttctggttttgtaaagtgtggcacctccactccgttgttccagcttccacagtgtgatatgcctgcccccattcaccttctgcttcctgaaccatccctagaaacagtggctggtgccatgcttcctgtgtagcctgtagcactaatttattgagagtttttagcatgaagggctgttgaattttgtcaaaggccatttcggcatctattgagataatcatgtggtttttgtcattggttctgtttatatgctggattatgtttattgatttgcgtatgttgaaccagccttgcaccccagggatgaagcccacttgatcatggtggataagctttttgatgtgctgctggattcggtttgccagtattttactgaggatttttgcatcaatgttcatcagggatattggtctaaaattctctttttttgttgtgtctctgccaggctttggtatcaggatgatgctgacctcatgaaatgagttagggaggattccctctatttctattgattggcatagtttcagaaggaatggtaccagctcctgcttgtgcctctggtagaattcggctgtgaatccatctggtcctggactttttttggttggtaggctattaattattgcctcaatttcagagcctgttattggactattcagggattcaacttcttcctggtttagtcttgggagcgtgtatgtgtcgaggaatttatccat

SEQ ID NO: 142563 - DNA, 2484 bp, Homo sapiens
tcatgatttggctctgtgtgtctgttcttggtgtataggaatgctggtgatttttgcacattcatttttgtatcctgagagtttgctgaagttgcttatcagcttaaggagattttgggctgagatgatggggttttctaaatatacagtcatgtcatctgcagacaggaacaatttgacttcctcttttcctaatcgaatacactttatttctttctcttgcctgattgccctggtcagaacttccaacactgtattgaataggagtggtgagagagggcatccctgtcttgtgccagttttcaaagggaatgcttccaatttttgcccattcagtatgatattgactatgggtttgtcataaatagctcttattattttgagatacatctcatcaatacctagtttactgagagtttttagcatgaaagggtgttggattttgtcgaaggccttttctgcatctattgagataatcatggggtttttgtccttggttctgtttttgtgatagattaagtttattgatttgtgtatgttgaaccagccttgcatcccagggatgaagccaacttgatcgtggtggataagctttggtatcaggatgatgctggcctcataaaatgagttaggaaggattccttctttttctattgattgtaatagtttcagaaggaatggtaccagctcttctttgtacctctggtagaattcagctgtgaattcctctggtcctggactttttttggttggtaggctattaattattgcctcaatttcagaacctcttattggtctattcagagattcaacttcttcctggtttagtcttgggagggtgtatgtgtccaggaatttatccatttcttctagattttctagtttatttgcatagaggtgtttatagtattctctgatggtagtttgtatttctgtgggatcagtggtgatatcccctttatcattttttattgcgtctacttgattcttctctctcttcttctttattagtcttgctagcagtcttgtgtctttgttctcattggtttcaaagaacatctttatttctgccttcactttgttatttacccagtagtcattcaggagcacgttgttcagtttccatgtagttgcgtggttttgaatgagtttcttaatcctgagttctaatttgattgcactgtgttctgagagacagtttgttgtgatttctgttcttttatatttgctgaggagtgctttacttccaactatggtcaattttggagtaagtgtgacgtggttctgagaagaatgtatattctgttgatccaggtcacgctgatgcaagaggtgggtttccatagtctcgggcagctccacccctgtggctttgcagagtacagctctcctcctggctgctttcatgggctggcgttgagtgtctgcagcttttccaggcacacagtgcaagctattggtggatctaccattctggggactggaggacagtggtcctcttctcacaaatccactaggcagtgccctagtaggatctctgtgttggctcccaccccacattttccttctgcaaggctcaacaccatgtggaagctgccaaggcttggggcttccaccccctgaggccacagcatgaggtctactttggcccctttcatccacggctggagcagctggtacacagggcaccaggtccctaggcttagcctggaccttattgttcatatcaccatcagtattttggtcaaaggcattcaacaagtctctaggaggttccaaactttcccacattttcctgtcttcttctgagccctccaaactgttagaacctttgcctgttacccagttccaaagcctcttgcacattttcaggtgtcttttcagcatcacaccactcctggtaccaattaactgtattagttcattttcatgctgctgataaagacatacctggatatccaggcagaagtttcctgcaggggtggaatcctcatggagaatctctgctagggcaatgcagaagggaagtgtggggtctgtacccccatgcagagtccacactggggcactgtctagtgaaactgtgagaagagggccactgtccttcagaacctcattctcctgcttgtccggggccatggctgtggcttctgaagccagctcacagctcaaggttctctggctctgctccagctgagaactgagctgctgcttctcatccctggctcggctccgcatgaactgagctgagagtttggtacaggcagaaagctctgacattctatggcctattttcatcccatttaattctggaggagaatatgcctgcaggaaaagtctcaatggactgtccccaaccaccctcctcaactctatgccgagagaaccttggacctttctctcctcacaactgcactcgaaccacatcagcttcacttttactggcttcaaaggttgggcttctgcataacatttcactgtcat

SEQ ID NO: 142564 - DNA, 1341 bp, Homo sapiens
ttatataattttgggcttcacaatctccttcatccttttgatttcctcctcagacatgacattataatacctgatgatgtcccactcatcatcctcttccaagtgagtgatgagaagctgtggagccctcttgccatggtagtacctacagaaaagcctctgctgcttctgtggtgcttcctcttttcctatctgaatacccgttatttctttttcttgcctgattgccctggccagaacttccaatactacgttgaataggagtggtgagagagggcatccttgtcttgtgtcggttttcaaaaggaatgcttccagcttttgcccattgagtatgatattggctgtgggtttgtcaaaaatagctcttattattttgagatgtgttccatcaatacctagtttattgagagcttttagcatgaaggggtgttgaattttgtcaaaggccttttctgcatctattgagataatcatgtggtttttgtcattggttctgtttatgtgatggattatgtttattgatttgcatatattgaaccagccttgcatcccagaaataaagccaacctgattgtggtggataagctttttgctgtgctgctggattcggtttgccattattttattgagggttttcgcatcaatgttcatcagggatattggcctgaaattttcattttttgttgtgtctctgccaggttttggtatcaggatgatgctggcctcataaaatgagttagggaggattccctccttttctattgtttggaatagtctcagaaggaatggtaccagctcctcttcgtacctctggtagaattcggctgtgaatccatctggtcctgggctttttttggttggcaggctattaattactgcctcaatttcagaacttgtcattggtctattcagagattcaacttcttcctggtttagtcttgggagggtgtatgtgtccaggaatttatccatttcttctagattttctagtttattttcatagaggtgtttatagtattctctgaaggtagtttgtatttctttctctctggctgcacttaacattttttccttcatttcaactttggtgaatctgatgattatgtgtcttggggttgctattcttgaggagtatctttgtggtgttctctgtatttcctgaattttaatgttgacctgtcttgctaggttggggaagttctcctggataatatcctgaggagtgttttccaacttggttccaatttccccctcactttcagatacaccaatcaaacgtaggtttggtcttttcacatagttccatatttcctggaggctttgttcatttcttttcat

SEQ ID NO: 142565 - DNA, 3021 bp, Homo sapiens
ctaaaaacccctttctactctcagagaaatgcccctgatttctggatccaaaaatgtcaacactgagttgcttttcatgctggatgtaagaaccagcagagcatggaaacgtctaccctctgactccctagagcccccccagttcattgataccttatctgtcatgaaaaggaccatctgccactggcaccaatacaggacatttgtgcttggcccaaagagctgcccatcaaattgagtattaaatccaggaccatctagctggaatacttcatcttcttccagttctctttgcctgttgtccccactatccactctaatcattggtcctttgtactggtttcctgacaaatgttgcctaattccaggacacgaacctgcagcatctccaagtttcctccacacaacattgcacatttctctgactatagctttttctgtctcactaaggtcatgttcatactctttaccctgttgacgatctatagtttcctgaacatccaagaccagattaacatcagctctgtgctcatttgaccttctccactccaggcacataactgtggctgcaaccattacataaaatgtgtatctatcctggggcagcatgcgattttcttcctccagctgtcttactcttgcctccagctgcctaacataggacaaggttgattctttataaaagagtcttgaaagatccctttccccttcatggcaggcactgcctatgggcttccaccagacaccaaatctatgggtgcctgcgtcttggactttccaaccttcaaaactgtgagcaataaatttctgttgtttataaattacccaacctaaggtattctgttgtatcagcccaaaaggactcccatcccaccccagtggaggggtactgacggagcaggagcaggcacagctgtgtgcaatgcacggcggggcaggtgtccgacactgaatgagaggctctgcaccgccagagagcagcctgttgtctcctgactttttaatgatcgccattctaactggtgtgagatggtatctcattgtggttttggtttgcatttctctgatggcccgtgatgatgagcattttttcatgtgtctgttggctgcataaacatcttcttttgagaattgtctgttcatatccatcacccactttttaatggggttgtttgattttttcttgtaaatctgtttgagttttttgtagattctggatactagccctttgtcagatgagtagattgcaaaaattttctcccattctgtaggttgcctgttcactctgatggtggtttcttttgctgtgaagaagctctttagtttaattagaacccatttgtcaatttgggcttttgctgccattgcttttggtgttttagacatgaagcccttgcccatgcctatggcctgaatggttttgcctaggttttcttctagagtttttatggctttaggtctaacatttaagtctttaatccatcttgaattgatttttgtataaggtgtaaggaagggatccagtttcagctttctacgtatggctagccagttttcccagcaacatttattaaatagggaatcctttccccatttcttgtttttgtcaggtttgtcaaagaccagatggttgtagatgtgtggtattatttctgagggctctattctgttccattggtctatatctctgttttggtaccagtaccacgctgttttggttactgtagccttgtagtatagtttgaagtcaggtagcttgatgcctccagctttgttcttttggcttaggattatcttggcaatgcgggctcttttttggttccatatgaactttaaagtagttttatccttctcctgcctgattgccctgaccagaacttccaacactatgttgaataggagtggtgagagagggcatccctgtcttgtgccagttttcaaagggaatgcttccagtttttgcccattcagtatgatattggctgtgggtttgtcataaatagctcttcttattttgagatacatcccatcaatacctaatttattgagaggttttagcatgaagggttgttgaattttgtcagaggccttttctgcatctgttgagataatcatgtggtttttgtctttggttctgtttatatgatggattacgtttattgatttgcatatgttgaaccagccttgcatcccagggatgcagcccacttgatcgtggtggataagctttttgatgtgctgctggattcggtttgccagtattttattgaggatttttgcattgatgttcatcagggatattggtctaaaattctctttttttattgtgtctctgccagcctttgatatcaggatgatgttggcctcataaaatgaattagggaggattccctctttttctattgattggaatagtttcagaaggaatggaaccagctcctcctcgtacctctggtagaattcagctgtgaatccatctggtcctggactttttttggttggtaggctattaattattgcctcaatttcagagcctgttattggtctcttcagggattcaacttcttcctggtttagtcttgggagggtgtatgtttccaggaattgatccatttcttctagatttcctagtttatttgtgtagaggtgtttatagtattctctgatggtagtttgtatttctgtgggatcggtggtgatatcccctttatcattttttattgcatctatttgattcttctctcttttcttctttattagtcttgctagtggtctatcaattttaatgatcttttcaaaaaaccagctccacctaggtattaagcccagcgtgtaatagctacttatcttgatgctctccttcccctgccaccccccaaaaggccccagtgtgtattgttctcctccttgtgtccatgtgttctcattgttcagctcccacttataagtgagaacattcggtgtttgattttctgttcctgcgttactttgctgaggataatggcttccaggtccatccat

SEQ ID NO: 142566 - DNA, 1644 bp, Homo sapiens
atgggtgaactgcatatgatcactgaggaaaagcaccagcccttcatggacactcagacagcagcaaagggaacactgcttgaggcgggccctggcctggacccagtttgtttgggacatattaagaaagtaatccagaggaaattttggaggtactcagcacctggcactgttcctaccacctctgctattcctggtgagactgagtggggcagactcccacagtggtctactgcatggagtgaaacagcacaacatgggtggccagctgccaggcagtcaagaattaccgtgctacatcagcaaccccagtgtgaccctggacctgaagtaacatctgagcaactaccaggtgtcataaatatgttgactcttaaatacattaaggtggctgcccacccccatggttcttggaacactcgtgtgccctgcttggttgctgtgttgttaacacctacccggctttcctactacatctctgaaatacaaactaccttcagagaatactataaacacctctatgaaaataaactagaaaatctagaagaaatggataaattcctggacacatacaccctcccaagactaaaccaggaagaagttgaatctctgaatagaccaatgacaagttctgaaattgaggcagtaattaatagcctgccaaccaaaaaaagcccaggaccagatggattcacagccgaattctaccagaggtacgaagaggagctggtaccattccttctgagactattccaaacaatagaaaaggagggaatcctccctaactcattttatgaggccagcatcatcctgataccaaaacctggcagagacacaacaaaaaatgaaaatttcaggccaatatccctgatgaacattgatgcgaaaaccctcaataaaataatggcaaaccgaatccagcagcacagcaaaaagcttatccaccacaatcaggttggctttatttctgggatgcaaggctggttcaatatatgcaaatcaataaacataatccatcacataaacagaaccaatgacaaaaaccacatgattatctcaatagatgcagaaaaggcctttgacaaaattcaacaccccttcatgctaaaagctctcaataaactaggtattgatggaacacatctcaaaataataagagctatttttgacaaacccacagccaatatcatactcaatgggcaaaagctggaagcattccttttgaaaaccgacacaagacaaggatgccctctctcaccactcctattcaacgtagtattggaagttctggccagggcaatcaggcaagaaaaagaaataccggcccctgcagatacctctagcctcattgctcaccatccatctccttcatatcagccctggaccccagtaacacgaaccagccacagcactcccaccatcacctgctacccctgcctggaatgcaccccagccaaatggttgacatctgtctccacaatggggggtggactgttatctgttcctcaggggactgtgagggtctctgctctgaactactgctttatcccccagctcggaggagggcccctcatggcatcaagtgccagcagtgactatgttccagagtctgatgaaagtgagcctcttttcacctttgaataa

SEQ ID NO: 142567 - DNA, 2310 bp, Homo sapiens; identical to SEQ ID NO: 120375

SEQ ID NO: 142568 - DNA, 3793 bp, Homo sapiens
atggggagaaaccagatcagaagagctgaaaattctaaaaatcagagcgcttcttctcctccaaaggaatgcagctcctcgccagcaatggaacaaaggtggacggagaatgactttgacaagttgagagaagaaggcttcagaagatcggtaataacaaactcctctgagctaaaggaggatgttcgaacccaatgcaaagaagctaaaaaccttgaaaaaagattagacaaatggctaactagcataaagagcatagagaagaccttaaatgacctgatggagctgaaaaccatggcacgagaactacgtgatgcgtgcacaagcttcagtggccgattcgatcaactggaagaaagagtatcagtgactgaagatcaaatgaatgaaaggaaaactagagaagcaagagcaaacacattcaaaagcagcagaaggcaagaaataactaagatcagagcagaactgaaggagatagagacacaaaaaacccttcaaaaaatcaatgaatccaggagctggttttttgaaaagataaacaaaactgacagatcgctagcaagactaataaagaagaaaagagaggagaatcaaatagatgcaataaaaaatgataaaggggatatcaccacagatctcacagaaatacaaactactatcagagaatactataaacatctctacccaaataaactagaaaatctagaagaaatggataaattcctgggcacctacaccctcccaagactaaaccagaaagaagttgaatccctgaatagatcaataacaagttctgaaattgaggcagtaattaatagcctaccaaccaaaaaaagtccaggaccagatggattcacagccaaattctaccagaggtacaaagaggagctggtaccattccttctgaaactattccaaaccatacaaaaagagagactcctccctaattcattttatgaggccagcatcatcctgataccaaaacctggcagagacacagcaataaaagaaaattccaggccaatatccctgatgagcatcgatgtgaaaatcctcaataaaatactggcaaaccaaatccagcagcacatcaaaaagctcatccaccatgatcaagtggacttcatccctgggatgcaaggttggttcaacatacgcaaatcaataaatgtaatccatcatacaaacagaaccaaagacaaaaatcacatgattatctcaaaagatgcagaaaaggcctttgacaaaattcaacagtccttcatgctaaaaactctcaataaattaggtattgacgggacaattggaaaaaactactttaaagttcatatggaaccaaaaaaagcccgcattgccaagacaatcctaagcaaaaagaacaaagctggaggcatcacgctacctgacttcaaactatactgcaaggctacagtaaccaaaacagcatggtactggtaccaaaacagagatatagaccaatggaacagaatagaggcctcagaaataataccacacatctacaaccatccaatctttgacaaatctgacaaaaacaagaaatggggaaaggattccctatttaataaatggtgttgggaaaactggctagccatatgtagaaagctgaaactggatcccttccttacaccttacacaaaaattaattcaagatggattaaagacttaaatgtcagacctaaaactataaaaaccctagaagaaaacctaggcaataccattcaggacataggcatgggcaaggacttcatggctaaaacacaaaaagcaatggcaacaaaagccaaaattgagcaatggaatctaattaaactaaagagcttctgcacagcaaaagaaactgccatcagagtgaacaggcaacctatagaatgggagaaaatttttgcaatctatccatctgacaaagggctaatatccagaatctacaaagaacttaaacaaatttacaagaaaaaaacaaacaaccccatcaaaaagtgggcaaaggatatgaacagacacttctcaaaagaagacatttatgcagccaatagacacatgaaaaaatgctcatcatcactggtcatcagagaaatgcaaatcaaaaccacaatgagataccatctcacaccagttagaatggcgatcattaaaaagtcagcaaacaacaggtgctggagaggatgtggagaaataggaacacttttacactgttggtgggtctgtaaagtagttcaaccattgtggaagacagtgtggcaattcctcaaggatctagagctagaaataccatttgacccagcaatcccattactggttatataccgaaaggatgataaatcatgctgctatgaagacacatgcacatcacccagtcccatcgatcacccaagcgctgaggagtgcgagcgcatggcgtgggactggcaggcagctccacctgcagcccaggtgcaggatccactgggtgaagccagctgggctcttgagtctggaatccaagacctggtttttgaaaagatcaacaaaatgcatagactgctagcaagactaataaagaagaaaagagagaagattcaaatagatgcaataaaaaatgataaaggggatatcactaccgatcccacagaaatacaaactaccatcagagaatactataaacacctctatgcaaataaactagaaaagctagaacaaatagataaattcctggacacatacaccttcccaagactaaaccaggaagaagttgaatctctgaagagaccaataacaggctctgaaattgaggcaataatcaatagcctaccaaccaaaaaaagtccaggaccagatggattcacagccaaattctaccagaggtacaaagaggagctggtaccattccttctgaaactattccaatcaatagaaaaagagggaatcctgcctaactcattttatgaggacagcatcattctgatatcaaaggctggcagagacacaaccaaaaaagagaattttagaccaatatccttgatgaacatcgatgcaaaaatcctcaataaaatactggattcggcaaaccgaatccagcagcacatcaaaaagcttatccaacatgatcaagtgggcttcatccctgggttgcaaggctggttcaacatacgcaaatcaataaatgtaatccagcatataaacagaaccaaagacaaaaaccacatgattatctcaatagatgcagaaaaggcctttgacaaaactcaacaacccttcatgctaaaaactctcaataaattcggtgttgatgggacatatctcaaaataataagagctatctatgacaaacccacagccaatatcatattgaatgggccaaaactggaagcattccctttgaaaacgggcacaagacagggatgccctctctcaccactcctattcaacacagtgttggaagttctggccagggcaatcaggcaggagaaggaaataaaggcccaaaatctcctcaagctgataagcaacttcagcaaagtctcaggatacaaaatcaatgtacaaaaatcacaagcattcttatacaccaataacagacaaacaaagagccaaatcatgagtgaactcccattcacaattgcttcaaagagaataaaatacctaggaatccaacttacaagggatgtgaaggacctcttcaaggagaactacaaaccactgctcaatgaaataaaagaggatacaaatgaatggaagaacattccatgctcatgggtaggaagaatcaatatcatgaaaatggccatactgccca

SEQ ID NO: 142569 - DNA, 710 bp, Homo sapiens
ctgacttacagctcttataaactaggggcaatttctgaacccagccggctccatctcagcttctggtttctaagtccatgtgccaaaggctgccaggaaggagacgccttcctgagtcctggatctttcttccttctggaaatctttgactgtgggtagttatttatttctgaataagagcgtccacgcatcatggacctcgcgggactgctgaagtctcagttcctgtgccacctggtcttctgctacgtctttattgcctcagggctaatcatcaacaccattcagctcttcactctcctcctctggcccattaacaagcagctcttccggaagatcaactgcagactgtcctattgcatctcaagccagctggtgatgctgctggagtggtggtcgggcacggaatgcaccatcttcacggacccgcgcgcctacctcaagtatggggaaggaaaatgccatcgtggttctcaaccacaagtttggaaatttgactttctgtgtggctggagcctgtccgaacgctttgggctgttaggggtaagtcaaaagtgcattcccccctgcctcacacatttttttggttcagcccccccacttgtctttttgctcctggtcattcagaacttgcagaagaatcaacagagtttttacttgatgaaatggtcctaataaactgcttttttattcttgctaggaaaaaaaaa

SEQ ID NO: 142570 - DNA, 2811 bp, Homo sapiens
tcacccactttttgatggggttgtttttttcttgtaaatttgtttgagttcattgtagattctggatattagccctttgtcagatgagtaggttgcgaaaattttctcccattttgtaggttgcctgttcactctgatggtagtttcttttgctgtgcagaagctctttagttgaattagatcccatttgtcaattttgtctgttgttgccattgcttttggtgttttagacatgaagtccttgcccatgcctatgtcctgaatggtaatgcctaggttttcttccagagtttttatggttttaggtcgaaagtttaagtctttaatccatcttgaattaatttttgtataaggtgtaaggaagggatccagtttcagctttctacatatggctagccagttttcccagcaccatttattaaatagggaatccgttccccattgcttgtttttctcaggtttgtcaaagatcagatagttgtagatatgcggcgttatttctgagggctctgttctgttccattgatctatatctctgttttggtaccagtaccatgctgttttggttactgtagccttgtagtatagtttgaagtcaggtagcgtgatgcctccagctttgttcttttggcttaggattgacttggcgatgcgggctcttttttggttccatatgaactttaaagtatttttttccaattctgtgaagaaagtcattggtagcttgctggggatggcattgaatctataaattaccttgggcagtatggccattttcacgatattgattcttcctacccatgagcatggaatgttcttccatttgtttgtatcctcttttatttccttgagcagtggtttgtagttctccttgaagaggtccttcacgtcccttgtaagttggattcctaggtattttattctctttgaagcaatcgtgaatgggagttcactcatgatttggttctctgtttgtctgttattggtgtgtaagaatgcttgtggtttttgtacattgattttgtatcctgagactttgctgaagttgcttatcagcttaaggagaatttgggctgagacaatggggttttctagatatacaatcatgtcatctgcaaacagggacaatttgacttcctcttttccgaattgaataccctttatttccttctcctgcctgattgccctggccagaacttccaaggctatgttgaataggagtggtgagagagggcatccctgtcttgtgccagttttcaaagggaatgcttccagtttttgcccattcagtatgatattggctgtgggtttgtcatagatagctcttattattttgagatatgtcccatcaatacctaatttattgagagtttttagcatgaagggttgttgaattttgtcaaaggccttttctgctaaagcttggggtggagtgacataagcacccctgttgccaccaccactatgactgcattgactcagacctgatgccagcacagcactgggtctcactcgaggcctgctggaaccactccctggcttctgcctgtgtttcctcaaggccctggggctcccctccagaagcaggacaattgtaggaattttcactgcaagcttcacaatatgcagcacagtatctgagcgcagcagaactgtcactctggagtggatcttgggcagtatggccattttcacgatattgattcttcctacccatgagcatggaatgttcttccatttgtttgtatcctcttttatttcattgagcattggtttgtagttctccttgaagaagtccttcacgtccattgtaagttggattcctagatattttattctctttgaagcaattgtgaatgggagttcactcatgatttggctctctgtttgtctgttattggtgtataagaatgcttgtgatttttgcgcattgattttgtatcctgagactttgctgaagttgcctatcagcttaaggagattttgggctgagacgatggggttttctagatatacaatcatgtcatctgcaaacagggagaatttgacttcctcttttcctaattgaatatcctttatttccttctcctgcctgattgccctggacagaacttccaacgctatgttgaataggagtggtgagagagggcatccctgtcttgtgccagttttcaaagggaatgcttccagtttttgcccattcagtatgatattggctgtgggtttgtcatagatagctcttattattttgagatatgtcccatcaatacctaatttattgagagtttttagcatgaagcgctgttgaattttgtcaaaggcctttactgcatctattgagataatcatgtggtttttgtctttggttctgtttatatgctgggttacctttattgatttgcgtatgttgaaccagccttgcatcccagggatgaagcccacttgatcatggtggataagctttttgatgtactgctggatttggtttgccagtattttattgaggatttttgcatcgatgttcatcagggatattggtctaaaattctctttttttgttatgtctctgccgggctttggtatcaggatgatgctcctcataaaatgagttagggaggattccctctttttcagctcctcctcgtacctctggtagaattcggctgtgaatccatctggtcctggactttttttggttgttacactattaattattgcctcaatttcagagcctgttattggtctattcagagattcaacttcttcctggtttagtcttgggagggtgtatgtgtcgaagaatttatccat

SEQ ID NO: 142571 - DNA, 2674 bp, Homo sapiens
atggatgaattcctggacacatacaccttcccaagactacaccaggaagaagttgaatccctgaatagaccaataacaagttctgaaattgaggcaataattaatagcctaccaaccaaaaaaagtccaggaccagatggattcacagccgaattctaccagagaaccaaagacaaaaaccacacgatcatctcaagagatgcagaaaaggcctttgacaaaattcaacagcgcttcatgctaaaaactctcaataaactagcatctctaacggcatttacctgtccctactttacagagaagggggacattgagaaacatgccagaagtctcacaactaagctggtgatgctgctggagtggtggtcgggcacggaatgcaccatcttcacggacccgcgcgcctacctcaagtatgggaaggaaaatgccatcgtggttctcaaccacaagtttgaaattgactttctgtgtggctggagcctgtccgaacgctttgggctgttagggggaacagctttgccatctactggagagctgtggcccatgacggtgggtgagatggctggtgctcatctctgccaccctggaaggggcctcaaggacatgctggcagcgggtgtggagggcaccgagcacatctcctggtctgggttttactcccagcttggaccagctgtacccggagatcccactgggctccgcagcctgctctgtgagcggagactcctgtttgcctcaactgcagagctcagcagaggctccaaggtcctggccaagaaagagctggcctatgtcccaattatcggctggatgtggtacttcaccgagatggtcttctgttcgcgcaagtgggagcaggatcgcaagacggttgccaccagtttgcagcacctccgggactaccccgagaagtattttgcaccagagcagctgtgtcccaagggctcctgcaggactgtgaccgtgggacccccatgtgacttccacaggacacgtgactgtgtggtcctgtgcgactccagggctgtgtgtgaccatagggctgtgtataacctcagggatgtatgtgaccatggggccgtgtgtgaccgtggggccacgtatgactgtggggccgtgtatgaccatggggccgtgtgtgaccccagggctgtgtgtgaccccagggctgtgtgtgaccatggggccttcctgattcactgtgagggcacacggttcacggagaagaagcatgagatcagcatgcaggtggcccgggccaaggggctgcctcgcctcaagcatcacctgttgccacgaaccaagggcttcgccatcaccgtgaggagcttgagaaatgtagctgacctcggagtctggaaccctaaatggccatcgtgttccttgatgacctctattggcacaatgccatgtactccacacagtgtcaccttcaatccccacaacatcctggcaggcagctcttactcccggagaggagagagaaaagcaggctctggagtctcagcagctcacttgggcctgcagaaccgagggcccaccgggccagccacctccgaggacagcatcgtcatcatcactgacttcttgtctgatggtgcaggcaacagtctgccctgtgactcagttctgtggcatatgaaggcaggagaatcacccacctgcccgaaggagacctttagaccttctcctaggagtaaaagtagatcaaacagcaaagaagtagaggatccagagaagtgcagtgtgcgtaggaacagaaaaggtgaaagaatatttccggaggagcttatggggaggatcccactggaagacatccctgaagacgatgacgagtgctcggcctggctgcacaagctctaccaggagaaggatgcctttcaggaggagtactacaggacgggcaccttcccagagacgcccatggtgcccccccggcggccctggaccctcgtgaactggctgttttgggcctcgctggtgctctaccctttcttccagttcctggtcagcatgatcaggagcgggtcttccctgacgctggccagcttcatcctcgtcttctttgtggcctccgtgggagttcgatggatgattggtgtgacggaaattgacaagggctctgcctacggcaactctgacagcaagcagaaactgaatgactgactcagggaggtgtcaccatccgaagggaaccttggggaactggtggcctctgcatatcctcccttagtgggaacacggtgacaaaggcctgggtgaaacccctgctgggcacggcggaagtcacgacctctccagccagggagtctggtctcaaggccggatggggaggaagatgttttgtaatctttttttccccatgtgctttagtgggctttggttttttttttgtgccgagtgtgtgtgagaatggctgtgtggtgagtgtgaactttgttctgtgatcatagaaagggtattttaggctgcaggggagggcagggctggggaccgaaggggacaagttcccctttcatcctttggtgctgagtttttttgtaacccttggttgaccagagataaagtgaaaagtgctttaggtgagatgactaaattatgcctccaagaaaaaaaaattaaagtgcttttctgggtcgaaaaaaaaaaaaaaaaaaaaaagtcgtatcga

SEQ ID NO: 142572 - DNA, 2652 bp, Homo sapiens
acccagattcataaagcaagtccttagagacctacaaagagacttagactcccacacaataataatgggagactttaacaccccacggtcaacattagacagatcaacgagacaggaagttaacaagcatatccaggaactgaactcagctctgcaccaagcggacctaatagacatctacagaactcaccaccccaaatcaacagaatatacatttttttcagcaccacaccacacctattccaaaattgaccacatacttggaagtaaagcactcctcagcaaatgtaaaagaacagaaattataacaaactgtttctcagaccacagtgcaatcaaactagaactcaggattaagaaactcactcaaaaccgctcaactacatggaaactgaacaacctgctcctgaatgactactggggacataacgaaatgaaggcagaaataaagatgttctttgaaaccaacgagaacaaagacacaacataccagaatctctgggacgcattcaaagcagtgtgtagagggaaatttatagcactaaatgcccacaagagaaagcaggaaagatctaaaattgacaccctaacatcacaattaaaagaactagagaagcaagagcaaacacattcaaaagctagcagaaggcaagagataactaagatcagagcagaattgaaggagatagagacacaaaaaacccttcaaaaaatcaatgaatccaggagctggttttttgaaaagatcaaccaaatttgatagacccgctagcaagactaataaagaagaaaagagagaagaatcaaatagacgcaataaaaaacgataaattgggatatcaccactgatcccacagaaatacaaactaccatcagagaatacctataaacaccctctacgcaaataaattagaatatcctagaagaaatgggataaattccctggacacatacactcttccaagactaaccccaggaagaagttgaatccctgaatagaccaataacaggctctgaaattgaggcaataattaatagcctaccaaccaaaaaaaaaagtccaggaccagatggattcgacgagccgaattctaccagaggtacaaggaggagctggtatcattccttctgaaactattccaatcaatagaaaaagagggaatcctccctaactcattttaatgaggccagcatcatcctgataccaaaacctggcagagacacaacaaaaaaaagagaatttcagacccatatccctgatgaacatcgatgcaaaaatcctcaataaaatactggcaaaccgaatccagcagcacatcaaaaagcttatccaccatgatcaagttggcttcctccctgggatgcaaggctggttcaatatatgcaaatcaataaacataatccatcacattaacagaaccaaagacaaaaaccacatgattatctcaatagatgcagaaaaggccttcaataaaaattcaacaccccttcatgctaaaaactctcaataaactagggttggaagttctggccagggcaataaggcaggagaaagaaataaagggtattcgattaggaaatgaggaagtcaaattgtccctgtttgcagatgtcatgatagcatatttagaaaaccccatcgtctcagcccaaaatctccttaagttgattagcaacttcagcaaagtctcaggatacaaaatcaatgtgcaaaaatcacaagcattcctgtacaccaatagcagacaaacagagagccaaatcatgagtgaactcccattcacaattgctaaaaagagaataaaagagctaggaatccaacttacaagggatgtgaaggatctcttcaaggagaactacaaaccactgctcaatgaaataaaagagtacccaaacaaatggaagaacattccatgctcattgataggaagaatcaataacatgaaaatggccatactgcctaaggtaatttgtagattcaatgccatccccatcaagctaccaatgactttctccacagaattggaaaaaactactttaaagttcatatggaaccaagaaagagccctcattgccaagacaatcctaagccaaaagaacaaagctggaggcatcgcactacctggcttcaaactatattacaaggctgcagtaagcaaaacagcatggtactggtaccaaaacagagatatagaccaatggaacagaacagagccctcagaaataataccacacatctacagccatctgatctttgacaaacctgacaaaaacaagaaatggggaaaggattccctatttaataaacggtgctgggaaaactggctagccatatgtagaaagctgaaattggatcccttccttacaccttatacaaaaactaattcaagatggattaaagacttaaatgttagacctataaccataaaaaccctagaagaaaacctaggccataccattcaggtcctaggcatgggcaagggcttgatgagtaaaacaccaaaagcaatggcaacaaaagctgaaatagacaaatgggatctaattaaactaaagagcttctgcacagcaaaagaaactaccatcagagtgaacaggcaacctacagaatgggagaaaatttcacaatctacccatctgacaaagggctaa

SEQ ID NO: 142573 - DNA, 704 bp, Homo sapiens
tttgaacataaacaacattttaatttgacttaagactatacatataatcagtgttgaaagaaataaattcctggaaacaatttgtaatctttcttgctaatccttagctgctcatcatggctgagtctaatctcgaaggcatctagacttgattaagatacctttactaatgcacccgaaatctgttattagcttgacatcagacacaggacttgaggacagcttagcagctcttgacagcagctggcaggaattatgtaatgtgagagtcttctggctttcagagaccactttcctcctccagggcagaaaactcagctgtttggccttggtttttgcgtctgcaaccaccgcttgccatggtttccttgtgggtggagggtactttcccgccccctggtttcgggcttgcccacgtggcttgctctggccatggaatgaagcagaaacgaaagcctgccagttctgagcctatgccggaagacgccttgggcggttccgcggtccctgtgcgcttccaccttcacccagaaggacttctctggtgcagccgctgcttcttcagccacggcccaaaaggatcggagccccctggccgatccgcaggtctgcagggagccacagagcgcagcggccggcccagcgttcaagcccaagcacaggcctgcgagaaccttgttccagccaccgtttgggatggttga

SEQ ID NO: 142574 - DNA, 647 bp, Homo sapiens
ctggaatttcctcagattatttacatgtacctgtctatataaataatctgaggaaattccagcttattgtgaattttctctggctgcccaagggactgattaaactcaaatcttgagagttcaaaggtcaacactggaggtagctttgtaaaccaacgctcttgtccatacttcaccgagtgatcggagggaagaagctcaacatcaccctccaccatggccccttccaaacactcgtctaagttgcgataaccgtttacctgaagaggatactggccgaaggtctcattgttacaaaagggttttccttcacgaaccccttcagtcaggaaagtaccatagaacagctgcaccattggattttcagatttgttcctgggactgctgcttttaggaaaaggagacaattctggattgtttggattaagatatgtgctacataaaatccaagcatcattcaaaagcaaaaatagtgcattttcatcaacccccaaagagccaggtatgatctgctgttcctcagatgatcggaatgctccctttaatagatccagggctgcagacgggtctacaaattttctatttgatcccatcattagagcaaacaaatactgaagctcttgcataaacatgatatttctcttttc

SEQ ID NO: 142575 - DNA, 317 bp, Homo sapiens
atatgaagcggagccgctgccgcgaccgaccgcagccgccgccgcccgaccgccgggaggatggagttcagcgggcagcggagctgtctcagtctttgccgccgcgccggcgagcgccgcccgggaggcagcggctggaggagcggacgggccccgcggggcccgagggcaaggagcagccgcctgccttggcctcccaaagtgccgagattgcagcctctgcccggctgccaccccgtctgggaaggcttctgggattccagaaagcctgcaggtgttggagcctcaaccctcatatcctcatggccctgctgagg

SEQ ID NO: 142576 - DNA, 2580 bp, Homo sapiens
atgcgcgcgtgcggggggcgggacgcgtgtggggccgccgccgcggcgccgctgcgggtgccgccggcgggtgtgggccggggcgcccgcggcggtgccgcgcgagcccagaatggtgggtccaccgacagcttgcactgtgtgcccggaaaagctgcagacactcaatgccagcccatgaaagcagccaagagggagactgtaccctgcaaagccacaggggcagagctgcccaagaccatgggaacccaccttttgcatcagtgtgacctggataattcccacgtgtttgtgggtgatggtgaacacttcttcatgtcattggagttggaaatggctacaaagcctgatgggaaatcctttattccacggtcattcggcagtttcccacggcgggggaacagttttaactcgcccgtggggagggtggagccggaggtcagtcctacaaatgaggttttgagggcagagagcggagaagactcaggaacgcggctcccaggattcgcaaacccagttcccggacactggcagcgcggcccgcagcctccaccggctgtgaagctgaccaacagcgacaggcggggccgggatcacgtgaccgacgtctgtcctgagaggctgggccggcggcggctgcggcgggagaccggtgacccgcggctgggcgcctcggccatgactgcggagctgcagcaggacgacgcggccggcgcggcagacggccacggctcgagaaaacgggaaatctgtgccagttgttcaaatacgagtttggagatgagaaactatatttgtcgtacaaagctggcagacagataccctcagtctctctttcaattgcctgaatttcgaagacttgttctcagttatagtctgccacaaaatgtacttgaaaattgtcgaagtcatacagaaaagagaaatatcatgtttatgcaagagcttcagtatttgtttgctctaatgatgggatcaaatagaaaatttgtagacccgtctgcagccctggatctattaaagggagcattccgatcatctgaggaacagcagggaactgagtttcaaagagggttgaattctctggttaaactcaccccggcggccgctgcctcccgggcggcgctcgccggcgcggcggcaaagactgagacagctccgctgcccgctgaaatccatcctcccggcggtcgggcggcggcggctgcggtcggtcgcggcagcggctccgcttcatatctgcagctggggcccgcgggcgtcagcgccgcgactgtcccagctccgcactgccccgggccgcagcgcagccgcgccaaccaccagccgcggccaccatggccggacgggctccctaagccaccgaccccagcccgcggcgccttcgacccttctagcatgtttgatgagattagagagatctccctacctctaagtgccatctgggcccccgatatcatcatcaatgagttcctatgttttgaaatgaccaacatcctctctgtgacaaccaagttctcttgtgtttcatatagtgtggacattgaaagatcccctgaccttccctatgtttatgtgaactcatctgggaccattgagaactataagcccatccaggtggtctctgcgtgcagtttagagacatatgcttttccatttgatgtccagaattgcagcctgaccttcaagagcattctgcatacaggaaaacccttttgtaacaatgagaccttcggccagtatcctcttcaggtaaacggttatcgcaacttagacgagtgtttggaaggggccatggtggagggtgatgttgagcttcttccctccgatcactcggtgaagtatggacaagagaggggaaatggaatggccaaaactaaaggaaaacccctcttaccgccttttacgtggctccggcgacacgtccgggccgcgacggccgtgcgcgcgactcccgcgagccgcggcgcccagacgccgccgcgctcgccgcgcgacgccgcctcgcgcgccaccacgacgcgcaccgcgcgcgctctggcagccgaacgcgggcggcggccagccaccgccgacactcaccggcgcttcgatgccgcgcccgtgccagccgcgcccacggcgcgcgcggcgccgcaccgccgagcgcgcgccgaggccgcgcctgcgcccgacgtccgtgcccgctgcgtggcagccgtgcctgccgccgcgagcatcggcgccgctctcgtaccccgcccggccgcccaactctgcgacagggcgctaacactgcgccccctgcgcgggactgacgatcgcctggcaccgcgtctccatggagtcctgcccactaccggtccgccgttgggcagcgaccagtacgaggcgtctccgttccgaacccctctgtctgtctcacccatccttactgacatgggtcgcgacccatctcatccccgatgcgcctacgccagggcgcgagtcctgtcggcgtcatcactccggcataacccagactcgctgcctctccgtcgccaactctttcttccctgtgttcctcccatctttctggaacactcaatgaacacttactag

SEQ ID NO: 142577 - DNA, 672 bp, Homo sapiens
atgccgccgcgggttctgagcgaggccgagccgcccccgctccgtgccccgacccctcccccgcggcgtcgtagcgcgcccccagagctgggcatcaagtccgttatggtgggcgacggcgccgtgggcaagagcagcctcatcgtcagctacacctgcactgggtaccccgcgcgctaccggcccctgccgctggacaccttctctggtccgtccgttcattcgcccgaggattttgaccgacttcgttccctttgctacccggataccgatgtcttcctggcgtgcttcagcgtggtgcagcccagctcctttcaaaacatcacagagaaatggctgcccgagatccgcacgcacaacccccaggcgcctgtgctgctggtgggcacccaggccgacctgagggacgatgtcaacgtactaattcagctggaccaggggggccgggagggccccgtgccccaaccccaggctcagggtctggccgagaagatccgagcctgctgctaccttgagtgctcagccttgacgcagaagaacttgaaggaagtatttgactcggctattctcagtgccattgagcacaaagcccggctggagaagaaactgaatgccaaaggtgtgcgcaccctctcccgctgccgctggaagaagttcttctgcttcgtttga

SEQ ID NO: 142578 - DNA, 1092 bp, Homo sapiens
atggaccaccattacccaccaacagggatattcattcatcctcgtccatgtcctacaagggagcggcggggtagcgcgccccaagagctgggcatccagtgcgtgctggtgggcgacggcgccgtgggcaagagcagcctcatcgtcagctacacctgcaatgggtaccccgcgcgctaccggcccactgcgctggacaccttctctgttgcgaatagatcccgttcatatagatgtcagacggatcagattcgtaacggatcgaatgcgttcgaatcgttcaagtccaatccaatccatccggtcagatccgatccataccgttcatgtccattgcgcccgaactcgtatcgaatacagccgattcggatcagatcgcagctcggtcgcattcccatctccgtcacgaatcagatcgcgattccgattcacgattccatcgagattgcggtccggatccggactcgaatccatacgcatccggaccgcatcgcgcatccgatcgcaatgcacttcgcagttagagtccgattgcggattcgggtgcatatcgatccgcgtgcgatcctgatcgcatccagttccagttcggttcgatcggatcgatatgcatacgtgacgatacgaagccgatcgagacgcatacatccagatgcagacgcatcgtacgccatcgcgttcggtccaatggatagcggtgcagtccggtccgaatgcatccattcgcatgatatcgatcgatcagatcagtcgatacgatcaagcagtcaatcgatcgatcgaatcaatcgtatgttcgatcgatcaatcggacagaccgtccgagcaatcagtcagtccgatcgtacgatcgaagatccgatccatccgatcgatcagtcggtcgaatcgatcgtcagatcgtcctatcgatcaataaatggttccagccatgcaattcatcgattgattcattcgttcattgatacctgcatccgagagaacgatcaatcgtacggcgtacaatcgatcattggtccaataagagatcagccagaatttactgttaataaaactacaagagtcatcgtgttttatctatcgtcgttctaa

SEQ ID NO: 142579 - DNA, 513 bp, Homo sapiens
ccttgccccaaggcccagctctgcccttcattcctttagcacctccccgtaccttccttccatgggtcttaagctgtggcaagtccttaagctgggacggccagcgccagccctgcccccaacaggtcactcagcggctcggagcccacgtcctcctcggtgacacaggaaaatggtgcagatgtgcaagggcatgagagggtcccatggaaggcacgttccagaaggttctgtcccatggaaggcacgttccggaaggttccatcccatggaagccacgttccagaagtttccatgctgtggaaggcatgttccggaagtttccgtcccgtggaaggtcactctgtgcggtgtgcactgaccccagccagtggatgttccccgtccaagagcaaagctacagtcggctgcaggtgcagtgacttttgcacagtggaagaatttctccagaagatattcctgcaggtggaatcactggatcgtaggcccagatgtcttccacttacttgatta

SEQ ID NO: 142580 - DNA, 1213 bp, Homo sapiens
atgctagccgccggggcggcccgtcgccccacactggagcgcccgagcgggcaccgcggcgcgaaatatcgactcggtccgtgcattggtctgggctgtgaaaacaaccaggttgccgcattccgtgaaacgctgggcgatatcgatcctgaacgcgttcatttcatgatctgccaacagcaggatgatgagatcgaagccggaatcgagcatttgcatcagctgtataacgtgatgcgcaacgataaacgcgagccaggcaaactcagcgaactgaagtttggtctggagtgcggtggttctgacggtctttctggtattactgctaacccgatgctggggcgtttctctgactacgtgattactaacggcggtactaccgtactgaccgaagtgccggagatgtttggcgcagagcagttgctgatggaccattgccgcgacgaagcaacgtttgaaaaactggtcaccatggtcaacgacttcaaacagtactttattgcccatgatcagccgatctatgaaaacccatcgccggggaacaaagcgggcggtatcaccacgctggaagacaaatcacttggctgtacccagaaagcgggttccagcgtcgtggttgacgtgctgcgttacggcgagcgtctgaaaacgccagggctgaacttgttaagtgcgccgggtaacgatgccgtagcgaccagcgccctggcgggtgcgggctgccatatggtgctgttcagtactggtcgtggcagtggtaccatcggatttaccgaacacagtgatgcgcacactccgtgtcctctcgtactaggagcagcccccctcagttctccagcgcccacggcagatagggaccgaactgtctcacgacgttctaaacccagctcgcgtaccactttaaatggcgaacagccatacccttgggacctacttcagccccaggatgtgatgagccgacatcgaggtgccaaacaccgccgtcgatatgaactcttgggcggaacccttggtcttccggcgagcgggcttttcacccgctttatcgttacttatgtcagcattcgcacttctgatacctccagcatacctcacagcacaccttcacaggcttacagaacgctcccctacccaacaacgcataagcgtcgctgccgcagcttcggtgcatggtttagccccgttacatcttccgcgcaggccgactcgacca

SEQ ID NO: 142581 - DNA, 607 bp, Homo sapiens
aattccccttttctgcatccgccagaaacgaatgatattcaggccattcataagcagaaaactaccctcaatcatcgtgccgcctatcgaccccgcccagaagttgtgaatcacccagcaacacgttgaaaaccacattacgcagcgcatggtcagccctttacagcagaatagcgcccaggtactgacaatcgtgccgataaccggcaatagttcgacaggatgatggaacttcgcgaggccaattccgccagtcagcacaataaaaatcgccattacccataagctgcgcgtgcgtaaggtaatcaatgtacgaatggcattaaggatggcactggcaccagcgggataggtgcccagaagaaaaaaatgtacgccaataacggcgctatagaccgaaagctgctttttgaagcgacgttcgtcacgattgaaaaatgttgtgataccaatcagaaaggcgatgacacccacgccctgggccagccaatacgcggtcatgataaatccttagcaggtatggaaaagcaaacggcgcttcacattatgaaacgccgttttttattaacaactcatttcgactttatagcgttacgccgcttttgaa

SEQ ID NO: 142582 - DNA, 1473 bp, Homo sapiens; identical to SEQ ID NO: 118262
  misc_feature (1)...(1473): n = a,t,c or g

SEQ ID NO: 142583 - DNA, 2943 bp, Homo sapiens
ctattttggtgatctcacaaaccacacttcttctggatcatcaatgtactgtgccagtgaggaaagaccgaactgcacgcttttcgccgtaacatcgatatcttcttcgcggttataacgaatcgcccgacgtaacagcgcctgcgtttcatcgtcgtctgccggaacatcatgatggcggtacagccattcgcttaccgcttcacgcgttggcgcgcaaagcattgaaggcagcagcgtgctgtcgttttccatttttagcaaatgcggtttaccgtcacgcatgaccgccactgaacagtttgctgtaccgtaatcaaaaccaataaacacgaaataatccccatgccggtgaagaaggggcgtgactttagcgaaatgttgccgtcgcgacaaccggaatatgaaagcaaagcgcagcgtctgaataacgtttatgctgaaagcggatgaataaggagatgcgatgtataccctgaactggcagccgccgtatgactggtcgtggatgttgggatttccattcattccgcgccagcgcacgttactggcctgcaacaaaatatcagccgtaaagccttgcagtccctgataggccggttcatcaatacgcgaagaaatgaccgggcgcggcaacgttgattggctctgcccctgctgcgcggcaccgttttcaccattcgcggtttcattaagcgggatgaggttgtcaagattcacttgcgggaattgcagcctcagctgccattccggtttctctgtcagcgtaacctgtgcttgcccgcttagcgtactatcattggcggtcaaactaatttggttaaatgaaaggcgtttatgtgactcctgccactgggcctggaaactcccctgcccctgaataccttgttttggtaaatcggcaccctgcaactgccagttaatttgatcaatagccgccgttaaatcatgcggataatcagaagcatctaccgtaccgataagggatatcgtgagatcgcgctgatcgcgattaacccgcccggagaactcaaatgaaccacgatgttggggatcttgttccatttgcaggcgaatattgcggattgtcacctgctcgtcatcttcatgccgaacgcaggcgcagtgctggtgattggtctgggctgtgaaaacaaccaggttgccgcattccgtgaaacgctgggcgatatcgatcctgaacgcgttcatttcatgatctgccaacagcaggatgatgagatcgaagccggaatcgagcatttgcatcagctgtataacgtgatgcgcaacgataaacgcgagccaggcaaactcagcgaactgaagtttggtctggagtgcggtggttctgacggtctttctggtattactgctaacccgatgctggggcgtttctctgactacgtgattgctaacggcggtactaccgtactgaccgaagtgccggagatgtttggcgcagagcagttgctgatggaccattgccgcgacgaagcaacgtttgaaaaactggtcaccatggtcaacgacttcaaacagtactttattgcccatgatcagccgatcgccgccaatcgccagcaagttcgccataccaatcgcgatatagatggtcgggtcgaaacgagcatcaatacgcgccacccgcatgttttttttgccggtatcttcggcatccgcggcaaataacgccgactggcgatcttccatgaccaagtaggtggaaaacgccgcctgtgccagcttaaagcgttcatgcaaagcatcgccgttgcgcttaatcatgatcgccatcactggcatcggcaacagggaaaataaggtcaactgccagctaatttgcgtagacatcataatcaacacagcgcagcccatcaccagtgaatccaccagcgtcagcaccccttctccggcggcaaacacgacgcgatcgacgtcattggtcgcacgagccatgaggtcaccggtgcgatgacgcaggtaaaactcaggatgctgccggcttagctgacggtaataatcttcacgcagttcaacagccagttgataagacgcaccaaacagcaatacccgccagacgtaacgcaggagataaaccacaacggcaatcagcaccatggtggcgatccacatcaggatctgcccggtagtaaagtgttgttctgtcacgccatcgacaacaataccaaccacttttggcggaaccagttgcagcatcgcgataatgacaagcaaggcgacagccccgagatagcgacgccattcccgacggaaataccagcgctgcgtttccagctggccgatttcgctccacgcgacaatttccccagtgaagctgcactcctgacagtccactctagaggatccccgggcaagcgtaatgccgtcgatatccggcagatcaaaatccaccagtgcggcagcaaacggttcgctattttgcagtgtctctaaagcctgcgcggcattgccaacagcaacaatctgcgcaccactggttttcagcatctcaatggtaattcgctgggttagcgggttatcttcaattaacagcaaacgtaaaccgtcaagacgcaccgcctgattgactgtttttggcacgggtgccgtggcaacacgtaacggcaagcgtaaacaaaaacagcttccaacctccggcgtgctggtggcgctcagttcgccgcccatcgcctgggccagacggctactgatagtcagtcccagcccggtgccgccgcgtttgccgcttacctgcacaaatggctggaagatttctgccagtttcgcgggatcaataccgcaaccgctgtcttccacttcgaccagccattgctcgccatcagtgcgactacgcaagataatgtacccttcgtcagtaaaacgcagggcgttgctcaacaggttggttataacctgacgaatacgtcgtggatcgcccat

SEQ ID NO: 142584 - DNA, 2409 bp, Homo sapiens
atgacccctgcccccactgcacaggacctccagactcagggagaggagaaagatgatggtgttaaggaaaccgtgtggaccccaggtctccagcaggtaggaagtttggaactggccatattctatcccaacaagtacaaggctagccaggctggaacatatcgacggtccttcttaggtcactctgtgcggtgtgcactgaccccagccagtggatgttccccgtccaagagcaaagctacagtcggctgcaggtgcagtgacttttgcacagtggaagaatttctccagaagatattcctgcaggtggaatcactggatcgtgttcacgttcacgcccacaatacgcgcacgaatctgagcgatctggatcagtatcgctatcaacctgattttcaggatctgcctgcgcaagcggcagatcgtgaagtgcagatctatcgtcgcgctaacggcgatgtcggggtgcgtaatgagctgtggatcctgccaaccgtgggctgtgtcaacggcatcgcgcggcagatccagaaccgttttctgaaagagaccaacaacgccgaaggtactgacggcgtgttcctcttcagccacacctacggctgctcacagctgggcgacgatcacattaatacccgcaccatgctgcaaaacatggtgcgccacccgaacgcaggcgcagtgctggtgattggtctgggctgtgaaaacaaccaggttgccgcattccgtgaaacgctgggcgatatcgatcctgaacgcgttcatttcatgatctgccaacagcaggatgatgagatcgaagccggaatcgagcatttgcatcagctgtataacgtgatgcgcaacgataaacgcgagccaggcaaactcagcgaactgaagtttggtctggagtgcggtggttctgacggtctttctggtattactgctaacccgatgctggggcgtttctctgactacgtgattgctaacggcggtactaccgtactgaccgaagtgccggagatgtttggcgcagagcagttgctgatggaccattgccgcgacgaagcaacgtttgaaaaactggtcaccatggtcaacgacttcaaacagtactttattgcccatgatcagccgatctatgaaaacccatcgccggggaacaaagcgggcggtatcaccacgctggaagacaaatcacttggctgtacccagaaagcgggttccagcgtcgtggttgacgtgctgcgttacggcgagcgtctgaaaacgccagggctgaacttgttaagtgcgccgggtaacgatgccgtagcgaccagcgccctggcgggtgcgggctgccatatggtgctgttcagtactggtcgtggcacgccgtatggtggatttgtgccgacggtgaaaatcgccaccaacagtgaactggcggcgaagaaaaaacactggatcgactttgacgcgggatttatcatgaccgcgtattggctggcccagggcgtgggtgtcatcgcctttctgattggtatcacaacatttttcaatcgtgacgaacgtcgcttcaaaaagcagctttcggtctatagcgccgttattggcgtacatttttatcttctgggcacctatcccgctggtgccagtgccatccttaatgccattcggcccttcagcgcctcggaggcgccgtaccccgcccctcccgcctctcctgccccgtacgctctgcccgtcgctgagccggggctggaggacgtcaaggacggagtggacgccgtccccgccgccatctccacctcagaggcggctccctacgcccctccctccgggctggagtccttcttcagcaactgcaagtcacttccggaagccccgctggacgtggcccccgagcccgcctgtgtagccgctgtggctcaggtggaggctctggggcccctggaaaatagcttcctggacggcagccgcggcctgtctcacctcggccaggtggagccggtgccctgggcggacgccttcgccggccccgaggacgacctggacctggggcccttctccctgccggagcttcccctgcagactaaagatgccgcagatggtgaagcggaacccgtggaagaaagtcttgctcctccagaagagatgcctccaggggcccccggggtcataaacggtggggatgtttccaccgtagtggctgaggagccgccggcactgcctcctgaccaggcctccacccggctccctgcagagctcgagcctgagccctcaggggagccaaagctggacgtggctctagaagctgcggtggaggcggagacggtgccggaagagagggcccgtggggatccggactccagcgtggagcccgcgcccgtttccccagaacagcgcccactggggagcggagaccaggggctgagctga

SEQ ID NO: 142585 - DNA, 2931 bp, Homo sapiens
gccggctcgagactcccgggcgccgaggcgctgccgcccgcctcgccgccccacgccgaaggaccacgcgcccgccgccgccagcctctcagcgctcccatgatcgcccggtgccttttggctgtgcgaagcctccgcagttcatctggaggctcgcggctctcatatctagtgcaagggattttcagcgaaaattgtgaacccaggtttccattccgaggtgtaaacgcggccatcccagctgcaagcctcaagtcgactctagaggatccccgtttccgtctgggcttcttgcattctgggacagccaagtctgtgacttgcacgtactcccctgccctcaacaagatgttttgccaactggccaagacctgccctgtgcagctgtgggttgattccacacccccgcccggcacccgcgtccgcgccatggccatctacaagcagtcacagcacatgacggaggttgtgaggcgctgcccccaccatgagcgctgctcagatagcgatggtctggcccctcctcagcatcttatccgagtggaaggaaatttgcgtgtggagtatttggatgacagaaacacttttcgacatagtgtggtggtgccctatgagccgcctgaggttggctctgactgtaccaccatccactacaactacatgtgtaacagttcctgcatgggcggcatgaaccggaggcccatcctcaccatcatcacactggaagactccagtggtaatctactgggacggaacagctttgaggtgcgtgtttgtgcctgtcctgggagagaccggcgcacagaggaagagaatctccgcaagaaaggggagcctcaccacgagctgcccccagggagcactaagcgagcactgcccaacaacaccagctcctctccccagccaaagaagaaaccactggatggagaatatttcacccttcagatccgtgggcttaacgccaatatcggcaactcggcggtcacctcttccatcgaagaagaagtggaaaagctggtatggtccacgcgctggggagcggatacggtgatggatctctccaccggtcgctatattcacgaaacccgcgagtggattttgcgtaacagcccggtgccgatcggtacagtgccgatctaccaggcgctggagaaggttaacgggatcgccgaagatcttacctgggaagcgttccgcgacacgctgctggaacaggccgagcaagcaaagaccacgattgaagagccgagccggaggcagctgggaaacatgaagagcgttttgctgctgaccacgctcatcgtgcctgcacacatggtggccgcctggagcaataattatgcggtggactgccctcaacactgtgacagcagtgagtgcaaaagcagcccgcgctgcaagaggacagtgctcgacgactgtggctgctgccgagtgtgcgctgcagggcggggagaaacttgctaccgcacagtctcaggcatggatggcatgaagtgtggcccggggctgaggtgtcagccttctaatggggaggatccttttggtgaagagtttggtatctgcaaaggttttattttcatgtcacagtctacatccgtgcttcgtcgtaatggatttacttttaaacagttttttgttgctcacgatcgctgtgcgatgaaagtgggaacggatggtattttattgggcgcatgggcaccggtggctggggtaaaacgttgccttgatatcggcgcgggtagcgggttgctggcattaatgctggcgcagcgaaccgatgacagcgtgatgattgatgcagttgaactggaaagtgaagctgccgcgcaggcgcaggaaaatatcaaccagtccccgtgggcagagcggattaacgtccatacggcggatattcagcagtggatcacacagcagacagcgggagaatgctttagcgatcgcttagtcattcgtgggccagacccagaactattccgaagcgtatacggcgctgacccaggctttttctctgtttatgtaatgattgccgggggaaaggatcgacggaccggaatgggccgcagcccggtttattccagccttccacctccaaacacggcccggttacataaccgcgtttatacgcaactagcaaattccagtggtgaattaaaacgccacaaacaacgtgtggcaattgcccgtgcgttagccagcaatcccaaagtattgctgtgtgatgaagccaccagcgcgctggacccggcaacgacacgttctattctcgaactgctgaaagacatcaaccgccgtctggggttgacgattctgttgatcacccacgaaatggacgttgtgaagcgcatttgtgattgcgtggcggtcatcagcaatggagaactgatcgagcaggacacggtaagtgaagtgttctcgcatccgaaaacgccgctggcgcagaagtttattcagtcgaccctgcatctggatatcccggaagattaccaggaacgtctgcaagcggagccatttactgactgcgtgccgatgctgcgtctggagtttaccggatgtgatggttcaggtaaatcgaccctcacggcaagcctggtaaatgaactggcagcaagaatgccaacagaacacatttatctcgggcaatcgtccgggcgaattggcgaatggatttcacagctccctgttattggcgcaccttttgggcgttatctgcgaagtaaagcggcacatgtgcacgaaaagccctcaacaccgcctggcaatattactgcactggttatctatctgctttcctgctggcgggcgtacaagtttcgcaaaatgttgtgtaaaagccagcaaggctttctgctcatcaccgaccgctacccgcaggttgaagtgccgggtttcgctttgatggcccgctattggcaaaaaccacggctgtaa

SEQ ID NO: 142586 - DNA, 1273 bp, Homo sapiens
cttcccaccagcaaagaccacgactggagagccgagccggaggcagctgggaaacatgaagagcgtcttgctgctgaccacgctcctcgtgcctgcacacctggtggccgcctggagcaataattatgcggtggactgccctcaacactgtgacagcagtgagtgcaaaagcagcccgcgctgcaagaggacagtgctcgacgactgtggctgctgccgagtgtgcgctgcagggcggggagaaacttgctaccgcacagtctcaggcatggatggcatgaagtgtggcccggggctgaggtgtcagccttctaatggggaggatccttttggtgaagagtttggtatctgcaaagactgtccctacggcaccttcgggatggattgcagagagacctgcaactgccagtcaggcatctgtgacagggggacgggaaaatgcctgaaattccccttcttccaatattcagtaaccaagtcttccaacagatttgtttctctcacgggtcaggatccccaaattccagctatggtttctctgagtggtgcttctgttgttggtcttggtattctctcagcatcgagcaggtttgtgttgaggctgttctgtgcttggtgtggagcttacaaatctaaagtcatggctctgggaggggaagaacatgctaatgtggacagcaccaaggcagcactggagggctgtccaaagctaaaaaggatgaatacggttgtgcaggtgttactccaggagcacatcctgataaaccacctgcatgctaatctccatctcagaataggaaccagggaactggcctgggggctgtccatggcatggcctgagcatgctgattgccggcgctggaggatttcccccactacatctgatgcaaacctgacttggatgaaaaagtggagatttagaaccatagagaaacatcaggaatgtgcacgcgtagaagaaagactgtgcgaagaacagcaaaagtcaggcctggtcagaaacaacaacagcagcagcagcaacaacaacaacaacaacaacaacaacaacaacaacaacaacaacactgtgcatttcaataccgggaagtttcataggtgttggaagagctggaagtgcaaaagggaaaatggaggaggtctggaagtaataaaggaagaaggaacaatacccagaggtcagaagctgcatgcactcccacactggagctcacaagcttgccatgctggagatgctgttgtgtcaggtctgcatcttcaggatcagtgctga

SEQ ID NO: 142587 - DNA, 974 bp, Homo sapiens
tttcgtcagttttctcgtcagagtggggactggtaagagcgacctccccgccaggtcctgtgtgttgccggctgaagaagggtagctgaaaaattcagacccagcacagtgtttatgttggtcaaaaatagaaaactatgtctggcgcggccgaggcgggaggacccttcaggccaagagcagcctagcaacatggcgcaaccccatctctgtagtcctacctcagctccccccagccctcaagtatgaatccaacggttcaaggctccagtgagctatgatcccaccacagcattccagcctgcgaggattgaggacacaaagaccaacgagccaccacagctaccagtcccagaacccgctaatgctggggaacggaaaatgagggagttcaactctgcaacaacaggacctggcggggaggtcccggttaccaggctgcactccaaggagaagacagccctgctccaggcactgtaccgccactgtgacgtcgtcgaaggtccgcctctgtggcgtcgccgaaggcacccccaccttcacgcggagcccatcggaactcgaggcggggctgctgggtcttccaggagcgcccagacgcgggcaggtggccgccggtggccacaggcctgggcaggatggaagcgcccgcagacgcttccacgtctgcaggctctggctcggccgccgccacccataagctacgaggaggagctttacgactgcctggactactactactacctgcgcgacttcccggcctgcggggcagggcgcagcaagggccggactcggcgcgagcaggcgctgcgcaccaactggcctgcacctggcgggcacgagcgcaaggtcgcgcagaagctcctcaatggccagcgcaagcgccgccagcgccagctgcatcccaagatgcgcactcgcctcacctgagcctgggataccgaaggacctgttcgaagtatttactgtaactc

SEQ ID NO: 142588 - DNA, 312 bp, Homo sapiens
ggggtaagctcatcgcagtgatcggagacgaggacacggtgactggtttccctgttgggcggcataggggagcttaacaagaaccgccatcccaatttcctggtggtggagaaggatacaaccatcaatgagatcgaagacactttccggcaatttttaaaccgggatgacattggcgcttttaggttgctggggctctgctggttaaggaacaggaagcctgaccatctccctccactacctcttccctgtgctgttacacagtgtcattgttgatgttaaattaaagtcatattcttaattcaaaaaaaa

SEQ ID NO: 142589 - DNA, 795 bp, Homo sapiens
cccggctgcagggatggcggggaggggtaagctcatcgcagtgatcggagacgaggacacggtgactggtttcctgctgggcggcataggggagcttaacaagaaccgccatcccaatttcctggtggtggagaaggatacaaccatcaatgagatcgaagacactttccgttcacttggaagccttccgggcagtgttgtagaagccaaccctaatcagcgtgaccctccgctttgggatgaaattgattctaggcaattttctaaacccgggatgacattgggcatcatccttattaaaccaggtacattcgcaggagatgggtgcgggcatgcccctggaacgcccaaccagcaagtccaatccccggctgtcctggggagatcccccttccaagggagcaccccatattgacggccgccaaaggacttccatccttgcggcaggggccagggggcattgtttcattgcccgaaggaccttgcggctaagggggacttcctcatgaggccctcaagcccttcccctcgttttccagggccttttccccagggtttgccattcagccttctttactttttggagcctctgatttccaatttccctgctccttcccaaatccattaagaggctaaggtgaggcgcttctaggttgctggggctctgctggttaaggaacaggaagcctgaccatctccctccactacctcttccctgtgctgttacacagtgtcattgttgatgttaaattaaagtccatattcttgcttctctccagaaaaaaaaaaaaaaaa

SEQ ID NO: 142590 - DNA, 693 bp, Homo sapiens
atgaacaggttcacactggatgaattagtggttgagaatgaactagtacccactttgaggtccaggctctgtggccctgtgacccgcaggtattgggagactacagctaagacgccaggaacccctggaagcctagaaatggggccattgacatttagggatgtggccatagaatttttctggaggagtggcaatgcctggacactgctcagcaggatttgtatagaaagtgatgttagagaactacagaaacctggtcttcttgggtctgctgagtttgctggaggtccacttcagaccctgttcacctgggtatcaccacaaagagaaaaagaaaacagaagcagaagaatccaaaaaagcagcacagcaggagaaggagaagaggaggaggaggaggaggaggagaaaaaggagaggaggaggagaaggaggaggaggaggagaaaaaggaggaggagaagggaagaagaaggagaagaagaagaagaagaggaagaagaagaagaggaagagagtaaaaaggaaggggactgtgtttcagtaaggagtcacagcctcaccagtgttctgaatcctggtctgagagtcattaccaactgtggaaaacattcacgtaggagagtcacaatttcaacttttgatgaatccaggtgtgagattaagaacttcgacagcggggtggctttatga

SEQ ID NO: 142591 - DNA, 3020 bp, Homo sapiens
tggtgcctgacgcctggacacgtcggaattcctggtcgacccacgcgcccgcggacgcgtgggcggggcctttgtccctcgctgtggcctgatctccaggtctcgtcttcagcgctctgtgtcctctgctcctagaggtccaggctctgtggccctgtgacctgcaggtattgggagatctacagctaagacgccaggaacccctggaagcctagaaatggagaacctgaagtctggagtgtatcctctcaaggaagcaagtggatgccctggggctgacaggaatcttctggtgtactctttttatgaaaaggggccattgacatttagggatgtggccatagaattttctctggaggagtggcaatgcctgggacactgctcagcaggatttgtatagaaaagtgatgttagagaactacagaaacctggtcttcttggcaggtattgctgtttctaagccagacctgatcacctgtctagagcaaggaaaagagccctggaatatgaagagacatgcgatggtagatcaacccccagttacatattctcattttgcccaagacctttggccagagcagggcataaaagattctttccaagaagtcatattgagaagatatggaaaatgtggacatgaagatttacagttaagaacaggctgtaaaagtgtggatgagtgtaatctgcacaaagaatgttatgatgaactaaaccagtgtttgacaactacccagagtgaaatatttcaatatgataaatatgtgaatgtcttttataaattttcaaatccaaatatacaaaagataagacatactggaaagaagcctttcaaatgtaaaaaatgtgacaaatcgttttgcatgcttttacacctaactcaacataaaagaattcatattagggaaaattcttaccaatgtgaagaatgtggtaaagtctttaactggttctcaacccttactagacacagaagaattcatactggagagaaaccctacaaatgtgaacaatgtggcaaagcttttaagcagtcctcaacccttactacacataagataattcatactggagagaaaccctacagatgtgaagaatgtggcaaaacctttaaccggtcctcacaccttactacacataaaagaattcatactggagagaaaccctacagatgtgaagaatgtggcagagcttttaaccggtcctcacaccttactacacataagattattcatactggagagaaaccctacaaatgtgaagaatgtggcaaagcttttaaccaatcctcaacccttactacacataagataattcatgctggagagaaaccttacaaatgtgaagaatgtggcaaagctttttaccgattctcataccttactaaacataagataattcatactggagagaaattctacaaatgtgaagaatgtggcaaaggctttaattggtcctcgacccttactaaacataaaagaattcatactggagagaaaccctacaaatgtgaacaatgtggcaaagcttttaatgagtcctcaaaccttactgcacataagataattcatactggagagaaaccctacaaatgtgaagaatgtggcaaagcctttaaccggtccccaaaacttactgcacataaggtaattcattctggagagaaaccctacaaatgtgaagaatgtggcaaagcttttaaccaattctcaaaccttactaaacataagataactcatattggagatacatcttacaaatacctagaatgtgataaagcctttagccagtcttcaactcttactaaacataaggtaattcatactggagagaaaccctacaactgtgaagaatacggcaaagctttcaaccagtcctcaaaccttattgaacaaaaggaaccctatgagtgtgaagaatatggcaaagccttcaacaagtcctcaattcttaccagacataagataattctggctggggcacgagaaggtggggttttaaaagttatccaatcagcgacgctgggttgggaaccgtccaatcaggcctgcagctggagcggacaggacggcttcggggatgtggcggggcctttgtctctcgctgcagctggagctgcaggtctcgccttcactgccctgtgtcctctgctcgcagaggcccagcctctgtggccctgtgacctgcaggtattgagagatccacagctaagacgccaggaccccctagaagcctagaaatggatgacccgaggtatggaatgtgtcctctcaagggagcaagtggatgccctggggctgagaggagtcttctggtgcagtcttattttgaaaaggggccattgacgtttagggatgtggccatagaattctctctggaggagtggcaatgcctggacagtgctcagcagggtttgtataggaaagtgatgttagagaactacagaaacctggtcttcttgggtattgctgtctctaagccagatctggtcacctgtctggagcaaggaaaagatccctggaatatgaagatatgtgagatggtggatgaatccccagctatgtgttcttcttttaccagagacctttggccagagcaagacataaaagattcttttcaacaagtgatactgagaagacatggcaaatgtgaacatgagaatttacagttaagaaaaggctccgcaaatgtggttgagtgtaaggtgtacaaaaaaggttatgaactaaaccagtgtttgacaactacccagagcaaaatatttccatgtgataaatatataaaagtctttcataaaattttcaattcaaatagacacaagacaagacatactggagagaaacctttcaaatgtaaaaaatgtgatgaatcattttgcatgcttttacacctacatcaacataaaagaattcatattagagagaattcttaccaatgtgaagaatgtgacaaagtgtttaagcggttctcaacccttactagacacaagagagttcatactggagagaaacccttcaaat

SEQ ID NO: 142592 - DNA, 339 bp, Homo sapiens
cggacgcgtgggcaaggagttggaggccatttttgtttgccggatgtcaccggacatcaaacaggaattgctgcgatgcgacataagttgtaagggtggacattcaacggtgacagacctgcaggagctcctcggctgtctgtacgagtctcaggaggaggagctggtgaaggaggtgatggctcacttcaaagaaatatccctgcacttaaatgcagtagacgttgtgccatcttcattctgcgtcaagcactgtcgaaacctgcagaaaatgtcactgcagatcccaggatgatcagcacatgctttctttctggacggacctttgttccatatttg

SEQ ID NO: 142593 - DNA, 316 bp, Homo sapiens
tgcgggcatggcggccgccagtcctgggtctcccggctcaggtagtgccaggaagctgcgggcatggcggacagctgtcctcggtctggaggcgccatcctggctttcaaatctgctccagaggttatcaggcgggcactttcagcccaaagcctccgggccacctcctcatcctcagcctcgggggccggggccttctgtttgagtccatcgaagtactttccggaaacatccgccagttcctccgccacggccaggtatgtgctgggctgggcggccagctcggggctcttgaccagcagccagaagatgggcc

SEQ ID NO: 142594 - DNA, 400 bp, Homo sapiens
gtcaccggtggggcttgccccagcaaggccaccatccctgggaagacggtcatcgtgacgggcgccaacacaggcatcgggaagcagaccgccttggaactggccaggagaggaggcaacatcatcctggcctgccgagacatggagaagtgtgaggcggcagcaaaggacatccgcggggagaccctcaatcaccatgtcaacgcccggcacctggacttggcttccctcaagtctatccgagagtttgcagcaaagatcattgaagaggaggagcgagtggacattctaatcaacaacgcgggtgtgatgcggtgcccccactggaccaccgaggacggcttcgagatgcagtttggcgttaaccacctgggtcactttctcttgacaacttggtgct

SEQ ID NO: 142595 - DNA, 516 bp, Homo sapiens
  misc_feature (1)...(516): n = a,t,c or g
tctcgttctgtcacncaggctggagtgcagtggcgcaatctcggctcgctgcaagctctgcctcccggattcccgccattctcctgcctcagcctccctagtagctgggactgcaggcgccccccaccatgcccggctaatttttgatatttttagtagagacagggtttcgctgtgttagccaggatggtctcgatctcctgacctcgtgatccacctgcctcggcctcccaaagtgctgggattacatgtgtgagccaccacacccggccccatttttaatacgttttttaaagatgcatataaaatgcattaccctctggaagattccagtaacttactgaagcaagtttctcctctacatatacctatttctgccatgagtaactgttcattttcagtgagtcatttgagtttctgttattcaggtatacagagttcctgttgtctttttagtcaacaaagtttaacaaagaccataataaagatggctttcagcagctctgttattgggaa

SEQ ID NO: 142596 - DNA, 590 bp, Homo sapiens
gaacaaatagcctctgacacctgtcatctccagagagtggtgttcaaaaacatttccccagctgatgctcatcggaacctctgcctagctcttcgaggtcacaagactgtaacgtatctgacccttcaaggcaatgaccaggatgatatgtttcccgcattgtgtgaggtcttgagacatccagaatgtaacctgcgatatctcgggttggtgtcttgttccgctaccactcagcagtgggctgatctctccttggcccttgaagtcaaccagtccctgacgtgcgtaaacctctccgacaatgagcttctgggatgagggtgctaagttgctgtacacaactttgagacaccccaagtgctttcttgcagagggttgtcgttggaaaaactggtcaccttacagaagccaatttgcaagggaccttgctgctgtgttgggttttcagccgggagctgacacacctgtgcttggccaagaaccccattgtgaatacaggggtgaagtatctgtgtgagggcttgaggtaccccgagtgtaaactgcagaccttggtgctttggaactgcgacataactagcgagggctgc

SEQ ID NO: 142597 - DNA, 4787 bp, Homo sapiens
atgggcaaccggccgggcgcggtggtcacgcctgtaatcccagcactttgggaggccgaggcggctcccacgtgggacaagatggtgtcttcggcgcagatgggcttcaacctgcaggctctcctggagcagctcagccaggatgagttgagcaagttcaagtatctgatcacgaccttctccctggcacacgagctccagaagatcccccacaaggaggtagacaaggctgatgggaagcaactggtagaaatcctcaccacccattgtgacagctactgggtggagatggcgagcctccaggtctttgaaaagatgcaccgaatggatctgtctgagagagcaaaggatgaagtcagagaagcagctttgaaatcctttaataaaaggaaacctctatcattagggataacacggaaagaacgaccacctctagacgtggacgaaatgctggagcgcttcaaaacagaagcacaagcgtttacagaaacgaaaggaaatgtcatctgcctgggtaaagaagtctttaaaggaaaaaagccagacaaagacaataggtgcaggtatatattgaagacgaagttccgggagatgtggaagagctggcctggagatagcaaagaggtccaggttatggctgagagatacaagatgctgatcccattcagcaaccccagggtgcttcccgggcccttctcatacacggtggtgctgtatggtcctgcaggccttgggaaaaccacgctggcccagaaactaatgctagactgggcagaggacaacctcatccacaaattcaaatatgcgttctacctcagctgcagggagctcagccgcctgggcccgtgcagttttgcagagctggtcttcagggactggcctgaattgcaggatgacattccacacatcctagcccaagcacggaaaatcttgttcgtgattgacggctttgatgagctgggagccgcacctggggcgctgatcgaggacatctgcggggactgggagaagaagaagccggtgcccgtcctcctggggagtttgctgaacagggtgatgttacccaaggccgccctgctggtcaccacgcggcccagggccctgagggacctccggatcctggcggaggagccgatctacataagggtggagggcttcctggaggaggacaggagggcctatttcctgagacactttggagacgaggaccaagccatgcgtgcctttgagctaatgaggagcaacgcggccctgttccagctgggctcggcccccgcggtgtgctggatcgtgtgcacgactctgaagctgcagatggagaagggggaggacccggtccccacctgcctcacccgcacggggctgttcctgcgtttcctctgcagccggttcccgcagggcgcacagctgcggggcgcgctgcggacgctgagcctcctggccgcgcagggcctgtgggcgcagacgtccgtgcttcaccgagaggatctggaaaggctcggggtgcaggagtccgacctccgtctgttcctggacggagacatcctccgccaggacagagtctccaaaggctgctactccttcatccacctcagcttccagcagtttctcactgccctgttctacaccctggagaaggaggaggaagaggatagggacggccacacctgggacattggggacgtacagaagctgctttccggagtagaaagactcaggaaccccgacctgatccaagcaggctactactcctttggcctcgctaacgagaagagagccaaggagttggaggccacttttggctgccggatgtcaccggacatcaaacaggaattgctgcgatgcgacataagttgtaagggtggacattcaacggtgacagacctgcaggagctcctcggctgtctgtacgagtctcaggaggaggagctggtgaaggaggtgatggctcagttcaaagaaatatccctgcacttaaatgcagtagacgttgtgccatcttcattctgcgtcaagcactgtcgaaacctgcagaaaatgtcactgcaggtaataaaggagaatctcccggagaatgtcactgcgtctgaatcagacgccgaggttgagagatcccaggatgatcagcacatgcttcctttctggacggacctttgttccatatttggatcaaataaggatctgatgggtctagcaatcaatgatagctttctcagtgcctccctagtaaggatcctgtgtgaacaaatagcctctgacacctgtcatctccagagagtggtgttcaaaaacatttccccagctgatgctcatcggaacctctgcctagctcttcgaggtcacaagactgtaacgtatctgacccttcaaggcaatgaccaggatgatatgtttcccgcattgtgtgaggtcttgagacatccagaatgtaacctgcgatatctcgggttgtgggagcacaggagtgtttctgctggtgcatcaggctggggtctgtcctcaccgggatgtctcctcctccacccctctcttccagaggaggagcgagtggacattctaatcaacaacgcgggtgtgatgcggtgcccccactggaccaccgaggacgggcttcgagatgcagtttggcgttaaccacctgggtcactttctcttgacaaacttgctgctggacaagctgaaagcctcagccccttcgcggatcatcaacctctcgtccctggcccatgttgctgggcacatagactttgacgacttgaactggcagacgaggaagtataacaccaaagccgccctactgccagagccaagctcgccatcgtcctctttcaccaaggagctgagccggcggctgcaaggctctggtgtgactgtcaacgcccccgcaccccggcgtggcccagggacagagctgggcagacacacgggcatccatggctccacctttctccagcaccacaactcgggccccatcttctggctgcctggtcaaagagcccccgaagctggcccgccccagcccagcacaataccctggccgtggcggaggaactggcggatgttttccggaaagtacttcgatggactcaaacagaatgccccggcccccgaggctgaggatgaggaggtggcccggaggctttgggctgaaagtgcccgcctggtgggcttagaggctcccctctgtgagggagcagcccctccccagataaccctctggagcagatttgaaagccaaggattgggcccttccaagacccgaaggacagcctgtccgccatgcccgcagcttccatggcactacctgagccgggagacccaggactggcggccgccatgcccgcgagtaggttctaggggggcggtgctggccgcagatggactggcctgcaggtgagcactgccctgggctctggctggttccgtctgctctgctgccagcagggtaagaggggccatctgatgcttcccctgggaatctaaactgggaatggccgaggaggaagtgggctccgtgcacttgcaggccacgtcaggagagccagcggtgcctgtcaggggagggttcccaaggtgctcccgtgaaagagcatggggcaagttgtcttgacacttggtgggattctttgggtccccgttggcctaggtggcaagccatggtcctcttctgagccttggttttctttcagcagtgaagatgctcagaaataacttgcttgtctcccatggatgggtgttggtacagcgagctttttgttctggctaattggcattggctgtgcccggggggtgtttgcttaaggggcttcgtgtgccagagcccagcccagagagcaggtgcaggtgtcatccctgagttcaggctctgcacggcatggagtgggaaccccaccagctgctgctacaggacctgggattgcctgggactcccaccttcctatcaattctcatggtagtccaaactgcagactctcaaacttgctcatttaaaagaaaaaaaaaaagaagaaaatgtacccgagtcgtagattttatttttcctctgtgcatgggtgaatgcccatgagctgaacaaaggcaactcatggctttattccttttaggaaacaaggcatcagtttatcaccagggcaacaggccatgcaaaagttcagacttggccgggcgcggtggatcacgaggtcaggagatcgagaccatcctggctaacacaatgaaaccctgtttctactaaaaaaatacagaaaatgaggcctggcgcagtggctcatgcctgtaatgccagcactttgggaggccgaggcgggtggatcacgaggtcaggagatcgagaccatcctggctaatacggtgaaaccctgtctctactaaaaaaaaaattacaaaaaaaattagccgggcgtggtggtgggcacctgtaatcccagctactcgggaggctgaggcaggagaatggcgtgaacccgggaggcggagcttgcagtgagccgagatcgcgccactgcactctagcctgggcggacagagcgagactccatctcaaaaaaaaaaaaaaaaaaaaaaaaaaaaaaaagaaatgtaagaactggaagaaaattcaggaggcatttttaaaaataatttttaagtggaaaagatatttctaagcaagacacaaaactcagaagcccgaaaaggaaagactgatgaagttgagtacatgttcatttgtggagaacaaacatacagttaaaaaaacaaaactgggccgagagttattcatgcctgtaatcccagcaatttgggag

SEQ ID NO: 142598 - DNA, 1545 bp, Homo sapiens
gcgctgcacgaattcggcacgagcggctgcttcaagtccttggctctgatccaggccacagattccaggattctacaggcaggaaacatcttagaaatcagggttgggcaggcaggagccaggagagtagctacaatgacttcaccagtactggtggacatacgagaagaggtgacctgccctatctgcctggagctcctaacagaacccctgagcatagactgtggccacagcttctgccaagcctgcatcacaccaaatggcagggaatcagtgattggtcaagaaggggaaagaagctgccctgtgtgccagaccagctaccagccagggaacctgcggcctaatcggcatctggccaacatagtgaggcggctcaaagaggtagtgttgggccctgggaagcagctgaaagcagttctttgtgcagaccatggagaaaaactgcagctcttctgtcaggaggatgggaaggagaagtttcaggagtctctaaagaagctgaagaacgaggagcaggaagctgagaagctaacagcttttatcagagagaagaagacatcctggaaggcaagggagactttttctgaagatgtcctggggcaggaatcatggcagagtacaaatgcaagggaaaatgcagggatcccagggctggaggctgcccacttctggattgccatccctttctgtgccatgtatcttgtagcactggttggaaatgctgccctcatcctggtcattgccatggacaatgctcttcatgcacctatgtacctcttcctctgccttctctcactcacagacctggctctcagttctaccactgtgcccaagatgctggccattttgtggctccatgctggtgagatttcctttggtggatgcctggcccagatgttttgtgtccattctatctatgctctggagtcctcgattctacttgccatggcctttgataggtatgtggctatctgtaacccattaaggtatacaaccattctcaaccatgctgtcataggcagaattggctttgttgggctattccgtagtgtggctattgtctcccccttcatcttcttgctgaggcgactcccctactgtggtcaccgtgtcatgacacacacatactgtgagcatatgggcatcgcccgactggcctgtgccaacatcactgtcaatattgtctatgggctaactgtggctctgctggccatgggactggattccattctcattgccatttcctatggctttatcctccatgcagtctttcaccttccatctcatgatgcccagcacaaagctctgagtacctgtggctcccacattggcatcatcctggttttctacatccctgccttcttctccttcctcacccaccgctttggtcaccacgaagtccccaagcatgtgcacatctttctggctaatctctatgtgctggtgcctcctgtactcaatcctattctctatggagctagaaccaaggagattcggagtcgacttctaaaactgcttcacctggggaagacttcaatatga

SEQ ID NO: 142599 - DNA, 2216 bp, Homo sapiens
ggcaaactgtcatcaggagcttaaataggacagattttcacggcagtggatataccagcatggctattatctatggagtgttctctgcttcaaatttgattacaccgtcagtggttgccattgtaggacctcaactctctatgtttgccagtggtttattttacagcatgtacattgccgttttcatccagcctttcccgtggtccttctacacagacctctcggccggaatctccagggatgaccagcccctccccacgcatccagataatctccaccgactctgctgtagcctcacctcagcgcattcagattgtcacagaccagcagacaggacagaaaatccagatagtcaccgcagtggacgcctccggatcccccaaacagcagttcatcctgaccagcccagatggagctggaactgggaaggtgatcctggcttccccagagacatccagcgccaagcaactcatattcaccacctcagacaacctcgtccctggcaggatccagattgtcacggattctgcctctgtggagcgtttactggggaagacggacgtccagcggccccaggtggtagagtactgtgtggtctgtggcgacaaagcctccggccgtcactatggggctgtcagttgtgaaggttgcaaaggtttcttcaaaaggagtgtgaggaaaaatttgacctacagctgccggagcaaccaagactgcatcatcaataaacatcaccggaaccgctgtcagttttgccggctgaaaaaatgcttagagatgggcatgaaaatggaatctgtgcagagtgaacggaagcccttcgatgtgcaacgggagaaaccaagcaattgtgctgcttcaactgagaaaatctatatccggaaagacctgagaagtcccctgatagctactcccacgtttgtggcagacaaagatggagcaagacaaacaggtcttcttgatccagggatgcttgtgaacatccagcagcctttgatacgtgaggatggtacagttctcctggccacggattctaaggctgaaacaagccagggagctctgggcacactggcaaatgtagtgacctcccttgccaacctaagtgaatctttgaacaacggtgacacttcagaaatccagccagaggaccagtctgcaagtgagataactcgggcatttgataccttagctaaagcacttaataccacagacagctcctcttctccaagcttggcagatgggatagacaccagtggaggagggagcatccacgtcatcagcagagaccagtcgacacccatcattgaggttgaaggccccctcctttcagacacacacgtcacatttaagctaacaatgcccagtccaatgccagagtacctcaacgtgcactacatctgtgagtctgcatcccgtctgcttttcctctcaatgcactgggctcggtcaatcccagcctttcaggcacttgggcaggactgcaacaccagccttgtgcgggcctgctggaatgagctcttcaccctcggcctggcccagtgtgcccaggtcatgagtctctccaccatcctggctgccattgtcaaccacctgcagaacagcatccaggaagataaactttctggtgaccggataaagcaagtcatggagcacatctggaagctgcaggagttctgtaacagcatggcgaagctggatatagatggctatgagtatgcataccttaaagctatagttctctttagccccgatcatccaggtttgaccagcacaagccagattgaaaaattccaagaaaaggcacagatggagttgcaggactatgttcagaaaacctactcagaagacacctaccgattggcccggatcctcgttcgcctgccggcactcaggctgatgagctccaacataacagaagaacttttttttactggtctcattggcaatgtttcgatagacagcataatcccctacatcctcaagatggagacagcagagtataatggccagatcaccggagccagtctatagcgcaaaccacacacctgccaaggagcaacagaatccttccaggaccgttcacatacaaagaaagtagtggtattttggtatgtgcaaatatttccatatgttagccatttcctgtctggtttctccttatctgttaatcccagacaatagcaattaaaaagactagtaggatcctttcctgacat

SEQ ID NO: 142600 - DNA, 3069 bp, Homo sapiens; identical to SEQ ID NO: 121218

SEQ ID NO: 142601 - DNA, 3225 bp, Homo sapiens
  misc_feature (1)...(3225): n = a,t,c or g
atgaccctggttttgaataacgcgggctttgcacgagttttaagaatggggaaggggtcggcgagctcggtcggagggaaccgatatgtggacgcggccgaagcctgcacggcggacgcgcggtgccagcgtttgcgctccgagtatgtggcgcagtgcctgggccgggctgcgcaggggggctgtccccgcgcccgctgccgccgggccctgcgccgcttcttcgcccgcgggccgcccgcgctcacccacgcantgaattttcgcctggtggggcaaaccagcgtggaccgcttgctgcaactttctcaggcccaggcggtgaagggcaatcagctgttgcccgtctcactggtgaaaagaaaaaccaccctggcgcccaatacgcaaaccgcctctccccgcgcgttggccgattcattaatgcagctggcacgacaggtttcccgactggaaagcgggcaggattttgccgatttcggaaccaccatcaaacaggattttcgcctgctggggcaaaccagcgtggaccgcttgctgcaactctctcagggccaggcggtgaagggcaatcagctgttgcccgtctcactggtgaaaagaaaaaccaccctggcgcccaatacgcaaaccgcctctccccgcgcgttggccgattcattaatgcagctggcacgacaggtttcccgactggaaagcgggcaggattttgccgatttcggaaccaccatcaaacaggattttcgcctgctggggcaaaccagcgtggaccgcttgctgcaactctctcagggccaggcggtgaagggcaatcagctgttgcccgtctcactggtgaaaagaaaaaccaccctggcgcccaatacgcaaaccgcctctccccgcgcgttggccgattcattaatgcagctggcacgacaggtttcccgactggaaagcgggcaggattttgccgatttcggaaccaccatcaaacaggattttcgcctgctggggcaaaccagcgtggaccgcttgctgcaactctctcagggccaggcggtgaagggcaatcagctgttgcccgtctcactggtgaaaagaaaaaccaccctggcgcccaatacgcaaaccgcctctccccgcgcgttggccgattcattaatgcagctggcacgacaggtttcccgactggaaagcgggcagtcctgttctacgccccccccaaacactgataaacagagcaaagaaaaatgtcccatgaaatttacattccagcaggtggagacaaacatgactggcgatgctgtcggaatggacgatatcccgcaagaggcccggcagtaccggcataaccaagcctatgcctacagcatccagggtgacggtgccgaggatgacgatgagcgcattgttagatttcatacacgggtcaccgtcgacagcgacacacttgcatcggatgcagcccggttaacgtgccggcacggcctgggtaaccagatattgaacgtgatggccggggaatcggggtgtgaagaaaattgcgggaacggcggaggcgggaacaagggaaaccggaataagcgtaaacagatacgcaagcgacgcaaaagggcggaaccgcggaaaggcccgacaaagcggggaacaccgcccacaccaacagaagcccgacgcgcccgcgtggcccgaagcgaagaatcaaccgaaacgccggaacgacggcatcagcaacgccgaaccggcgacccccaagcaccaggggcacggccctgcacagccatgcggaccacgcggaatgaaacccaagagaagaccctcagagctcccaccaagcccgcaaagcacaaggggggtacagaatccgggaaaaagcatctggctcagacgccgcgtgccacggcgtggacagcgtacaagcgaaaaacacggaaaacgtcattcagcaacctcggactagaagggcagacacgctttaaaaggacgaaggacgatcaacaccaacgtacaccccgggtctacgctcctcagcgcgcaaagcgccgagcaaggacaggtgacacgccaaaacacctaaaacgagcatacagggtcattccgtttgtagtgacgccaacgcgggattctgcggacatgatcggcccaccaaaggattttgccgatttcggaaccaccatcaaacaggattttcgcctgctggggcaaaccagcgtggaccgcttgctgcaactctctcagggccaggcggtgaagggcaatcagctgttgcccgtctcactggtgaaaagaaaaaccaccctggcgcccaatacgcaaaccgcctctccccgcgcgttggccgattcattaatgcagctggcacgacaggtttcccgactggaaagcgggcagtggaaattacggcttttaaaagccgtaaaagaaaaaaaagcccagttttatccggccttaattcacatctgtgcccgcctgatgaatgttcaccggaggttccgtatggcaataaaagacgggtttattgagaatatgtttttcgtctcagccaatccctgggtgagtttcaccagttttgatttaaacgtggccaatatggacaacttcttcgcccccgttttcaccatgggcaaatattatacgcaaggcgacaaggtgctgatgccgctggcgattcaggttcatcatgccgtttgtgatggcttccatgtcggcagaatgcttaatgaattacaacagtactgcgatgagtggcagggcggggcggattttgccgatttcggaaccaccatcaaacaggattttcgcctgctggggcaaaccagcgtggaccgcttgctgcaactctctcagggccaggcggtgaagggcaatcagctgttgcccgtctcactggtgaaaagaaaaaccaccctggcgcccaatacgcaaaccgcctctccccgcgcgttggccgattcattaatgcagctggcacgacaggtttcccgactggaaagcgggcaggattttgccgatttcggaaccaccatcaaacaggattttcgcttgctggggcaaaccagcgtggaccgcttgctgcaactctctcagggccaggcggtgaagggcaatcagctgttgcccgtctcactggtgaaaagaaaaaccaccctggcgcccaatacgcaaaccgcctctccccgcgcgttggccgattcattaatgcagctggcacgacaggtttcccgactggaaagcgggcagtga

SEQ ID NO: 142602 - DNA, 2640 bp, Homo sapiens; identical to SEQ ID NO: 139941
  misc_feature (1)...(2640): n = a,t,c or g

SEQ ID NO: 142603 - DNA, 3662 bp, Homo sapiens; identical to SEQ ID NO: 121534

SEQ ID NO: 142604 - DNA, 2868 bp, Homo sapiens
atggtgaaggattttgtggggcaagtgcctgtcagcatctttagggattttgccgatttcggaaccaccatcaaacaggattttcgcctgctggggcaaaccagcgtggaccgcttgctgcaactctctcagggccaggcggtgaagggcaatcagctgttgcccgtctcactggtgaaaagaaaaaccaccctggcgcccaatacgcaaaccgcctctccccgcgcgttggccgattcattaatgcagctggcacgacaggtttcccgactggaaagcgggcaggattttgccgatttcggaaccaccatcaaacaggattttcgcctgctggggcaaaccagcgtggaccgcttgctgcaactctctcagggccaggcggtgaagggcaatcagctgttgcccgtctcactggtgaaaagaaaaaccaccctggcgcccaatacgcaaaccgcctctccccgcgcgttggccgattcattaatgcagctggcacgacaggtttcccgactggaaagcgggcaggattttgccgatttcggaaccaccatcaaacaggattttcgcctgctggggcaaaccagcgtggaccgcttgctgcaactctctcagggccaggcggtgaagggcaatcagctgttgcccgtctcactggtgaaaagaaaaaccaccctggcgcccaatacgcaaaccgcctctccccgcgcgttggccgattcattaatgcagctggcacgacaggtttcccgactggaaagcgggcagcaaagctgtactctgaaagctggccccaatggggaggttaggactgtgcctgctcagaagtctgtgggtgcctcagagaagggcaacaaccctaggctggaccctagccttgagagtacttcctactgccagagcccccagatttcttccggtggcagcagatactgccagaagagcctgcggtgcacacaccagaatccggttcagaactctgatattgaaagtgtgctgttcctgatcagtgtccacgctaatgtgaattcaagagtccaggatgcctccaagttgacccccctgcacctcgctgtccaagcaggctcagaaattattgtccgcaatttggataaagcccacacagcggaagccagtgttccaggcccttctgcagtgctggtctccagtgctttcaaggattttgccgatttcggaaccaccatcaaacaggattttcgcctgctggggcaaaccagcgtggaccgcttgctgcaactctctcagggccaggcggtgaagggcaatcagctgttgcccgtctcactggtgaaaagaaaaaccaccctggcgcccaatacgcaaaccgcctctccccgcgcgttggccgattcattaatgcagctggcacgacaggtttcccgactggaaagcgggcaggattttgccgatttcggaaccaccatcaaacaggattttcgcctgctggggcaaaccagcgtggaccgcttgctgcaactctctcagggccaggcggtgaagggcaatcagctgttgcccgtctcactggtgaaaagaaaaaccaccctggcgcccaatacgcaaaccgcctctccccgcgcgttggccgattcattaatgcagctggcacgacaggtttcccgactggaaagcgggcaggattttgccgatttcggaaccaccatcaaacaggattttcgcctgctggggcaaaccagcgtggaccgcttgctgcaactctctcagggccaggcggtgaagggcaatcagctgttgcccgtctcactggaacatgacggtatctgcgagatccatgttgctaaatatgctgaaatattcggattgacctctgcggaagccagtaaggatatacggcaggcattgaagagtttcgcggggaaggaagtggttttttatcgccctgaagaggatgccggcgatgaaaaaggctatgaatcttttccttggtttatcaaacgtgcgcacagtccatccagagggctttacagtgtacatatcaacccatatctcattcccttctttatcgggttacagaaccggtttacgcagtttcggcttagtgaaacaaaagaaatcaccaatccgtatgccatgcgtttatacgaatccctgtgtcagtatcgtaagccggatggctcaggcatcgtctctctgaaaatcgactggatcatagagcgttaccagctgcctcaaagttaccagcgtatgcctgacttccgccgccgcttcctgcaggtctgtgttaatgagatcaacagcagaactccaatgcgcctctcatacattgagaaaaagaaaggccgccagacgactcatatctgcaagttagtagaggccaataatccacaggcaatttctcaacaagacctggtacacatggctattcagattgcctgtggaatgagctacctggccagaacggaagtcatccacaaagacctggctgctaggaactgtatcactgatgacacacttcaagttaagatcacagacaatgccgtctcatggactatcactgtctggaagacaatgaaaacaggccagtttgttggatggctcttgaaagtctggttaataacgagttttctagcactagtgatgtgtggggcctttggagtgatgctgtgggaactcatgactctgggccagacgccctacatggacactgaccccttcgagatggccgcatacctgaaagatggttaccgaatagcccagccaatcaactgtcctgatgaaccatttgctgtgatggcctgttgctgggccttagatccgggggagaggcccaagtttcagcagctggtacagtgtctcacagtttcatgcagcctgggggcctacgtctga

SEQ ID NO: 142605 - DNA, 2112 bp, Homo sapiens; identical to SEQ ID NO: 118107
  misc_feature (1)...(2112): n = a,t,c or g

SEQ ID NO: 142606 - DNA, 3810 bp, Homo sapiens; identical to SEQ ID NO: 139948

SEQ ID NO: 142607 - DNA, 3573 bp, Homo sapiens; identical to SEQ ID NO: 119766

SEQ ID NO: 142608 - DNA, 2232 bp, Homo sapiens; identical to SEQ ID NO: 119027
  misc_feature (1)...(2232): n = a,t,c or g

SEQ ID NO: 142609 - DNA, 2602 bp, Homo sapiens; identical to SEQ ID NO: 131065

SEQ ID NO: 142610 - DNA, 3198 bp, Homo sapiens; identical to SEQ ID NO: 124768
  misc_feature (1)...(3198): n = a,t,c or g

SEQ ID NO: 142611 - DNA, 2172 bp, Homo sapiens
atgcccacaaattcttgggcatttcggcagtccttctccatccaccggaaggttcctgaagatggagagactcgggaggaaacgcttctgcaggagtcagcatcgaaggaggcttactatctggggaagatcttggagatgcagaacgagctgaaacagagccgggctgtggtcagtaatgtacaggcagcttacgagaggctcaccgcagtcgtgcaggatctgaaggaggcccacaatttctggacttttttacgaattgcaacttctggcaaggaagaagcgaactcaagcctttcgcgaaaagaaaataaccaaaaagcatacaaagaaacgtacggcgtctctcatattacacgccatgatatgctgcagatccctaaacagcagcaaaacgaaaaataccaagtgcctcaattcgatcaatcaacgattaaaaatattgagtctgcaaaaggacttgatgtgtgggacagctggccgctgcaaaacgctgacggaacagtagctgaatacaacggctatcacgttgtgtttgctcttgcgggaagcccgaaagacgctgatgacacatcaatctacatgttttatcaaaaggtcggcgacaactcaatcgacagctggaaaaacgcgggccgtgtctttaaagacagcgataagttcgacgccaacgatccgatcctgaaagatcagacgcaagaatggtccggttctgcaacctttacatctgacggaaaaatccgtttattctacactgactattccggtaaacattacggcaaacaaagcctgacaacagcgcaggtaaatgtgtcaaaatctgatgacacactcaaaatcaacggagtggaagatcacaaaacgatttttgacggagacggaaaaacatatcagaacgttcagcagtttatcgatgaaggcaattatacatccggcgacaaccatacgctgagagaccctcactacgttgaagacaaaggccataaataccttgtattcgaagccaacacgggaacagaaaacggataccaaggcgaagaaactttggctatcagagatgccgagaaagcagggcgactaccgcacccggatatggaaattcgaggacgggttgagcaacgtgttggttatacaattgaacaaattaatcatatgcgtgatgtgtttggtacgcgattgcgacgtgctgaagacgtatttccaccggtgatcggggttgctgcccataaaggtggcgtttacaaaacctcagtttctgttcatcttgctcaggatctggctctgaaggggctacgtgttttgctcgtggaaggtaacgacccccagggaacagcctcaatgtatcacggatgggtaccagatcttcatattcatgcagaagacactctcctgcctttctatcttggggaaaaggacgatgtcacttatgcaataaagcccacttgctggccggggcttgacattattccttcctgtctggctctgcaccgtattgaaactgagttaatgggcaaatttgatgaaggtaaactgcccaccgatccacacctgatgctccgactggccattgaaactgttgctcatgactatgatgtcatagttattgacagcgcgcctaacctgggtatcggcacgattaatgtcgtatgtgctgctgatgtgctgattgttcccacgcctgctgagttgtttgactacacctccgcactgcagtttttcgatatgcttcgtgatctgctcaagaacgttgatcttaaagggttcgagcctgattggataccatcaggcatttctagaattcacaattcactgaatgtttggtccactttattgatcttaaccttcaaactatgggtctttacaaaggcaaaaattaaaatgagatcattagaggaggcccaatccgatagggctgctgtctttataaaaaggggaaattcagccacacagaaactgacacatacttctgcatgtgggatgggaagactatgtgaagaaacacagggaaaagatggccacgtgaccatggaggcagagaccgaagtgacccatctacacgccaaggaacatcaaggattgccagcaaacaccagaggccaggaaggggcaaggaaaggcctttccctagagctgccagagggagcatggccctggcgacaccaggatttctga

SEQ ID NO: 142612 - DNA, 2262 bp, Homo sapiens; identical to SEQ ID NO: 119030

SEQ ID NO: 142613 - DNA, 2421 bp, Homo sapiens; identical to SEQ ID NO: 119313

SEQ ID NO: 142614 - DNA, 1974 bp, Homo sapiens; identical to SEQ ID NO: 127326

SEQ ID NO: 142615 - DNA, 2078 bp, Homo sapiens
atattgatgaatgtttgaatccaagcacttgtccagatgagcagtgtgtgaattctcctggatcttaccagtgcgttccctgcacagaaggattccgaggctggaatggacagtgccttgagttaaataatgattacacattgaaaaaagtaatgaagccgctgatcacttcaaacacggtaactgatgaaatcgagcgcgcgaatgttttcaaaatgaacggcaaatggtacttgttcactgattcacgcggttcaaaaatgacgatcgatgatatcaatgaatgcttggaggacaagagtgtttgccagagaggagactgcattaatactgcagggtcctatgattgtacttgtccggatggatttcagctagatgacaataaaacatgtcaaggtgggcccgacaagtttcccgacgggaaagcgggccaggattttgccgatttcggaaccaccatcaaacaggattttcgcctgctggggcaaaccagcgtggaccgcttgctgcaactctctcagggccaggcggtgaagggcaatcagctgttgcccgtctcactggtgaaaagaaaaaccaccctggcgcccaatacgcaaaccgcctctccccgcgcgttggccgattcattaatgcagctggcacgacaggtttcccgactggaaagcgggcaggattttgccgatttcggaaccaccatcaaacaggattttcgcctgctggggcaaaccagcgtggaccgcttgctgcaactctctcagggccaggcggtgaagggcaatcagctgttgcccgtctcactggtgaaaagaaaaaccaccctggcgcccaatacgcaaaccgcctctccccgcgcgttggccgattcattaatgcagctggcacgacaggtttcccgactggaaagcgggcaggattttgccgatttcggaaccaccatcaaacaggattttcgcctgctggggcaaaccagcgtggaccgcttgctgcaactctctcagggccaggcggtgaagggcaatcagctgttgcccgtctcactggtgaaaagaaaaaccaccctggcgcccaatacgcaaaccgcctctccccgcgcgttggccgattcattaatgcagctggcacgacaggtttcccgactggaaagcgggcaacgcaggccaatccatcaccatgtaggtaaaggacctgtatttgtcaagccaaagaacactcaacctgttgctaaaagtactcatcctccacctctcccagccaaggaagagccagtggaggccctgaccttctcccgggaacacgggccaggagtggcggagccagaagagagtcacgttcgtcattcggcactgtattccttggacctgacattcagcctggagttgctgcccactcgatccccacctttaatgactatttcatcactctgggttctggccagttccaaatggctatttcaaccaagtcctttcttaagggaagccaccctgtcagatattaatgaatgtgaacatccagggctctgtggtccgcaaggggagtgcctaaacacagagggttctttccattgtgtctgccagcagggtttctcaatctctgcagatggccgtacgtggaaggcttggttatgccgggtactgccgggcctcttgcgggatatcgtccattccgacagcatcgccagtcactatggcgtgctgctagcgctatatgcgttgatgcaatttctatgcgcacccgttctcggagcactgtccgaccgctttggccgccgcccagtcctgctcgcttcgctacttggagccactatcgactacgcgatcatggcgaccacacccgtcctgtggatctacccactagtcaattcaccagattttcgcctgctggggcaaaccagcgtggaccgcttgctgcaactctctcagggccaggcggtgaagggcaatcagctgttgcccgtctcactggtgaaaagaaaaaccaccctggcgcccaatacgcaaaccgcctctccccgcgcgttggccgattcattaatgcagctggcacgacaggtttcccgactggaaagcgggcagtga

SEQ ID NO: 142616 - DNA, 5100 bp, Homo sapiens; identical to SEQ ID NO: 139962

SEQ ID NO: 142617 - DNA, 2305 bp, Homo sapiens; identical to SEQ ID NO: 139963
  misc_feature (1)...(2305): n = a,t,c or g

SEQ ID NO: 142618 - DNA, 2082 bp, Homo sapiens
atgaacatgaacatcaaaaaaattgtaaaacaagccacagttctgacttttacgactgcacttctggcaggaggagcgactcaagccttcgcgaaagaaaagaaccaaaaagcacacaaagaaactgacatcgcggaaggaaaatacgatatgagtcgtctggcggcctttctttttctcaagtttttcgataggcttcgtgatcggcccaagaacgttgatcttaaagggttcgagcctgatggacgaatttggcttaccaaatacagcaataggccagccggtgaaggccaatcacttgttgcccgtctcacgggtgaaaagaaaaaccaccctggcgcccaatacgcaaaccgcctctccccgcgcgttggccgattcattaatgcagctggcacgacaggtatcccgactggaaagcgggcagtgagcgcaacgcaattaatggcatttctttctatttttgtggctgttctgcacggaatcggaataccgggagcaccgggtaggaaacgggataggatcgaccgaaggcagaccgcgagccagacacgacgatacagcccgcaacaccccacagacacgcatcgcaccccgacgtcgcgtcctcacaaccccgacgcagcgctccgcccatcacaaccgggggtggcagacactaagggcgcgggagagcgacttagagcaaaagaggcagccgggccacacaacgtcccctgtactcagccgcgagcacgggagaaagctcgtgagtcagcagccatggcgccgaaccacgcagcccccatcaaaccaggattttcgcctgctggggcaaaccagcgtggaccgcttgctgcaactctctcagggccaggcggtgaagggcaaccagctgttgcccgtctcactggtgaaaagaaaaaccaccctggcgcccaatacgcaaaccgcctctccccgcgcgttggccgattcattaatgcagctggcacgacaggtttcccgactggaaagcgggcatgcactcttgttccaaacttggaacaacaatccaaccactatctcggggctattcttttgatttataagcgatttgctcgatttcgtaaccaccatcaaacaggattttcgcctgttggggcaaaccagcgtggaccgcttgctgcaactctctcagggccaggcggtgaagggcaatcagctgttgcccgtctcactggtgaaaagaaaaaccaccttggcgcccaatacgcaaaccgcctctccccgcgcgttggccgattcattaatgcagctggcacgacaggtttcctgactggaaagcgggcagtgagcgcaacgcaattaataagacactctcctgcttttctttctggggaaaaggacgatgtcacttatgcaataaagcccacttgctggccggggcttgacattattccttcctgtctggctctgcaccgtattgaaactgagttaatgggcaaatttgatgaaggtaaactgcccaccgatccacacctgatgctccgactggccattgaaactgttgctcatgactatgatgtcatagttattgacagcgcgcctaacctgggtatcggcacgattaatgtcgtatgtgctgctgatgtgctgattgttcccacgcctgctgagttgtttgactacacctccgcactgcagtttttcgatatgcttcgtgatctgctcaagaacgttgatcttaaagggttcgagcctgatgtacgtattttgcttaccaaatacagcaatagtaatggctctcagtccccgtggatggaggagcaaattcgggatgcctggggaagcatggttctaaaaaatgttgtacgtgaaacggatgaagttggtaaaggtcagatccggatgagaactgtttttgaacaggccattgatcaacgctcttcaactgctcgccccagacggcgagtcagggaagggggtggggagggaggcgagaacaaaaccgtatgctgtattggcaaagccgagttgtgtctgctgcttcttggcagtccccaaagtacgtcctctcagcagacggagctgctggcaaatgaaacaggggattccacttga

SEQ ID NO: 142619 - DNA, 2037 bp, Homo sapiens
  misc_feature (1)...(2037): n = a,t,c or g
atgtacgcagaggaggcacagttgtgtgggagaaaaatcacaggacgcggattcagatgtctgagagtaagtcgtacctgctgtgcaacccgaagcaagtctgtttacctcatggaacctgcctctactgctggaagtggggatgtgtcagcgtactacggcggcggcacgaacttcttctgtaaagaaagccagaagcttcagcagagcgctaaaaaacgcgatgctgagttagcgaacggcgccctcggtatcatagagttaaataatgattacacattgaaaaaagtaatgaagccgctgatcacttcaaacacggtaactgatgaaatcgagcgcgcgaatgttttcaaaatgaacggcaaatggtacttgttcactgattcacgcggttcaaaaatgacgatcgatggtattaactcaaacgatatttacatgcttggttatgtatcaaactctttaaccggcccttacaagccgctgaacaaaacagggcttgtgctgcaaatgggtcttgatccaaacgatgtgacattcacttactctcacttcgcagtgccgcaagccaaaggcaacaatgtggttatcacaagctacatgacaaacagaggcttcttcgaggataaaaaggcaacatttgcgccaagcttcttaatgaacatcaaaggcaataaaacatccgttgtcaaaaacagctcgtggggatctatagagagaactgggtgtcagccacaattcggcggcggccaaagcggtcggacagtgctcgagaacgnncacgccatagtgactggcgatgctgtcggaatggacgatatcccgcaagaggcccggcagtaccggcataaccaagcctatgcctacagcatccagggtgacggtgccgaggatgacgatgagcgcattgttagatttcatacacgggtcaccgtcgacagcgacacacttgcatcggatgcagcccggttaacgtgccggcacggcctgggtaaccaggtattttgtccacataaccgtgcgcaaaatgttgtggataagcaggacacagcagcaatccacagcaggcatacaaccgcacaccgagtgttggaagttctggccagggcaatcaggcaggagaaggaaataaagggtattcaattaggaaaagaggaagtcagattgtccctgtttgcagatgacatgattgtatatctagaaaaccccattgtctcagcccaaaatctccttaagctgataagcaacttcagcaaagtctcaggatacaaaatcaatgtacaaaaatcacaagcattcttatacaccaataacagacaaacggagagccaaatcatgagtgaactcccattcacaattgcttcaaagagaataaaatacctaggaatccaacttacaagggatgtgaaggacctcttcaaggagaactacaaaccactgctcaatgaaataaaagaggttacaaacaaatggaagaacatttcatgctcatgggtaggaagaatcaatattgtgaaaatggccatactgcccaagggattttgccgatttcggaaccaccatcaaacaggattttcgcctgctggggcaaaccagcgtggaccgcttgctgcaactctctcagggccaggcggtgaagggcaatcagctgttgcccgtctcactggtgaaaagaaaaaccaccctggcgcccaatacgcaaaccgcctctccccgcgcgttggccgattcattaatgcagctggcacgacaggtttcccgactggaaagcgggcagtgagcgcaacgcaattaatggattttgccgatttcggaaccaccatcaaacaggattttcgcctgctggggcaaaccagcgtggaccgcttgctgcaactctctcagggccaggcggtgaagggcaatcagctgttgcccgtctcactggtgaaaagaaaaaccaccctggcgcccaatacgcaaaccgcctctccccgcgcgttggccgattcattaatgcagctggcacgacaggtttcccgactggaaagcgggcagtga

SEQ ID NO: 142620 - DNA, 2127 bp, Homo sapiens; identical to SEQ ID NO: 139965

SEQ ID NO: 142621 - DNA, 3990 bp, Homo sapiens; identical to SEQ ID NO: 139966

SEQ ID NO: 142622 - DNA, 1953 bp, Homo sapiens; identical to SEQ ID NO: 139968

SEQ ID NO: 142623 - DNA, 2233 bp, Homo sapiens; identical to SEQ ID NO: 139971
  misc_feature (1)...(2233): n = a,t,c or g

SEQ ID NO: 142624 - DNA, 2236 bp, Homo sapiens
taaatagttccgctttcgatatcgtcaggctcagatgcatcaccaaacacggtccggctgacggttcactaattaacctggcaacttcatcgcgatgcagcgctcgctgaagagagcgttgcaatatgtcggattcggttccattgtcataaataactcggagtcgacgggtaccgagctcgaattcgtaatcatggtcatagctgtttcctgtcgtgccagctgcattaatgaatcggccaacgcgcggggagaggcggtttgcgtattgggcgccagggtggtttttcttttcaccagtgagacgggcaacagctgattgcccttcaccgcctggccctgagagagttgcagcaagcggtccacgctggtttgccccagcaggcgaaaatcctgtttgatggtggttccgaaatcggcaaaatcccttataaatcaaaagaatagcccgagatagggttgagtggtgttccagtttggaccaagatccactattaaagaacgtggactccaacgtcaaaggcgaaaaaccgtctatcagggcgatggcccacgcctggccctgagagagttgcagcaagcggtccacgctggtttgccccagcaggcgaaaatcctgtttgatggtggttccgaaatcggcaaaatcccgccggcttatgcgcggtacgggccgtgcaactcgtgcttgaagccctgtgggggactctaaagaccccccattatcctgagaataaatgccttggcctttatatggaaatgtggaactgagtggatatgctgtttttgtcttgacccacgtgtaaagactgaataattcaacctttgtgagaaacatgctgatgttgactattgtgttctgatatgacagcccagcttcagctatcaaaagggaagatacttccatttcaccaacattgtttccaacattgtctcctgtgtctgcagttactgaggactggcaaataacttttaactccattgcccgctttccagtcgggaaacctgtcgtgccagctgcattaatgaatcggccaacgcgcggggagaggcggtttgcgtattgggcgccagggtggtttttcttttcaccagtgagacgggcaacagctgattgcccttcaccgcctggccctgagagagttgcagcaagcggtccacgctggtttgccccagcaggcgaaaatcctttaccaacttcatccgtttcacgtacaacattttttagaaccatgcttccccaggcatcccgaatttgctcctccatccacggggactgagagccattactattgctgtatttggtaagcaaaatacgtacatcaggctcgaaccctttaagatcaacgttcttgagcagatcacgaagcatatcgaaaaactgcagtgcggaggtgtagtcaaacaactcagcaggcgtgggaacaatcagcacatcagcagcacatacgacattaatcgtgccgatacccaggttaggcgcgctgtcaataactatgacatcatagtcatgagcaacagtttcaatggccagtcggagcatcaggtgtggatcggtgggcagtttaccttcatcaaatttgcccattaactcagtttcaatacggtgcagagccagacaggaaggaataatgtcaagccccggccagcaagtgggctttattgcataagtgacatcgtccttttccccaagatagaaaggcaggagagtgtcttctgcatgaatatgaagatctggtacccatccgtgatacattgaggctgttccctgggggtcgttaccttccacgagcaaaacacgtagccccttcagagccagatccgcctggccctgagagagttgcagcaagcggtccacgctggtttgccccagcaggcgaaaatcctgtttgatggtggttccgaaatcggcaaaatcctgcccgctttccagtcgggaaacctgtcgtgccagctgcattaatgaatcggccaacgcgcggggagaggcggtttgcgtattgggcgccagggtggtttttcttttcaccagtgagacgggcaacagctgattgcccttcaccgcctggccctgagagagttgcagcaagcggtccacgctggtttgccccagcaggcgaaaatcctgtttgatggtggttccgaaatcggcaaaatcccctccaacaactggttcatatgggcttgccacgaccgctggataagaagaattttcaggaaccttagggcttgacat

SEQ ID NO: 142625 - DNA, 1938 bp, Homo sapiens; identical to SEQ ID NO: 139973

SEQ ID NO: 142626 - DNA, 2370 bp, Homo sapiens; identical to SEQ ID NO: 119032

SEQ ID NO: 142627 - DNA, 20974 bp, Homo sapiens
  misc_feature (1)...(20974): n = a,t,c or g
atgaacatgaacatcaaaaaaattgtaaaacaagccacagttctgacttttacgactgcacttctggcaggaggagcgactcaagccttcgcgaaagaaaataaccaaaaagcatacaaagaaacgtacggcgtctctcatattacacgccatgatatgctgcagatccctaaacagcagcaaaacgaaaaataccaagtgcctcaattcgatcaatcaacgattaaaaatattgagtctgcaaaaggacttgatgtgtgggacagctggccgctgcaaaacgctgacggaacagtagctgaatacaacggctatcacgttgtgtttgctcttgcgggaagcccgaaagacgctgatgacacatcaatctacatgttttatcaaaagggattttgccgatttcggaaccaccatcaaacaggattttcgcctgctggggcaaaccagcgtggaccgcttgctgcaactctctcagggccaggcggtgaagggcaatcagctgttgcccgtctcactggtgaaaagaaaaaccaccctggcgcccaatacgcaaaccgcctctccccgcgcgttggccgattcattaatgcagctggcacgacaggtttcccgactggaaagcgggcagtgagcgcaacgcaattaataaccagtgccaaaagagaaaagaagaagaggggacagacaagaacaccaacaaccatgcaggaacaccgagggcacggccctgagggtgtgggccgcacgggatcaaactctttaaccggccctgacgagccgctgaacaaaacagggcttgtgctgcaaatgggtcttgatccaaacgatgtgacaaacaattactctcacttcgcagtgccgcaagccaaaggcaacaataaaaaaatcacaagaaacatgacaaacagaggcttcttcgaggataaaaaggcaacatttgcgccaagcttcttaatgaacatcaaaggcaataaaacatccgttgtcaaaaacagcatcctggagcaaaacactggggttgggggcggggtgccggagaggggggccaacggccctgaaaagacgggtgattccgcccctgggccgtgggaagaccgcggttctttgaatagtggactccttgttccagagactggacaaaaccaccgaaccctatcccggggctattctgtggaaataataagggattatgcccgatttcggaaccaccatcaaacaggattttcgcctgcgggggcaaaccagcgtggaccgcttgctgcaactctctcagggccaggcggtgaagggcaatcagctgttgcccgtctcactggtgaaaagaaaaaccaccctggcgcccaatacgcaaaccgcctctccccgcgcgttggccgattcattaatgcagctggcacgacaggtttcccgactggaaagcgggcaggattttgccgatttcggaaccaccatcaaacaggattttcgcctgctggggcaaaccagcgtggaccgcttgctgcaactctctcagggccaggcggtgaagggcaatcagctgttgcccgtctcactggtgaaaagaaaaaccaccctggcgcccaatacgcaaaccgcctctccccgcgcgttggccgattcattaatgcagctggcacgacagtgcttggaaccgaggccattatcaccggtgttcttcgtcccgttgatgttcgaattccaaggaaagtgagggccagaggagaggttgctcacaacacaagagccaacagcccaaccgggagagttccaaaaaggagaaaaaagcaagggattttgccgatttcggaaccaccatcaaacaggattttcgcctgctggggcaaaccagcgtggaccgcttgctgcaactctctcagggccaggcggtgaagggcaatcagctgttgcccgtctcactggtgaaaagaaaaaccaccctggcgcccaatacgcaaaccgcctctccccgcgcgttggccgattcattaatgcagctggcacgacaggtttcccgactggaaagcgggcagtgagcgcaacgcaattaatggattttgccgatttcggaaccaccatcaaacaggattttcgcctgctggggcaaaccagcgtggaccgcttgctgcaactctctcagggccaggcggtgaagggcaatcagctgttgcccgtctcactggtgaaaagaaaaaccaccctggcgcccaatacgcaaaccgcctctccccgcgcgttggccgattcattaatgcagctggcacgacaggtttcccgactggaaagcgggcaggattttgccgatttcggaaccaccatcaaacaggattttcgcctgctggggcaaaccagcgtggaccgcttgctgcaactctctcagggccaggcggtgaagggcaatcagctgttgcccgtctcactggtgaaaagaaaaaccaccctggcgcccaatacgcaaaccgcctctccccgcgcgttggccgattcattaatgcagctggcacgacaggtttcccgactggaaagcgggcaggattttgccgatttcggaaccaccatcaaacaggattttcgcctgctggggcaaaccagcgtggaccgcttgctgcaactctctcagggccaggcggaaacagctatgaccatgattacgaattcgagctcggtacccgaacatccctatatggtctgcggcaagtcgtgcctggcgggcgatattttcggcgatttccgttcgacaaggagtgaaggtcggcgaccgctctcttccaggatcggccggcacagattcctcaacctcaactatgcatgtaaaggctcgtgggatctctacagtagacctggtgtcagcacgaaaggctcccctaaagttcaccctttagatttaaacatggactcttgttccaaactggaacaacactcaaccctatctcgggctattcttttgatttataagggattttgccgatttcggaaccaccatcaaacaggattttcgcctgctggggcaaaccagcgtggaccgcttgctgcaactctctcagggccaggcggtgaagggcaatcagctgttgcccgtctcactggtgaaaagaaaaaccaccctggcgcccaatacgcaaaccgcctctccccgcgcgttggccgattcattaatgcagctggcacgacaggtttcccgactggaaagcgggcagtgagcgcaacgcaattaattgagtctgcaaaaggacttgatgtgtgggacagctgcccgctgcaaaacgctgacggaacagtagctgaatacaacggctatcacgttgtgtttgctcttgcgggaagcccgaaagacgctgatgacacatcaatctacatgttttatcaaaaggtcggcgacaactcaatcgacagctggaaaaacgcgggccgtgtctttaaagacagcgataagttcgacgccaacgatccgatcctgaaagatcagacgcaagaatggtccggttctgcaacctttacatctgacggaaaaatccgtttattctacactgactattccggtaaacattacggcaaacaaagcctgacaacagcgcagggattttgccgatttcggaaccaccatcaaacaggattttcgcctgctggggcaaaccagcgtggaccgcttgctgcaactctctcagggccaggcggtgaagggcaatcagctgttgcccgtctcactggtgaaaagaaaaaccaccctggcgcccaatacgcaaaccgcctctccccgcgcgttggccgattcattaatgcagctggcacgacaggtttcccgactggaaagcgggcagtgagcgcaacgcaattaatgggattttgccgttttcgaaaccaccatcaaacaggattttcgcttgctggggcaaaccagcgtggaccgcttgctgcaactctctcagggccaggcggtgaagggcaatcagctgttgcccgtctcactggtgaaaagaaaaaccaccctggcgcccaatacgcaaaccgcctctccccgcgcgttggccgattcattaatgcagctggcacgacaggtttcccgactggaaagcgggcagagcgcccccccggagccccgccccaaggacagaacggaaagacaaagcaaacacagggaggagggaaaaaagggaacgggcccaaccaaggggacagagtagaccctgagcccgaaaaggacagaaccaacgccagagagaaaaaaccaggaagaaacacggccagaacaaaaacagaaagggccaagagggggggagggccggagaaaaccgggccgaacgcccaaaagggggtagagagaataggagggtcggagcagccaaagcccgggggaagtttcaacagcaaggacccaaagggagccaagatggacaacctcttcgcccccggacatttagcaatgtctggacatatttttggttgtcacaacttaggggcaggtgggaagagtgcagtactcacagctctcatagtcggtcttggtggaagagcagttgctactaatagaggatcctctttaaaaggttttgtgaaagatggacagaaggtttccgatttaagtggttttacggcccccctggacccccaaaaaaactttaattgggtgatggttccggtagtgggcccatcgcccctgatagacggtttttcgcccttttcacgttggagtccacgttcttttaatagtggactcttgttccaaactggaacaacactcaaccctatctcgggctattcttttgatttataagggattttgccgatttcggaaccaccatcaaacaggattttcgcctgctggggcaaaccagcgtggaccgcttgctgcaactctctcagggccaggcggtgaagggcaatcagctgttgcccgtctcactggtgaaaagaaaaaccaccctggcgcccaatacgcaaaccgcctctccccgcgcgttggccgattcattaatgcagctggcacgacaggtttcccgactggaaagcgggcagtgagcgcaacgcaattaatggattttgccgatttcggaaccaccatcaaacaggattttcgcctgctggggcaaaccagcgtggaccgcttgctgcaactctctcagggccaggcggtgaagggcaatcagctgttgcccgtctcactggtgaaaagaaaaaccaccctggcgcccaatacgcaaaccgcctctccccgcgcgttggccgattcattaatgcagctggcacgacaggtttcccgactggaaagcgggcagggaggtgaagattccccaaaccgattttttgacggcggacgaaaaaaacaaatcagaacggtccgccagtttatcgatgaaggcaataatacaccggcggacacccaaacgctgagagaccctcactacgttgaagacaaaggccataaataccttgtattcgaagccaacacgggaacagaaaacggataccaaggcgaagaatctttatttaacaaagcgtactacggcggcggcacgaacttcttccgtaaagaaagccagaagcttcagcagagcgctaaaaaacgcgatgctgagttagcgaacggcgccctcggtatcatagagttaaataatgattacacattgaaaaaagtaatgaagccgctgatcacttcaaacacggtaactgatgaaatcgagcgcgcgaatgttttcaaaatgaacggcaaatggtacttgttcactgattcacgcggttcaaaaatgacgatcgatggtattaactcaaacgatatttacatgcttggttatgtatcaaactctttaaccggcccttacaagccgctgaacaaaacagggcttgtgctgcaaatgggtcttgatccaaacgatgtgacattcacttactctcacttcgcagtgccgcaagccaaaggcaacaatgtggttatcacaagctacatgacaaacagaggcttcttcgaggataaaaaggcaacattgggggattttgccgatttcggaaccaccatcaaacaggattttcgcctgctggggcaaaccagcgtggaccgcttgctgcaactctctcagggccaggcggtgaagggcaatcagctgttgcccgtctcactggtgaaaagaaaaaccaccctggcgcccaatacgcaaaccgcctctccccgcgcgttggccgattcattaatgcagctggcacgacaggtttcccgactggaaagcgggcaggattttgccgatttcggaaccaccatcaaacaggattttcgcctgctggggcaaaccagcgtggaccgcttgctgcaactctctcagggccaggcggtgaagggcaatcagctgttgcccgtctcactggtgaaaagaaaaaccaccctggcgcccaatacgcaaaccgcctctccccgcgcgttggccgattcattaatgcagctggcacgacaggtttcccgactggaaagcgggcaggattttgccgatttcggaaccaccatcaaacaggattttcgcctgctggggcaaaccagcgtggaccgcttgctgcaactctctcagggccaggcggtgaagggcaatcagctgttgcccgtctcactggtgaaaagaaaaaccaccctggcgcccaatacgcaaaccgcctctccccgcgcgttggccgattcattaatgcagctggcacgacaggtttcccgactggaaagcgggcaggattttgccgatttcggaaccaccatcaaacaggattttcgcctgctggggcaaaccagcgtggaccgcttgctgcaactctctcagggccaggcggtgaagggcaatcagctgttgcccgtctcactggtgaaaagaaaaaccaccctggcgcccaatacgcaaaccgcctctccccgcgcgttggccgattcattaatgcagctggcacgacaggtttcccgactggaaagcgggcaggattttgccgatttgggaaccaccatcaaacaggattttcgcctgctggggcaaaccagcgtggaccgcttgctgcaactctctcagggccaggcggtgaagggcaatcagctgttgcccgtctcactggtgaaaagaaaaaccaccctggcgcccaatacgcaaaccgcctctccccgcgcgttggccgattcattaatgcagctggcacgacaggtttcccgactggaaagcgggcagtttcccatgaaatataagcctttcaagggcttcaaggaatccaaggtttgcacttccaggcatttccaggcttattctgctggaactctaattcctccatcctttcctaactgccacatctgggattttgccgatttcggaaccaccatcaaacaggattttcgcctgctggggcaaaccagcgtggaccgcttgctgcaactctctcagggccaggcggtgaagggcaatcagctgttgcccgtctcactggtgaaaagaaaaaccaccctggcgcccaatacgcaaaccgcctctccccgcgcgttggccgattcattaatgcagctggcacgacaggtttcccgactggaaagcgggcaaaaatttcgtaacggacaccagtgcgcccgaaggggggattggttaattgcgcgcgagggagaaaaggctcgcggaaaggccaatacttggctggtacgtggcggggatgtgaagtttactcttgaagtgctccggggtgaaagtgttaagaagacctttcgggtaaggccaggtaatgaacgtgaccaggagctgcttactgaggacgcactggatgatctcatcccttcttttctactgactggtcatcagacaccggcgttcggtcgaagagtatctggtgtcatagaaattgccgatgggagtcgccgtcgtaaagctgctgcacttaccgaaagtgattatcgtgttctggttggcgagctggatgatgagcagatggctgcattatccagattgggtaacgattatcgcccaacaagtgcttatgaacgtggtcagcgttatgcaagccgattgcagaatgaatttgctggaaatatttctgcgctggctgatgcggaaaatatttcacgtaagattattacccgctgtatcaacaccgccaaattgcctaaatcagttgttgctcttttttctcaccccggtgaactatctgcccggtcagggatttgccggatttcggaacccaccatcaaacaggattttcgcctgctggggcaaaccagcgtggaccgcttgctgcaactctctcagggccaggcggtgaagggcaatcagctgttgcccgtctcactggtgaaaagaaaaaccaccctggcgcccaatacgcaaaccgcctctccccgcgcgttggccgattcattaatgcagctggcacgacaggtttcccgactggaaagcgggcaggattttgccgatttcggaaccaccatcaaacaggattttcgcctgctggggcaaaccagcgtggaccgcttgctgcaactctctcagggccaggcggtgaagggcaatcagctgttgcccgtctcactggtgaaaagaaaaaccaccctggcgcccaatacgcaaaccgcctctccccgcgcgttggccgattcattaatgcagctggcacgacaggtttcccgactggaaagcgggcagtatcccaagggttactttgtccagaacacagactttgacttcttcaactatgcgggactgcagcggtctgtgcttctgtacacgacacctaccacctacatcgatgacatcaccatcaccaccggcgtggagcatgacagtgctgaatctctttgccttgaataccagggtccacctctgatgttcactgaagagtaccagaagagtctgccagagcagtaccatctgggtctggatcaaaaacgcagaaaatacgtggttggagagcttatcgggaattctgccgatttcacgactatgcagtacgctgatgacacatcaatctacatgttttatcaaaaggtcggcgacaattcatatgaccagctggaaaaacgcggggccgtgtctttaagaccagcgataagtttgacggccaacgatccgatcctgaaagatcagacgcaagaatggtccggttctgcaacctttacatctgacggaaaaatccgtttattctacactgactattccgggaaacattacggcaaacaaagcctgacaacagcgcaggtaaatgtgtcaaaatctgatgacacactcaaaatcaacggagtggaagatcacaaaacgatttttgacggagacggaaaaacatatcagaacgttcagcagtttatcgatgaaggcaattatacatccggcgacaaccatacgctgagagaccctcactacgttgaagacaaaggccataaataccttgtattcgaagccaacacgggaacagaaaacggataccaaggcgaagaatctttatttaacaaagcgtactacggcggcggcacgaacttcttccgtaaagaaagccagaagcttcagcagagcgctaaaaaacgcgatgctgagttagcgaacggcgccctcggtatcatagagttaaataatgattacacattgaaaaaagtaatgaagccgctgatcacttcaaacacggtaactgatgaaatcgagcgcgcgaatgttttcaaaatgaacggcaaatggtacttgttcactgattcacgcggttcaaaaatgacgatcgatgggtgtggtgtggacggtgtgtcccaggaacagggtgtggtgtggacggtgtgtcccacgaacagggtgtggtgtggacggtgtgtcccacgaacagggtgtggtgtggacggtgtgtcccacgaacaggaaagtggcagctttaccaagccgatgcagaaaaatttgctgcaaaattttgcgctgggcgatcgaaaaatatttcacgtaagattattacccgctgaatcaacaccgccaaattgcttaaatcagttgttgctctttatcgtcaccccggtgaactatctgcccggtcaggctttgcagaactttcagcggtataccggcatacagcatgtgcatcgcataggaatggcggaacgtatgtggtgtgaccggaacagagaacgtcacaccgtcagcagcagcggcggcaaccgcctccccaatccaggtcctgaccgttctattcatcatggaaggctgcagtacaagtttgactgtggaagtggccctggaattgtctctgttcagagcattcaggtcaatgatgggcagtggcacgcagtggccctggaagtgaatggaaactatgctcgcttggttctagaccaagttcatactgcatcgggcacagccccagggactctgaaaaccctgaacctggataactatgtgtttttggtggccacatccgtcagcagggaacaaggcatggaagaagtcctcaagttgaacgttcagcagtttatcgatgaaggcaattatacatccggcgacaaccatacgctgagagaccctcactacgttgaagacaaaggccataaataccttgtattcgaagccaacacgggaacagaaaacggataccaaggcgaagaatctttatttaacaaagcgtactacggcggcggcacgaacttcttccgtaaagaaagccagaagcttcagcagagcgctaaaaaacgcgatgctgagttagcgaacggcgccctcggtatcatagagttaaataatgattacacattgaaaaaagtaatgaagccgctgatcacttcaaacacggtaactgatgaaatcgagcgcgcgaatgttttcaaaatgaacggcaaatggtacttgttcactgattcacgcggttcaaaaatgacgatcgatggtattaactcaaacgatatttacatgcttggttatgtatcaaactctttaaccggcccttacaagccgctgaacaaaacagggcttgtgctgcaaatgggtcttgatccaaacgatgtgacattcacttactctcacttcgcagtgccgcaagccaaaggcaacaatgtggttatcacaagctacatgacaaacagaggcttcttcgaggataaaaaggcaacatttgcgccaagcttcttaatgaacatcaaaggcaataaaacatccgttgtcaaaaacagcatcctggagcaaggacagctgacagtcgggggccaaccccttcgcccagtgaaaaaccgcggccgggtctttaaaaacagcgatagttcgacgcccaacgatccgatcctgaaagatcagacgcaagaatggtccggttctgcaacctttacctctgagggaaaaatccgtttattctacactgactattccggtaaacattccggcaaacaaagcttgacaacagcgcaggtaaatgtgtcaaaatctgatgacacactcaaaatcaacggagtggaagatcacaaaacgatttttgacggagacggaaaaacatatcagaacgttcagcagtttatcgatgaaggcaattatacatccggcgacaaccatacgctgagagaccctcactacgttgaagacaaaggccataaataccttgtattcgaagccaacacgggaacagaaaacggataccaaggcgaagaatctttatttaacaaagcgtactacggcggcggcacgaacttcttccgtaaagaaagccagaagcttcagcagagcgctaaaaaacgcgatgctgagttagcgaacggcgccctcggtatcatagagttaaataatgattacacattgaaaaaagtaatgaagccgctgatcacttcaaacacggtaactgatgaaatcgagcgcgcgaatgttttcaaaatgaacggcaaatgcagtggcagtgtggacgtgtgtggactgtggcaaggtgctagccagcgccggggtgccagcctccatgcaggcatttgcagcagctgggtggcagcatggctggaggagggcagggggtccctgcaaggaatagaattgggcactcatgggggcagtctgctgttctccatgcttagttttgggcaggcagcagtgtcggcggcaggggctggtggtctcattgctgccagtgctcctatgacagtggtggtttactctagaggatccccgatcctgaaagatcagacgcaagaatggtccggttctgcaacctttacatctgacggaaaaatccgtttattctacactgactattccggtaaacattacggcaaacaaagcctgacaacagcgcaggtaaatgtgtcaaaatctgatgacacactcaaaatcaacggagtggaagatcacaaaacgatttttgacggagacggaaaaacatatcagaacgttcagcagtttatcgatgaaggcaattatacatccggcgacaaccatacgctgagagaccctcactacgttgaagacaaaggccataaataccttgtattcgaagccaacacgggaacagaaaacggataccaaggcgaagaatctttatttaacaaagcgtactacggcggcggcacgaacttcttccgtaaagaaagccagaagcttcagcagagcgctaaaaaacgcgatgctgagttagcgaacggcgccctcggtatcatagagttaaataatgattacacattgaaaaaagtaatgaagccgctgatcacttcaaacacggtaactgatgaaatcgagcgcgcgaatgttttcaaaatgaacggcaaatggtacttgttcactgattcacgcggttcaaaaatgacgatcgatggtattaactcaaacgatatttacatgcttggttatgtatcaaactctttaaccggcccttacaagccgctgaacaaaacaggggatcctctagagtcgacctgcaggcatgcaagcttggtgggattttgccgatttcggaaccaccatcaaacaggattttcgcctgctggggcaaaccagcgtggaccgcttgctgcaactctctcagggccaggcggtgaagggcaatcagctgttgcccgtctcactggtgaaaagaaaaaccaccctggcgcccaatacgcaaaccgcctctccccgcgcgttggccgattcattaatgcagctggcacgacaggtttcccgactggaaagcgggcagtgagcgcaacgcaattaatggattttgccgatttcggaaccaccatcaaacaggattttcgcctgctggggcaaaccagcgtggaccgcttgctgcaactctctcagggccaggcggtgaagggcaatcagctgttgcccgtctcactggtgaaaagaaaaaccaccctggcgcccaatacgcaaaccgcctctccccgcgcgttggccgattcattaatgcagctggcacgacaggtttcccgactggaaagcgggcagatttttgccgatttcgcaaccaccatcaaacagatttttcgcctgctggggcaaaccagcgtggaccgcttgctgcaactctctcagggccaggcggaaacagctatgaccatgattacgaattcgagctcggtacccccatcggatggccaacgaagcgtgcgtcgatgccgtgcttggcatagatcgggggttccatcgggaacaggcacagcaccaggcccagaccgaggggctcacgtaatgcacggtcggcacgccgcgctgcttcagccagcgttcgatgcccaggttgaagtcgggcgcgtcgatgccgatgaacacgtccggctgccattccagtgcacgctggcgaaacgcggaacgcagtttcagcaggcgtggcagacgtttcagcagtttatcgatgaaggcaattatacatccggcgacaaccatacgctgagagaccctcactacgttgaagacaaaggccataaataccttgtattcgaagccaacacgggaacagaaaacggataccaaggcgaagaatctttatttaacaaagcgtactacggcggcggcacgaacttcttccgtaaagaaagccagaagcttcagcagagcgctaaaaaacgcgatgctgagttagcgaacggcgccctcggtatcatagagttaaataatgattacacattgaaaaaagtaatgaagccgctgatcacttcaaacacggtaactgatgaaatcgagcgcgcgaatgttttcaaaatgaacggcaaatggtacttgttcactgattcacgcggttcaaaaatgacgatcgatggtattaactcaaacgatatttacatgcttggttatgtatcaaactctttaaccggcccttacaagccgctgaacaaaacagggcttgtgctgcaaatgggtcttgatccaaacgatgtgacattcacttactctcacttcgcagtgccgcaagccaaaggcaacaatggggnagaatccccattgcgacgtgctgaagacgtatttccaccggtgatcggggttgctgcccataaaggtggcgtttacaaaacctcagtttctgttcatcttgctcaggatctggctctgaaggggctacgtgttttgctcgtggaaggtaacgacccccagggaacagcctcaatgtatcacggatgggtaccagatcttcatattcatgcagaagacactctcctgcctttctatcttggggaaaaggacgatgtcacttatgcaataaagcccacttgctggccggggcttgacattattccttcctgtctggctctgcaccgtattgaaactgagttaatgggcaaatttgatgaaggtaaactgcccaccgatccacacctgatgctccgactggccattgaaactgttgctcatgactatgatgtcatagttattgacagcgcgcctaacctgggtatcggcacgattaatgtcgtatgtgctgctgatgtgctgattgttcccacgcctgctgagttgtttgactacacctccgcactgcagtttttcagatatgcttctgtgatctgctcaagaacgttgatcttaaagggttcgagcctgatgggaaggcaaacagaagagaattcagcaactgccactttgaaacaattttggggcaagacatgaagattcacaaaatgcagtttctagaagcggctggaatcgcctacatcacctccctctacttcgcactcagcagcctcaccagcgtgggctttggcaacgtgtccgccaacacggacaccgagaagatcttctccatctgcaccatgctcatcggcgccctgatgcacgcggtggtgtttgggaacgtgacggccatcatccagcgcatgtacgcccgccgctttctgtaccacagccgcacgcgcgacctgcgcgactacatccgcatccaccgtatccccaagcccctcaagcagcgcatgctggagtacttccaggccacctgggcggtgaacaatggcatcgacaccaccgagctgctgcagagcctccctgacgagctgcgcgcagacatcgccatgcacctgcacaaggaggtcctgcagctgccactgtttgaggcggccagccgcggctgcctgcgggcactgtctctggccctgcggcccgccttctgcacgccgggcgagtacctcatccaccaaggcgatgccctgcaggccctctactttgtctgctctggctccatggaggtgctcaagggtggcaccgtgctcgcctcctanatggtgcacacgcttgccagcaacggggccaactccatctgggagcactccctgctggaccccgcacaagtgcagagcggccggcgtaaagccaacccccaagacaaagtccagaacagagaactaatggaagaacagactaagcagtctattaccgcacctcaacttcgattctccgctcgttgtaaacataagaaccagttggctataactttacggaaacgaaatcgcaaacttgctactagtctgttctcatcaacccatattcgcatctctggcaccagtgtaattattagcgggaagggcgacctgatcggctgtgagctgccccggcgggagcaggtggtaaaggccaatgccgacgtgaaggggctgacgtactgcgtcctgcagtgtctgcagctggctggcctgcacgacagccttgcgctgtaccccgagtttgccccgcgcttcagtcgtggcctccgaggggagctcagctacaacctgggtgctgggggaggctctgcagagcgtaacggctggagccccacaggacgtttcaacctgtggtttgttctggctgcttacaaagcagcacagctgccaccgcaggagtatcactggctttctgggcctgattctcaggggctgctagattcatccctgatggcatcaggcactgccagccgctcagaggatgaggagtcactggcagggcagaagcgagcctcctcccaggccttgggcaccatccctaaacggagaagctcctccaggttcatcaagaggaagaagttcgatgatgagctggtggagagcagcctggcaaaatcttctacccgggcaaagggggccagtggggtggaaccagggcgctgttcggggagtgaaccctcctccagtgagaagaagaagggtttcaacctggttaacgattcatcaggattcatttttgatttgcagtccaataccgtactggcccagggaggagcttttgagaacatgaaagagaagctccagctggagtggaacgttcacctgaacatccctgaggtcacctcgccaaagccaaagaaatgcaagttgcctgcagcctcaccccggcacatccgccccagtggccccacctacaagcagccctttctgtctaggcaccgggcatgtgtgcccctgcagatggcccgtgtgtgggcttcagggactagcctgaccagtgcatttcaaactatgcgacggaaagactctgaggacccacacctgaaaacttataacctttctaccctgagcatcgatttggcatctgccgttggatgttcgagcaacagtgttgtgtcgccggccaaaaagggtcaagtgccccggcgcgtggcggaaggacgagccacaggacgagaacttcgtgcggacggcaaggacatcaacccggaaaaggccctcttggcttggatttcaatgaaggtgccgcaggcgtgtcccgttcggaacagcaacagccacagtggcagtggcagcaacagttgcgtggccgctttcagcgctttcattgttcgacttaagacccacacgggatctaccgcccgcccgcggggaccgctggtagaaacaggccagaggaagcaggtaaagtctgataagaagattgggttaggaacaatatttgataagcctactttgcttcgcaagtacctggttggcagccaaggcacgtgtagattcactgtggggactgctgaagccctggggctgaggtttctcattcatctggcaatccacaatcaagatgagaagcaggaaagggccaggaagataaatgcggtacgtgcaatagttcctaataagagcaacaatgaaattatcctggttttgcagcactttgataactgtgtggacaaaacagtacaagcattcatggaagtgatgaggctacgagtagaagtttcggctcttaaaaggcgtagacacaggaaaaaagaggagatggcccaaagcgaagggagagggcggcatttggtcggttacaaggccatgaccatctctgactgttactacttatactcctacaacctccacctctacaagccccgcagtcaaattagtgacttcatcagtctgccggccgagcaggctcagattcgatttgagattcacttaagccgctcattaatcaaactccgagcccaaggtatcgggaccaaagcacagaactctgctgcagcggtgagcccagcttattgccttcagctgggctgcccggccttccacttccggcgcggaagttggcgtcacgtcatggcgcgcctcggtggcgtcagagcggcgtcgggcctggcgggaaagtcgaaaactacgggcggcgacggcttctcggtagcagggaatccaatggccccagacttctctttgaactcatttgctccacccttcgccaatggccttccccggaacgttctccaggatcctccagagagccccaaagctttctccctcccttcactcaggctgctgctcaaatgtcacctccttagaaaagcccaccctgacagcccatctgaggaacaagatcatggtgttggccggacaggaacagttaatagtgttggaagtaatcaatccattcccagcatgtccatcagtgccagcagccaaagcagtagtgttaacagtcttccagatgtctcagatgacaagaattgtccccgtgtgaaaacaggtatttttcttctccaaaataaagctagtatcccatatggacgcttttctcaaggtggctcagactgccagatccaacaatttctccgcggcgacggtagcagccgcagggccaaagccggcttccgtgaggtacgtctacttccggttaacgaaccagggggctggcaatctcttccggttcgtcttggcaacgtgtgtgaagggggcgtggccatgtcagacctcttccaggacgatctgtacccggatacgccaggcccggagccggccctagaagcggacgaatggctatccggccaggacgccgaacccgtgctcatttcgctgagggacggctatgtgccccccaagcaccgcgagctccgggtcacgaagcgcaacatcctggacgtgcgcccgccctccggcccccgccgcagccagtcggccagcgacgcccccttgtcggtaagatcggccctgctgcactctggcccaatctacatctcccccaaccgcccctatacgacacggcctctctgtcctccgccccagcagcagcacaccctggagacgctgctggaagagatcaagcccctccgcgagcgggtgcaggcccaggagcagcgcatcacggctctggagaacatgctgtgcgagctggtggacggcccgcactacccccgtgcgccaggcagggcgagcgggctacctactgatcctttcggtggagctgtgcgccgtgcctgcccggtgccacctcctctcgtgcccctggcccgtgctgtgcgaaccttgcccctccgctacgcttcgtcgatagccgcactagtggtcggngcatccctaaacagcagcaaaacggaaaataccaagtgcctcaattcgatcaatcaacgattaaaaaatatgagtcttgcaaaggacttgatgtgtgggacagcttgtcgctgcaaaacgctgtacggaacaatagctgaatacaacgggtatcacgtacttcatcaagttcacagtctgattaatcgctcgccgccggagctgatgaaggagataatcctggtggacgatcacagtgaccgcgaatatttgggaaaggagctggagacctatatagcggaacactttaagtgggtgcgcgtggtgaggctgccaaggcgcacgggactgattggtgcccgagcggcgggcgcaaggaatgccactgcagaggtgctcatcttcctcgattcccacgtggaggccaactacaattggttgccaccgttgctggagccgattgccctgaacaaacggacggcggtgtgtccctttatcgatgtgattgaccacaccaacttccactaccgggcgcaggatgagggagcccgaggagcgttcgactgggagttcttttacaagcgcctgccattgctgccagaggatctaaagcatccggccgatccgttcaagagtcccatcatggctggcggtctatttgccatttctagggagttcttctgggaactgggcggctacgacgagggcctggacatctggggcggagaacagtatgagctaagcttcaagatctggatgtgtggtggtgaaatgtacgatgcgccctgctcccgcattgggcatatctatcgcggacctcgcaaccatcagccgagtcccaggaagggcgattacctgcacaagctgccttctagcttagagtgcgtttttattgccaaagaagaagattgcctaaggttgcaagggtcagaactaatcagctgccaatccattggttttaggtcaagatctgacacctgtaaagttgaacagggacaaccagcaacatcagctgcaatttcagtcaaagaaattgtcactgaaattgagtccatcagtcaaggagttgggcagattcaactgaaaggagacatcttacccaacccatgccatacaccaaagaagaacagcatccatgagctgctccttgagagggcccagactccagagaacaaacctggacatatggagcaagatgaggactcctgcacagcccagcctgagctagccaaagactcagggatgtgcaacccagaaggctgcctaaccacacactcatctatagcagacttggaagaaggggaaccagctgagggggaacaagagctccagggctcagggatgcacccaggtgccaagtggtaccctgggtctgtgaggcgagccaccttggagttcgaagagcgcttacggcaggagcaagagcatcatggtgctgccccaacatgtacctcattgtccactcgtaagaattcaaagaatgattcttctgtggcagacctagcaccaaaagggaaaagtgatgaagcccccccagaacattcatttgtcctcaaggaaccagaaatgagcaaaggcaaagggaaatacagtgggtctgaggctggctcactgtcccattctgagcagaatgccactgttccagctcccagggtgctggagtttgaccacttgccagatcatcaggagggcccagggtcagatactggaacacagcaggaaggagtcctgaaggatctgaggactgtgattccataccaggagtctgaaacacaagcagtccctcttccccttcccaagagggtgaggattcatggcaactcgactgacatacctgggaaagacttaaaatttggttga

SEQ ID NO: 142628 - DNA, 20795 bp, Homo sapiens
  misc_feature (1)...(20795): n = a,t,c or g
ctactctagagatccccatggggcgttgccgttggccggtgtctcagcgcactggctgtcgggctggtccccctgggttcgctgctggcgtgcttgttctccgagcactcgccgttcacgtcctctccgttccacactggcctttgctattttctccacgcgggtcttatggatgctgtccgagctgtggagcatctgccctcctggccctcctgcagctcgggctgtgctccaagagaaacgaaaacatgtccacaaaaagacttgtaaagaatgttcaggggtaccgagctcgaattcgtaatcatggtcatagctgtttcccgtgttggcttcgaatacaaggtatttatggcctttgtcttcaacgtagtgagggtctctcagcgtatggttgtcgccggatgtataattgccttcatcgataaactgctgaacgttctgatatgtttttccgtctccgtcaaaaatcgttttgtgatcttccactccgttgattttgagtgtgtcatcagattttgacacatttacctgcgctgttgtcaggctttgtttgccgtaatgtttaccggaatagtcagtgtagaataaacggatttttccgtcagatgtaaaggttgcagaaccggaccattcttgcgtctgatctttcaggatcggatcgttggcgtcgaacttatcgctgtctttaaagacacggcccgcgtttttccagctgtcgattgagttgtcgccgaccttttgataaaacatgtagattgatgtgtcatcagcgtctttcgggcttcccgcaagagcaaacacaacgtgatagccgttgtattcagctactgttccgtcagcgttttgcagcggccagctgtcccacacatcaagtccttttgcagactcaatattttttaatcgttgattgatcgaattgaggcacttggtatttttcgttttgctgctgtttagggattgcccgctttccagtcgggaaacctgtcgtgccagctgcattaatgaatcggccaacgcgcggggagaggcggtttgcgtattgggcgccagggtggtttttcttttcaccagtgagacgggcaacagctgattgcccttcaccgcctggccctgagagagttgcagcaagcggtccacgctggtttgccccagcaggcgaaaaatcctgttgatggtggttccgaaatcggcaaaatccgttttccaaaagtggcacgatattggctctgcgtagaccatggggtgaagtgtgcgtgcagtgaaacctggagtgaccctgaccgctgatacaagcaatggtgtggacgctgcttgcagacacgccgagcacccaagagtgcattcggggtgattccatttatatgatgtttcaaacaggaaacgttcatcaatgcggccggactcggtgatctcgttgagggcccggagcaggtcgccacctagcttcttgacattcctgaggtcatcaagcatggagtaggagaggtccatcagatagtacaggtcgatggggtagcccttggcccgccggaaggtcacgttgaacgctgctgcctggctgtccggatgaggataatcgggccctttagggcggctgctctgtgaattccctgagtgggtgagctcagtacccacgacgcactgcccgccgggcaccactacccctttcacagatgaggaaactgagggctcggggtaaggaagggcctggggcgtctgcccgctttccagtcgggaaacctgtcgtgccagctgcattaatgaatcggccaacgcgcggggagaggcggtttgcgtattgggcgccagggtggtttttcttttcaccagtgagacgggcaacagctgattgcccttcaccgcctggccctgagagagttgcagcaagcggtccacgctggtttgccccagcaggcgaaaatcctgtttgatggtggttccgaaatcggcaaaatcctgcccgctttccagtcgggaaacctgtcgtgccagctgcattaatgaatcggccaacgcgcggggagaggcggtttgcgtattgggcgccagggtggtttttcttttcaccagtgagacgggcaacagctgattgcccttcaccgcctggccctgagagagttgcagcaagcggtccacgctggtttgccccagcaggcgaaaatcctgtttgatggtggttccgaaatcggcaaaatcctgcccgctttccagtcgggaaacctgtcgtgccagctgcattaatgaatcggccaacgcgcggggagaggcggtttgcgtattgggcgccagggtggtttttcttttcaccagtgagacgggcaacagctgattgcccttcaccgcctggccctgagagagttgcagcaagcggtccacgctggtttgccccagcaggcgaaaatcctgtttgatggtggttccgaaatcggcaaaatcctgcccgctttccagtcgggaaacctgtcgtgccagctgcattaatgaatcggccaacgcgcggggagaggcggtttgcgtattgggcgccagggtggtttttcttttcaccagtgagacgggcaacagctgattgcccttcaccgcctggccctgagagagttgcagcaagcggtccacgctggtttgccccagcaggcgaaaatcctgtttgatggtggttccgaaatcggcaaaatcctgcccgctttccagtcgggaaacctgtcgtgccagctgcattaatgaatcggccaacgcgcggggagaggcggtttgcgtattgggcgccagggtggtttttcttttcaccagtgagacgggcaacagctgattgcccttcaccgcctggccctgagagagttgcagcaagcggtccacgctggtttgccccagcaggcgaaaatcctgtttgatggtggttccgaaatcggcaaaatcctgcccgctttccagtcgggaaacctgtcgtgccagctgcattaatgaatcggccaacgcgcggggagaggcggtttgcgtattgggcgccagggtggtttttcttttcaccagtgagacgggcaacagctgattgcccttcaccgcctggccctgagagagttgcagcaagcggtccacgctggtttgccccagcaggcgaaaatcctgtttgatggtggttccgaaatcggcaaaatcctcagcatcgcgttttttagcgctctgctgaagcttctggctttctttacggaagaagttcgtgccgccgccgtagtacgctttgttaaataaagattcttcgccttggtatccgttttctgttcccgtgttggcttcgaatacaaggtatttatggcctttgtcttcaacgtagtgagggtctctcagcgtatggttgtcgccggatgtataattgccttcatcgataaactgctgaacgttctgatatgtttttccgtctccgtcaaaaatcgttttgtgatcttccactccgttgattttgagtgtgtcatcagattttgacacatttacctgcgctgttgtcaggctttgtttgccgtaatgtttaccggaatagtcagtgtagaataaacggatttttccgtcagatgtaaaggttgcagaaccggaccattcttgcgtctgatctttcaggatcggatcgttggcgtcgaacttatcgctgtctttaaagacacggcccgcgtttttccagctgtcgattgagttgtcgccgaccttttgataaaacatgtagattgatgtgtcatcagcgtcttttcggtgcccgctttccagtcgggaaacctgtcgtgccagctgcattaatgaatcggccaacgcgcggggagaggcggtttgcgtattgggcgccagggtggtttttcttttcaccagtgagacgggcaacagctgattgcccttcaccgcctggccctgagagagttgcagcaagcggtccacgctggtttgccccagcaggcgaaaatcctgtttgatggtggttccgaaatcggcaaaatcctgcccgctttccagtcgggaaacctgtcgtgccagctgcattaatgaatcggccaacgcgcggggagaggcggtttgcgtattgggcgccagggtggtttttcttttcaccagtgagacgggcaacagctgattgcccttcaccgcctggccctgagagagttgcagcaagcggtccacgctggtttgccccagcaggcgaaaatcctgtttgatggtggttccgaaatcggcaaaatccgggagcccccgttttaggtcttgccgggaaggccgccaaggttggtccctgcggtggtgattggcgggggtgtgcgtgggcccttgggtgggggggggtgggtggccctgtctttccgcgggggggtggtggttcccgtgtgtccagggcgccgccggggtcggctttatttgcgtacgttttccaggttcttgatctgatgggtaccgagctcgaattcgaatcatggtcatagctgtttcccatttttcagtgtctaccttgtgaaggaagtcagtttgagggttttcggaggaaatgtcatcctcatcatccgatctgtctaagatgtggtccactttgataatttcctttagcaaactcctctcttgggtgatttttcttaatctgcaggcctgagtggcttggtctggtggcggcttattaaaagacttgcctgcccctggagggtcaaactggtaaaggtggcgttggcctggctgctggcccgtgaccccctccgcgtccatggttcttggaaatccttccctgtactctgcgtgcggtggggttttcctagaggtctttttccgctcgtggtggtgttggggcccgggtgggttcgggtgcggcttctccgcgtgggcccgtgtgcgctcgcccagttgcgttcgtgtggtggtgtgtcggtgcccgctttccagtcgggaaacctgtcgtgccagctgcattaatgaatcggccaacgcgcggggagaggcggtttgcgtattgggcgccagggtggtttttcttttcaccagtgagacgggcaacagctgattgcccttcaccgcctggccctgagagagttgcagcaagcggtccacgctggtttgccccagcaggcgaaaatcctgtttgatggtggttccgaaatcggcaaaatccattaattgcgttgcgctcactgcccgctttccagtcgggaaacctgtcgtgccagctgcattaatgaatcggccaacgcgcggggagaggcggtttgcgtattgggcgccagggtggtttttcttttcaccagtgagacgggcaacagctgattgcccttcaccgcctggccctgagaagagttgcagcaagcggtccacgctggttttgccccaccaggcgaaaattcctgttttgagggtgggttccgaaatcggcaaaatcccagtgagacgggcaacagctgattgcccttcaccgcctggccctgagagagttgcagcaagcggtccacgctggtttgccccagcaggcgaaaatcctgtttgatggggtggttccgaaatcggcaaaatcccagtgagacgggcaacagctgattgcccttcaccgcctggccctgagagagttgcagcaagcggtccacgctggtttgccccagcaggcgaaaatcctgtttgatggtggttccgaaatcggcaaaatcctgcccgctttccagtcgggaaacctgtcgtgccagctgcattaatgaatcggccaacgcgcggggagaggcggtttgcgtattgggcgccagggtggtttttcttttcaccagtgagacgggcaacagctgattgcccttcaccgcctggccctgagagagttgcagcaagcggtccacgctggtttgccccagcaggcgaaaatcctgtttgatggtggttccgaaatcggcaaaatcctgcccgctttccagtcgggaaacctgtcgtgccagctgcattaatgaatcggccaacgcgcggggagaggcggtttgcgtattgggcgccagggtggtttttcttttcaccagtgagacgggcaacagctgattgcccttcaccgcctggccctgagagagttgcagcaagcggtccacgctggtttgccccagcaggcgaaaatcctgtttgatggtggttccgaaatcggcaaaatcctgcccgctttccagtcgggaaacctgtcgtgccagctgcattaatgaatcggccaacgcgcggggagaggcggtttgcgtattgggcgccagggtggtttttcttttcaccagtgagacgggcaacagctgattgcccttcaccgcctggccctgagagagttgcagcaagcggtccacgctggtttgccccagcaggcgaaaatcctgtttgatggtggttccgaaatcggcaaaatccgccccgccctgccactcatcgcagtactgttgtaattcattaagcattctgccgacatggaagccatcacaaacggcatgatgaacctgaatcgccagcggcatcagcaccttgtcgccttgcgtataatatttgcccatggtgaaaacgggggcgaagaagttgtccatatgggtaccgagctcgaattcgtaatcatggtcatagctgtttctcaccagctgctggtagagcttagtgttcctttgatcttcttcactctggaagctgtattcctcctttagtttcagatatggagaacaggcttgaaatgttgttttgcaagccagtgagacgggcaacagctgattgcccttcaccgcctggccctgagagagttgcagcaagcggtccacgctggtttgccccagcaggcgaaaatcctgtttgatggtggttccgaaatcggcaaaatcctgcccgctttccagtcgggaaacctgtcgtgccagctgcattaatgaatcggccaacgcgcggggagaggcggtttgcgtattgggcgccagggtggtttttcttttcaccagtgagacgggcaacagctgattgcccttcaccgcctggccctgagagagttgcagcaagcggtccacgctggtttgccccagcaggcgaaaatcctgtttgatggtggttccgaaatcggcaaaatcctgcccgctttccagtcgggaaacctgtcgtgccagctgcattaatgaatcggccaacgcgcggggagaggcggtttgcgtattgggcgccagggtggtttttcttttcaccagtgagacgggcaacagctgattgcccttcaccgcctggccctgagagagttgcagcaagcggtccacgctggtttgccccagcaggcgaaaatcctgtttgatggtggttccgaaatcggcaaaatcctgcccgctttccagtcgggaaacctgtcgtgccagctgcattaatgaatcggccaacgcgcggggagaggcggtttgcgtattgggcgccagggtggtttttcttttcaccagtgagacgggcaacagctgattgcccttcaccgcctggccctgagagagttgcagcaagcggtccacgctggtttgccccagcaggcgaaaatcctgtttgatgggtggttccgaaatcggcaaaatcctgcccgctttccagtcgggaaacctgtcgtgccagctgcattaatgaatcggccaacgcgcggggagaggcggtttgcgtattgggcgccagggtggtttttcttttcaccagtgagacgggcaacagctgattgcccttcaccgactggccctgagagagttggagcaagcggtccacgctggtttgccccaacaggcgaaaatcctgcaggaagcggcggcggaagtcaggcatacgctggtaactttgaggcagctggtaacgctctatgatccagtcgattttcagagagacgatgcctgagccatccggcttacgatactgacacagggattcgtataaacgcatggcatacggattggtgatttcttttgtttcactaagccgaaactgcgtaaaccggttcgctgcaagagcatttctccaggcaccagttgaagagcgttgatcaatggcctgttcaaaaacagttctcatccggatctgacctttaccaacttcatccgtttcacgtacaacattttttagaaccatgcttccccaggcatcccgaatttgctcctccatccacggggactgagagccattactattgctgtatttggtaagcaaaatacgtacatcaggctcgaaccctttaagatcaacgttcttgagcagatcacgaagcatatcgaaaaactgcagtgcggaggtgtagtcaaacaactcagcaggcgtgggaacaatcagcacatcagcagcacatacgacattaatcgtgccgatacccaggttaggcgcgctgtcaataactatgacatcatagtcatgagcaacagtttcaatggccagtcggagcatcaggtgtggatcggtgggcagtttaccttcatcaaatttgcccattaactcagtttcaatacggtgcaaagccagacaggaaggaataatgtcaagccccggccagcaagtgggctttattgcataagtgacatcgtccttttccccaagatagaaaagcaggagagtgtcttctgcatgaatattaaagatctggtaccccatccctgatacattggagctgttccctggttacccaggccgtgccggcacgttaaccgggctgcatccgatgcaagtgtgtcgctgtcgacggtgacccgtgtatgaaatctaacaatgcgctcatcgtcatcctcggcaccgtcaccctggatgctgtaggcataggcttggttatgccggtactgccgggcctcttgcgggatatcgtccattccgacagcatcgccagtcactatggcgtgcgcctggccctgagagagttgcagcaagcggtccacgctggtttgccccagcaggcgaaaatcctgtttgatggtggttccgaaatcggcaaaatcctgcccgctttccagtcgggaaacctgtcgtgccagctgcattaatgaatcggccaacgcgcggggagaggcggtttgcgtattgggcgccagggtggtttttcttttcaccagtgagacgggcaacagctgattgcccttcaccgcctggccctgagagagttgcagcaagcggtccacgctggtttgccccagcaggcgaaaatcctgtttgatggtggttccgaaatcggcaaaatccctgaaatgtttatgatggtctttagacctgatagttgcagctcggtcattgggaaaggctaatagcatatccttcactggctcttcacatgagcgatgattgtgagtgcgtgtcatggctgattgaagcattgctacaggtgcataattcttgcgttttgccaagtctttgaccacaaactttcccgtgggattacggatcgaaggcaatatacttacaagaagatagtcaaacctgatatgtggacttccaacacccaaaggcttatgtggaaaatattgtatcccttgttttccttctgttcctctattgcctttgatgttcattaagaagcttggcgcaaatgttgcctttttatcctcgaagaagcctctgtttgtcatgtagcttgtgataaccacattgttgcctttggcttgcggcactgcgaagtgagagtaagtgaatgtcacatcgtttggatcaagacccatttgcagcacaagccctgttttgttcagcggcttgtaagggccggttaaagagtttgatacataaccaagcatgtaaatatcgtttgagttaataccatcgatcgtcatttttgaaccgcgtgaatcagtgaacaagtaccatttgccgttcattttgaaaacattcgcgcgctcgatttcatcagttaccgtgtttgaagtgatcagcggcttcattacttttttcaatgtgtaatcattatttaactctatgataccgagggcgccgttcgctaactcagcatcgcgttttttagcgctctgctgaagcttctggcttactttacggaagaagttcgtgccgccgccgtagtacgctttgttaaataaagattcttcgccttggtatccgttttctgttcccgtgttggcttcgaatacaaggtatttatggcctttgtcttcaacgtagtgagggtctctcagcgtatggttgtcgccggatgtataattgccttcatcgataaactgctgaacgttctgatatgtttttccgtctccgtcaaaaatcgttttgtgatcttccactccgttgattttgagtgtgtcatcagattttgacacatttacctgcgctgttgtcaggctttgtttgccgtaatgtttaccggaatagtcagtgtagaataaacggatttttccgtcagatgtaaaggttgcagaaccggaccattcttgcgtctgatctttcaggatcggatcgttggcgtcgaacttatcgctgtctttaaagacacggcccgcgtttttccagctgtcgattgagttgtcgccgaccttttgataaaacatgtagattgatgtgtcatcagcgtctttcgggcttcccgcaagagcaaacacaacgtgatagccgttgtattcagctactgttccgtcagcgttttgcagcggccagctgtcccacacatcaagtccttttgcagactcaatatttttaatcgttgattgatcgaattgaggcacttggtatttttcgttttgctgctgtttagggatctgttgaagttgggaatggccctttgcagacagctgcccgctttccagtcgggaaacctgtcgtgccagctgcattaatgaatcggccaacgcgcggggagaggcggtttgcgtattgggcgccagggtggtttttcttttcaccagtgagacgggcaacagctgattgcccttcaccgcctggccctgagagagttgcagcaagcggtccacgctggtttgccccagcaggcgaaaatcctgtttgatggtggttccgaaatcggcaaaatccattaattgcgttgcgctcactgcccgctttccagtcgggaaacctgtcgtgccagctgcattaatgaatcggccaacgcgcggggagaggcggtttgcgtattgggcgccagggtggtttttcttttcaccagtgagacgggcaacagctgattgcccttcaccgcctggccctgagagagttgcagcaagcggtccacgctggtttgccccagcaggcgaaaatcctgtttgatggtggttccgaaatcggcaaaatccctcctgcttgtttgattttccaaggcatgaaaatcttgcatgcctgcaggtcgactctagaggatcccccgctctgctgaagcttctggctttctttacggaagaagttcgtgccgccgccgtagtacgctttgttaaataaagattcttcgccttggtatccgttttctgttcccgtgttggcttcgaatacaaggtatttatggcctttgtctgcgctgttgtcaggctttgtttgccgtaatgtttaccggaatagtcagtgtagaataaacggatttttccgtcagatgtaaaggttgcagaaccggaccattcttgcgtctgatctttcaggatcggatcgttggcgtcgaacttatcgctgtctttaaagacacggcccgcgtttttccagctgtcgattgagttgtcgccgaccttttgataaaacatgtagattgatgtgtcatcagcgtctttcgggcttcccgcaagagcaaacacaacgtgatagccgttgtattcagctactgttccgtcagcgttttgcagcggccagctgtcccacacatcaagtccttttgcagactcaatatttttaatcgttgattgatcgaattgaggcacttggtatttttcgttttgctgctgtttagggatgggcccaattataggccgtgagatgggggcacataaacacaatattttggggccggggagctcccttggatttttccggaaagggtgctttgggcccacaaacttcttgagtcccttgggcccggggaaatcgtttttcttcaacacgggggggggtccctgcgtggtttttaaggtcgactctagaggatcccctcttaaaatctcatcatttgatccatcatgatgcaaccagcttaagtcaggctgcttgctgttcaggggcgcctggccctgagagagttgcagcaagcggtccacgctggtttgccccagcaggcgaaaatcctgtttgatggtggttccgaaatcggcaaaatccccggccgtcgctttaatgtcccgtgctacaggggcgttacctatgggttgcttttgacgagcacgtattaacgtgcttttcctcgttaacatgcttgcatgcctgcaggtcgactctagaggatccctgtttattgcaatcattgcccgctttccagtcgggaaacctgtcgtgccagctgcattaatgaatcggccaacgcgcggggagaggcggtttgcgtattgggcgccagggtggtttttcttttcaccagtgagacgggcaacagctgattgcccttcaccgcctggccctgagagagttgcagcaagcggtccacgctggtttgccccagcaggcgaaaatcctgtttgatggtggttccgaaatcggcaaaatcccttataaatcaaaagaatagcccgagatagggttgagtgttgttccagtttggaacaagagtccactgcatgcctgcaggtcgactctagaggatccccgttcgctaactcagcatcgcgttttttagcgctctgctgaagcttctggctttctttacggaagaagttcgtgccgccgccgtagtacgctttgttaaataaagattcttcgccttggtatccgttttctgttcccgtgttggcttcgaatacaaggtatttatggcctttgtgtagtgacgggtctctcagcgtatggttgtcgccggatgtataattgccttcatcgataaactgctgaacgttctgatatgtttttccgtctccgtcaaaaatcgttttgtgatcttccactccgttgattttgagtgtgtcatcagattttgacacatttacctgcgctgttgtcaggctttgtttgccgtaatgtttaccggaatagtcagtgtagaataaacggatttttccgtcagatgtaaaggttgcagaaccggaccattcttgcgtctgatctttcaggatcggatcgttggcgtcgaacttatcgctgtctttaaagacacggcccgcgtttttccagctgtcgattgagttgtcgccgaccttttgataaaacatgtagattgatgtgtcatcagcgtctttcgggcttcccgcaagagcaaacacaacgtgatagccgttgtattcagctactgttccgtcagcgttttgcagcggccagctgtcccacacatcaagtccttttgcagactcaatatttttaatcgttgattgatcgaattgaggcacttggtatttttcgttttgctgctgtttagggatctgcagcatatcatggcgtgtaatatgagagacgccgtacgtttctttgtatgctttttggttattttctttcgcgaaggcttgagtcgctcctcctgaaatgttcagcagcattctgccacccttgtacccagaatcccctatccacacagagccagccaggggatgatttggacttccacatcctataccaccataaaagtgtgagtaacgtccctgtctgaagttttctagcacattggcttttagtaaaccacttcgtgctgaatgctgtctcgagtgcccgctttccagtcgggaaacctgtcgtgccagctgcattaatgaatcggccaacgcgcggggagaggcggtttgcgtattgggcgccagggtggtttttcttttcaccagtgagacgggcaacagctgattgcccttcaccgcctggccctgagagagttgcagcaagcggtccacgctggtttgccccagcaggcgaaaatcctgtttgatggtggttccgaaatcggcaaaatcccttgagaaagtcagcttccactcattctcttcctcctccttccctgagtaatttagtccaagaggcatttggtgaggctccataatgtacgcgactgtgttcaggtactctgaatatggtagcagctccctttgaggaagagtttgggaaatattttcaggtgactgctgtgttgagtcagagttttccncctccctcgcggaggtgtagtcattcaactcagcaggcgtgggaacaatcagcacatcagcagcacatacgacattaatcgtgccgatacccaggttaggcgcgctgtcaataactatgacatcatagtcatgagcaacagtttcaatggccagtcggagcatcaggtgtggatcggtgggcagtttaccttcatcaaatttgcccattaactcagtttcaatacggtgcagagccagacaggaaggaataatgtcaagccccggccagcaagtgggctttattgcataagtgacatcgtccttttccccaagatagaaaggcaggagagtgtcttctgcatgaatatgaagatctggtacccatccgtgatacattgaggctgttccctgggggtcgttaccttccacgagcaaaacacgtagccccttcagagccagatcgttgcctttggcttgcggcactgcgaagtgagagtaagtgaatgtcacatcgtttggatcaagacccatttgcagcacaagccctgttttgttcagcggcttgtaagggccggttaaagagtttgatacataaccaagcatgtaaatatcgtttgagttaataccatcgatcgtcatttttgaaccgcgtgaatcagtgaacaagtaccatttgccgttcattttgaaaacattcgcgcgctcgatttcatcagttaccgtgtttgaagtgatcagcggcttcattacttttttcaatgtgtaatcattatttaactctatgataccgagggcgccgttcgctaactcagcatcgcgttttttagcgctctgctgaagcttctggctttctttacggaagaagttcgtgccgccgccgtagtacgctttgttaaataaagattcttcgccttggtatccgttttctgttcccgtgttggcttcgaatacaaggtatttatggcctttgtctgacctgacaaagccttttacgctgtatgtttctgggcctcgttcaggagccaccgcagccaaaaagaaggggaggagccgggactggtcgagggtgacccggggctggaagctatcgaagctgcagtcagggaaggtggaggaagaagctgagaagctaaaggagctctgtntggcttctcttcgctgggaattttcttttgtggttttgggtttggttttcagctgggaacttttgtccccttcctcccgtttggtccgtttctttgcggtgttgtggctctgggggctgtgccgggggtggcttttgggtttcaggcctcgcctcgttccttttgcttggtcggtccgctctgcggtgctgttctggccgtgggccttccgtggttttttgtggtgtggggggttggcgcgctgggcctgcccgctttccagtcgggaaacctgtcgtgccagctgcattaatgaatcggccaacgcgcggggagaggcggtttgcgtattgggcgccagggtggtttttcttttcaccagtgagacgggcaacagctgattgcccttcaccgcctggccctgagagagttgcagcaagcggtccacgctggtttgccccagcaggcgaaaatcctgtttgatggtggttccgaaatcggcaaaatcctgcccgctttccagtcgggaaacctgtcgtgccagctgcattaatgaatcggccaacgcgcggggagaggcggtttgcgtattgggcgccagggtggtttttcttttcaccagtgagacgggcaacagctgattgcccttcaccgcctggccctgagagagttgcagcaagcggtccacgctggtttgccccagcaggcgaaaatcctgtttgatggtggttccgaaatcggcaaaatcctgcccgctttccagtcgggaaacctgtcgtgccagctgcattaatgaatcggccaacgcgcggggagaggcggtttgcgtattgggcgccagggtggtttttcttttcaccagtgagacgggcaacagctgattgcccttcaccgcctggccctgagagagttgcagcaagcggtccacgctggtttgccccagcaggcgaaaatcctgtttgatggtggttccgaaatcggcaaaatcctgcccgctttccagtcgggaaacctgtcgtgccagctgcattaatgaatcggccaacgcgcggggagaggcggtttgcgtattgggcgccagggtggtttttcttttcaccagtgagacgggcaacagctgattgcccttcaccgcctggccctgagagagttgcagcaagcggtccacgctggtttgccccagcaggcgaaaatcctgcgctgttgtcaggctttgtttgccgtaatgtttaccggaatagtcagtgtagaataaacggatttttccgtcagatgtaaaggttgcagaaccggaccattcttgcgtctgatctttcaggatcggatcgttggcgtcgaacttatcgctgtctttaaagacacggcccgcgtttttccagctgtcgattgagttgtcgccgaccttttgataaaacatgtagattgatgtgtcatcagcgtctttcgggcttcccgcaagagcaaacacaacgtgatagccgttgtattcagctactgttccgtcagcgttttgcagcggccagctgtcccacacatcaagtccttttgcagactcaatatttttaatcgttgattgatcgaattgaggcacttggtatttttcgttttgctgctgtttagggatctgcagcatatcatggcgtgtaatatgagagacgccgtacgtttctttgtatgctttttggttattttctttcgcgaaggcttgagtcgctcctcctgccagaagtgcagtcgtaaaagtcagaactgtggcttgttttacaatttttttgatgttcatgttcatgtctccttctgtatgtactgttttttgcgatctgccgtttcgatcctcccgaattgactggatctgacgctgcttcttcgcccttggtgttgctgaagcttttgtgggctcttctgtgtaatacttgtcaatttttcgtttttcttttttaagcttgtgaaaaacttttggatgcaacctagttttggtggcagaaagaaatggtttcagtgagacgggcaacagctgattgcccttcaccgcctggccctgagagagttgcagcaagcggtccacgctggtttgccccagcaggcgaaaatcctgtttgatggtggttccgaaatcggcaaaatcctgcccgctttccagtcgggaaacctgtcgtgccagctgcattaatgaatcggccaacgcgcggggagaggcggtttgcgtattgggcgccagggtggtttttcttttcaccagtgagacgggcaacagctgattgcccttcaccgcctggccctgagagagttgcagcaagcggtccacgctggtttgccccagcaggcgaaaatcctgtttgatggtggttccgaaatcggcaaaatcctgcccgctttccagtcgggaaacctgtcgtgccagctgcattaatgaatcggccaacgcgcggggagaggcggtttgcgtattgggcgccagggtggtttttcttttcaccagtgagacgggcaacagctgattgcccttcaccgcctggccctgagagagttgcagcaagcggtccacgctggtttgccccagcaggcgaaaatcctgtttgatggtggttccgaaatcggcaaaatcctgcccgctttccagtcgggaaacctgtcgtgccagctgcattaatgaatcggccaacgcgcggggagaggcggtttgcgtattgggcgccagggtggtttttcttttcaccagtgagacgggcaacagctgattgcccttcaccgcctggccctgagagagttgcagcaagcggtccacgctggtttgccccagcaggcgaaaatcctgtttgatggtggttccgaaatcggcaaaatccatcaggctcgaaccctttaagataacgttcttgagcagatcacgaagcatatcgaaaaactgcagtgcggaggtgtagtcaaacaactcagcaggcgtgggaacaatcagcacatcagcagcacatacgacattaatcgtgccgatacccaggttaggcgcgctgtcaataactatgacatcatagtcatgagcaacagtttcaatggccagtcggagcatcaggtgtggatcggtgggcagtttaccttcatcaaatttgcccattaactcagtttcaatacggtgcagagccagacaggaaggaataatgtcaagccccggccagcaagtgggctttattgcataagtgacatcgtccttttccccaagatagaaaggcaggagagtgtcttctgcatgaatatgaagatctggtacccatccgtgatacattgaggctgttccctgggggtcgttaccttccacgagcaaaacacgtagccccttcagagccagatcctgagcaagatgaacagaaactgaggttttgtaaacgccacctttatgggcagcaaccccgatcaccggtggaaatacgtcttcagcacgtcgcaatcgcgtaccaaacacatcacgcatatgattaatttgttcaattgtataaccaacacgttgctcaacccgtcctcgaatttccatatccgggtgcgggagtcgccctgctttctcggcatctctgatagccagtgagacgggcaacagctgattgcccttcaccgcctggccctgagagagttgcagcaagcggtccacgctggtttgccccagcaggcgaaaatcctgtttgatggtggttccgaaatcggcaaaatcctgcccgctttccagtcgggaaacctgtcgtgccagctgcattaatgaatcggccaacgcgcggggagaggcggtttgcgtattgggcgccagggtggtttttcttttcaccagtgagacgggcaacagctgattgcccttcaccgcctggccctgagagagttgcagcaagcggtccacgctggtttgccccagcaggcgaaaatcctgtttgatggtggttccgaaatcggcaaaatcctgcccgctttccagtcgggaaacctgtcgtgccagctgcattaatgaatcggccaacgcgcggggagaggcggtttgcgtattgggcgccagggtggtttttcttttcaccagtgagacgggcaacagctgattgcccttcaccgcctggccctgagagagttgcagcaagcggtccacgctggtttgccccagcaggcgaaaatcctgtttgatggtggttccgaaatcggcaaaatcctgcccgctttccagtcgggaaacctgtcgtgccagctgcattaatgaatcggccaacgcgcggggagaggcggtttgcgtattgggcgccagggtggtttttcttttcaccagtgagacgggcaacagctgattgcccttcaccgcctggccctgagagagttgcagcaagcggtccacgctggtttgccccagcaggcgaaaatcctgtttgatggtggttccgaaatcggcaaaatccattaattgcgttgcgctcactgcccgctttccagtcgggaaacctgtcgtgccagctgcattaatgaatcggccaacgcgcggggagaggcggtttgcgtattgggcgccagggtgggttttcttttcaccagtgagacgggcaacagctgattgcccttcaccgcctggccctggattggggaggcggttgccgccgctgctgctgacggtgtgacgttctctgttccggtcacaccacatacgttccgccattcctatgcgatgcacatgctgtatgccggtataccgctgaaagttctgcaaagccttttgaagcaggtggtgtgaaaaacctattctgactgtggaaagcaccccgtcctcctctattgcctgaaaacccaccacgggaagaaatcttctgtgatactttgagtggccgttttggtggaggtattccatcttgaggaaccacttctttactttcagcagcaacaaagtcatccacatgcatagatggtggtctacttgtgttctgttttctctgacgaaaaatatcatgaggtcgtataccctgtccaaatcctcccctgccccttcctcttggtggtggcacaacatgagctcttttggcaggttcaatgtattcagattttccacacgggaagaaatcttctgtgatactttgagtggccgttttggtggaggtattccatcttgaggaaccacttctttactttcagcagcaacaaagtcatccacatgcatagatggtggtctacttgtgttctgttttctcagtgagacgggcaacagctgattgcccttcaccgcctggccctgagagagttgcagcaagcggtccacgctggtttgccccagcaggcgaaaatcctgtttgatggtggttccgaaatcggcaaaatccgccccgccctgccactcatcgcagtactgttgtaattcattaagcattctgccgacatggaagccatcacaaacggcatgatgaacctgaatcgccagcggcatcagcaccttgtcgccttgcgtataatatttgcccatggtgaaaaccggggcgaagaagttgtccat

SEQ ID NO: 142629 - DNA, 17745 bp, Homo sapiens
ttatctaatctcccagcgtggtttaatcagacgatcgaaaatttcattgcagacaggttcccaaatagaaagagcatttctccaggcaccagttgaagagcgttgatcaatggcctgttcaaaaacagttctcatccggatctgacctttaccaacttcatccgtttcacgtacaacattttttagaaccatgcttccccaggcatcccgaatttgctcctccatccacggggactgagagccattactattgctgtatttggtaagcaaaatacgtacatcaggctcgaaccctttaagatcaacgttcttgagcagatcacgaagcatatcgaaaaactgcagtgcggaggtgtagtcaaacaactcagcaggcgtgggaacaatcagcacatcagcagcacatacgacattaatcgtgccgatacccaggttaggcgcgctgtcaataactatgacatcatagtcatgagcaacagtttcaatggccagtcggagcatcaggtgtggatcggtgggcagtttaccttcatcaaatttgcccattaactcagtttcaatacggtgcagagccagacaggaaggaataatggcaagccccggccagcaagtgggctttattgcataagtgacatcgtccagtgagacgggcaacagctgattgcccttcaccgcctggccctgagagagttgcagcaagcggtccacgctggtttgccccagcaggcgaaaatcctgtttgatggtggttccgaaatcggcaaaatcctgcccgctttccagtcgggaaacctgtcgtgccagctgcattaatgaatcggccaacgcgcggggagaggcggtttgcgtattgggcgccagggtggtttttcttttcaccagtgagacgggcaacagctgattgcccttcaccgcctggccctgagagagttgcagcaagcggtccacgctggtttgccccagcaggcgaaaatcctgtttgatggtggttccgaaatcggcaaaatcctgcccgctttccagtcgggaaacctgtcgtgccagctgcattaatgaatcggccaacgcgcggggagaggcggtttgcgtattgggcgccagggtggtttttcttttcaccagtgagacgggcaacagctgattgcccttcaccgcctggccctgagagagttgcagcaagcggtccacgctggtttgccccagcaggcgaaaatcctgtttgatggtggttccgaaatcggcaaaatcctgcccgctttccagtcgggaaacctgtcgtgccagctgcattaatgaatcggccaacgcgcggggagaggcggtttgcgtattgggcgccagggtggtttttcttttcaccagtgagacgggcaacagctgattgcccttcaccgcctggccctgagagagttgcagcaagcggtccacgctggtttgccccagcaggcgaaaatcctgtttgatggtggttccgaaatcggcaaaatcctgcccgctttccagtcgggaaacctgtcgtgccagctgcattaatgaatcggccaacgcgcggggagaggcggtttgcgtattgggcgccagggtggtttttcttttcaccagtgagacgggcaacagctgattgcccttcaccgcctggccctgagagagttgcagcaagcggtccacgctggtttgccccagcaggcgaaaatcctgtttgatggtggttccgaaatcggcaaaatcctgcccgctttccagtcgggaaacctgtcgtgccagctgcattaatgaatcggccaacgcgcggggagaggcggtttgcgtattgggcgccagggtggtttttcttttcaccagtgagacgggcaacagctgattgcccttcaccgcctggccctgagagagttgcagcaagcggtccacgctggtttgccccagcaggcgaaaatcctgtttgatggtggttccgaaatcggcaaaatcctgcccgctttccagtcgggaaacctgtcgtgccagctgcattaatgaatcggccaacgcgcggggagaggcggtttgcgtattgggcgccagggtggtttttcttttcaccagtgagacgggcaacagctgattgcccttcaccgcctggccctgagagagttgcagcaagcggtccacgctggtttgccccagcaggcgaaaatcctgtttgatggtggttccgaaatcggcaaaatccctcagtttctgttcatcttgctcaggatctggctctgaaggggctacgtgttttgctcgtggaaggtaacgacccccagggaacagcctcaatgtatcacggatgggtaccagatcttcatattcatgcagaagacactctcctgcctttctatcttggggaaaaggacgatgtcacttatgcaataaagcccacttgctggccggggcttgacattattccttcctgtctggctctgcaccgtattgaaactgagttaatgggcaaatttgatgaaggtaaactgcccaccgatccacacctgatgctccgactggccattgaaactgttgctcatgactatgatgtcatagttattgacagcgcgcctaacctgggtatcggcacgattaatgtcgtatgtgctgctgatgtgctgattgttcccacgcctgctgagttgtttgactacacctccgcactgcagtttttcgatatgcttcgtgatctgctcaagaacgttgatcttaaagggttcgagcctgatgtacgtattttgcttaccaaatacagcaatagtaatggctctcagtccccgtggatggaggagcaaattcgggatgcctggggaagcatggttctaaaaaatgttgattttcgcctgctggggcaaaccagcgtggaccgcttgctgcaactctctcagggccaggcggtgaagggcaatcagctgttgcccgtctcactggtgaaaagaaaaaccaccctggcgcccaatacgcaaaccgcctctccccgcgcgttggccgattcattaatgcagctggcacgacaggtttcccgactggaaagcgggcaggattttgccgatttcggaaccaccatcaaacaggattttcgcctgctggggcaaaccagcgtggaccgcttgctgcaactctctcagggccaggcggtgaagggcaatcagctgttgcccgtctcactggtgaaaagaaaaaccaccctggcgcccaatacgcaaaccgcctctccccgcgcgttggccgattcattaatgcagctggcacgacaggtttcccgactggaaagcgggcaggattttgccgatttcggaaccaccatcaaacaggattttcgcctgctggggcaaaccagcgtggaccgcttgctgcaactctctcagggccaggcggtgaagggcaatcagctgttgcccgtctcactggtgaaaagaaaaaccaccctggcgcccaatacgcaaaccgcctctccccgcgcgttggccgattcattaatgcagctggcacgacaggtttcccgactggaaagcgggcaggattttgccgatttcggaaccaccatcaaacaggattttcgcctgctggggcaaaccagcgtggaccgcttgctgcaactctctcagggccaggcggtgaagggcaatcagctgttgcccgtctcactggacgatgtcacttatgcaataaagcccacttgctggccggggcttgacattattccttcctgtctggctctgcaccgtattgaaactgagttaatgggcaaatttgatgaaggtaaactgcccaccgatccacacctgatgctccgactggccattgaaactgttgctcatgactatgatgtcatagttattgacagcgcgcctaacctgggtatcggcacgattaatgtcgtatgtgctgctgatgtgctgattgttcccacgcctgctgagttgtttgactacacctccgcactgcagtttttcgatatgcttcgtgatctgctcaagaacgttgatcttaaaggggattttgccgatttcggaaccaccatcaaacaggattttcgcctgctggggcaaaccagcgtggaccgcttgctgcaactctctcagggccaggcggtgaagggcaatcagctgttgcccgtctcactggtgaaaagaaaaaccaccctggcgcccaatacgcaaaccgcctctccccgcgcgttggccgattcattaatgcagctggcacgacaggtttcccgactggaaagcgggcaggattttgccgatttcggaaccaccatcaaacaggattttcgcctgctggggcaaaccagcgtggaccgcttgctgcaactctctcagggccaggcggtgaagggcaatcagctgttgcccgtctcactggtgaaaagaaaaaccaccctggcgcccaatacgcaaaccgcctctccccgcgcgttggccgattcattaatgcagctggcacgacaggtttcccgactggaaagcgggcaggattttgccgatttcggaaccaccatcaaacaggattttcgcctgctggggcaaaccagcgtggaccgcttgctgcaactctctcagggccaggcggtgaagggcaatcagctgttgcccgtctcactggtgaaaagaaaaaccaccctggcgcccaatacgcaaaccgcctctccccgcgcgttggccgattcattaatgcagctggcacgacaggtttcccgactggaaagcgggcaggattttgccgatttcggaaccaccatcaaacaggattttcgcctgctggggcaaaccagcgtggaccgcttgctgcaactctctcagggccaggcggtgaagggcaatcagctgttgcccgtctcactgggattttgccgatttcggaaccaacccatcaaacaggattttcgcctgctggggcaaaccagcgtggaccgcttgctgcaactctctcagggccaggcggtgaagggcaatcagctgttgcccgtctcactggtgaaaagaaaaaccaccctggcgcccaatacgcaaaccgcctctccccgcgcgttggccgattcattaatgcagctggcacgacaggtttcccgactggaaagcgggcaggattttgccgatttcggaaccaccatcaaacaggattttcgcctgctggggcaaaccagcgtggaccgcttgctgcaactctctcagggccaggcggtgaagggcaatcagctgttgcccgtctcactggattttcgcctgctggggcaaaccagcgtggaccgcttgctgcaactctctcagggccaggcggtgaagggcaatcagctgttgcccgtctcactggtgaaaagaaaaaccacccctggcgcccaatacgcaaaccgcctctccccgcgcgttggccgattcattaatgcagctggcacgacaggtttcccgactggaaagcgggcagtgagcgcaacgcaattaatggattttgccgatttcggaaccaccatcaaacaggattttcgcctgctggggcaaaccagcgtggaccgcttgctgcaactctctcagggccaggcggtgaagggcaatcagctgttgcccgtctcactgggattttgccgatttcggaacccacccatcaaacaggattttcgcctgctggggcaaaccagcgtggaccgcttgctgcaactctctcagggccaggcggtgaagggcaatcagctgttgcccgtctcactggtgaaaagaaaactccaccctggcgcccaatacgcaaaccgcctctccccgcgcgttggccgattcattaatgcagctggcacgacaggtttcccgactggaaagcgggcagtgagcgcaacgcaattaatggattttgccgatttcggaaccaccatcaaacaggattttcgcctgctggggcaaaccagcgtggaccgcttgctgcaactctctcagggccaggcggtgaagggcaatcagctgttgcccgtctcactggtgaaaagaaaaaccaccctggcgcccaatacgcaaaccgcctctccccgcgcgttggccgattcattaatgcagctggcacgacaggtttcccgactggaaagcgggcaggattttgccgatttcggaaccaccatcaaacaggattttcgcctgctggggcaaaccagcgtggaccgcttgctgcaactctctcagggccaggcggtgaagggcaatcagctgttgcccgtctcactggtgaaaagaaaaaccaccctggcgcccaatacgcaaaccgcctctccccgcgcgttggccgattcattaatgcagctggcacgacaggtttcccgactggaaagcgggcaggattttgccgatttcggaaccaccatcaaacaggattttcgcctgctggggcaaaccagcgtggaccgcttgctgcaactctctcagggccaggcggtgaagggcaatcagctgttgcccgtctcactggtgaaaagaaaaaccaccctggcgcccaatacgcaaaccgcctctccccgcgcgttggccgattcattaatgcagctggcacgacaggtttcccgactggaaagcgggcaggattttgccgatttcggaaccaccatcaaacaggattttcgcctgctggggcaaaccagcgtggaccgcttgctgcaactctctcagggccaggcggtgaagggcaatcagctgttgcccgtctcactggtgaaaagaaaaaccaccctggcgcccaatacgcaaaccgcctctccccgcgcgttggccgattcattaatgcagctggcacgacaggtttcccgactggaaagcgggcaggattttgccgatttcggaaccaccatcaaacaggattttcgcctgctggggcaaaccagcgtggaccgcttgctgcaactctctcagggccaggcggtgaagggcaatcagctgttgcccgtctcactggtgaaaagaaaaaccaccctggcgcccaatacgcaaaccgcctctccccgcgcgttggccgattcattaatgcagctggcacgacaggtttcccgactggaaagcgggcaggattttgccgatttcggaaccaccatcaaacaggattttcgcctgctggggcaaaccagcgtggaccgcttgctgcaactctctcagggccaggcggtgaagggcaatcagctgttgcccgtctcactggtgaaaagaaaaaccaccctggcgcccaatacgcaaaccgcctctccccgcgcgttggccgattcattaatgcagctggcacgacaggtttcccgactggaaagcgggcaggattttgccgatttcggaaccaccatcaaacaggattttcgcctgctggggcaaaccagcgtggaccgcttgctgcaactctctcagggccaggcggtgaagggcaatcagctgttgcccgtctcactggtgaaaagaaaaaccaccctggcgcccaatacgcaaaccgcctctccccgcgcgttggccgattcattaatgcagctggcacgacaggtttcccgactggaaagcgggcaggattttgccgatttcggaaccaccatcaaacaggattttcgcctgctggggcaaaccagcgtggaccgcttgctgcaactctctcagggccaggcggtgaagggcaatcagctgttgcccgtctcactggtgaaaagaaaaaccaccctggcgcccaatacgcaaaccgcctctccccgcgcgttggccgattcattaatgcagctggcacgacaggtttcccgactggaaagcgggcaggattttgccgatttcggaaccaccatcaaacaggattttcgcctgctggggcaaatccagcgtggaccgcttgctgcaactcacacagggccaggcggtgaagggcaatcagctgttgcccgtctcactggtgaaaagaaaaaccaccctggcgcccaatacgcaaaccgcctctccccgcgcgttggccgattcattaatgcagctggcacgacaggtttcccgactggaaagcgggcacatgtccctgcatttaggcaatgaagtgtttgatgtgtacaaagccccgctgctgggcaattacatccacctgtttataagagaagacactggtctacagggacaagccgtctttaaatccaaacttacctttaggcttggcgtcatccaacagtgggatagaggtaagtttgccaaggctggcattccagttgtacgcccgaacggcccagaattcaaaaggagtacctgtggtgcaccaagcagacattatacttcaaagctacttcccctcaacgtgattctggatgtcgcttgggcccccaccaacctcatccacaccaagtacccacagctcttgtcggggatgagaccatgattggggtccacaagctacacaagatgatggccaatgggatcctgaaagtgcctgccatcaatgtcaacaactccgtcaccaagagcaagtttgacaacctctccggctgccaggagtccctcatagatagcatcaagtgggccacagacgtgatgattgccagcaaggattttcgcctgctggggcaaaccagcgtggaccgcttgctgcaactctctcagggccaggcggtgaagggcaatcagctgttgcccgtctcactggtgaaaagaaaaaccaccctggcgcccaatacgcaaaccgcctctccccgcgcgttggccgattcattaatgcagctggcacgacaggtttcccgactggaaagcgggcacagagcaaacaactggaaactgttttggatgatcttgaccccgagctcgccaaaggaccaagtttgagttcactttcgggattttgccgatttcggaaccaccatcaaacaggattttcgcctgctggggcaaaccagcgtggaccgcttgctgcaactctctcagggccaggcggtgaagggcaatcagctgttgcccgtctcactggtgaaaagaaaaaccaccctggcgcccaatacgcaaaccgcctctccccgcgcgttggccgattcattaatgcagctgggcacgacaggtttcccgactggaaagcgggcagctacctggtaaagggcaattaaggttgcaaacaggattttcgcctgctggggcaaaccagcgtggaccgcttgctgcaactctctcagggccaggcggtgaagggcaatcagctgttgcccgtctcactggtgaaaagaaaaaccaccctggcgcccaatacgcaaaccgcctctccccgcgcgttggccgattcattaatgcagctggcacgacaggtttcccgactggaaagcgggcaggattttgccgatttcggaaccaccatcaaacaggattttcgcctgctggggcaaaccagcgtggaccgcttgctgcaactctctcagggccaggcggtgaagggcaatcagctgttgcccgtctcactggtgaaaagaaaaaccaccctggcgcccaatacgcaaaccgcctctccccgcgcgttggccgattcattaatgcagctggcacgacaggtttcccgactggaaagcgggcagtgagcgcaacgcaattaatggattttgcccgatttcggaccccccctcaaacgggtttttcgcctgctggggcaaatccagcgtggaccgcttgctgcaactctctcaggctcgaaccctttaagggcaatcagctgttgcccgtctcactggtgaaaagaaaaaccaccctggcgcccaatacgcaaaccgcctctccccgcgcgttggccgattcattaatgcagctggcacgacaggtttcccgactggaaagcgggcagtgagcgcaacgcaattaatggattttgccgatttcggaaccaccatcaaacaggattttcgcctgctggggcaaaccagcgtggaccgcttgctgcaactctctcagggccaggcggtgaagggcaatcagctgttgcccgtctcactggtgaaaagaaaaaccaccctggcgcccaatacgcaaaccgcctctccccgcgcgttggccgattcattaatgcagctggcacgacaggtttcccgactggaaagcgggcaggattttgccgatttcggaaccaccatcaaacaggattttcgcctgctggggcaaaccagcgtggaccgcttgctgcaactctctcagggccaggcggtgaagggcaatcagctgttgtcccgtctcactggtgaaaagaaaaatcaccctggcgcccaatacgcaaaccgcctctccccgcgcgatacccgattcattaatgcagctgacacgacagatttcccgactggaaagcggacagtgagcgcaccgcaattaatggattttgccgatttcggaaccaccatcaaacaggattttcgcctgctggggcaaaccagcgtggaccgcttgctgcaactctctcagggccaggcggtgaagggcaatcagctgttgcccgtctcactggtgaaaagaaaaaccaccctggcgcccaatacgcaaaccgcctctccccgcgcgttggccgattcattaatgcagctggcacgacaggtttcccgactggaaagcgggcaggattttgccgatttcggaaccaccatcaaacaggattttcgcctgctggggcaaaccagcgtggaccgcttgctgcaactctctcagggccaggcggtgaagggcaatcagctgttgcccgtctcactggtgaaaagaaaaaccaccctggcgcccaatacgcaaaccgcctctccccgcgcgttggccgattcattaatgcagctggcacgacaggtttcccgactggaaagcgggcaggattttgccgatttcggaaccaccatcaaccaggattttcgcctgctggtgcaaaccagcatggaccgcttactgcaactctctcaggtccaggcgctgaagggcaatcagctgttgcccgtctcactgggagccttccctgatttcccacactctggcccctcacctggttttgagctcatgaggcaggaagagctgacccatctggccctcccttgtcacgtgtcaggcatgaagaagccactggttctaggcatttctgggaagccccagggactgcaagtggccattaccatctctaaggagagctctgattgcagggattttgccgatttcggaaccaccatcaaacaggatttacgcctgctggggcaaaccagcgtggaccgcttgctgcaactctctcagggccaggcggtgaagggcaatcagctgttgcccgtctcactggtgaaaagaaaaaccaccctggcgcccaatacgcaaaccgcctctccccgcgcgttggccgattcattaatgcagctggcacgacaggtttcccgactggaaagcgggcaggattttgccgatttcggaaccaccatcaaacaggattttcgcctgctggggcaaatccagcgtggaccgcttgctgcaactctctcagggccaggcggtgaagggcaatcagctgttgcccgtctcactggtgaaaagaaaaaccaccctggcgcccaatacgcaaaccgcctctccccgcgcgttggccgattcattaatgcagctggcacgacaggtttcccgactggaaagcgggcagtgagcgcaacgcaattaatggattttgccgatttcggaaccaccatcaaacaggattttcgcctgctggggcaaaccagcgtggaccgcttgctgcaactctctcagggccaggcggtgaagggcaatcagctgttgcccgtctcactggtgaaaagaaaaaccaccctggcgcccaatacgcaaaccgcctctccccgcgcgttggccgattcattaatgcagctggcacgacaggtttcccgactggaaagcgggcatggtctcccagctcttatatccgtgctcgtcaaagcaaccggattatgccgatttcggaaccaccatcatacaggattttcgccctgctggggcaaaccagcgtggaccgcacgctgcaactctctcagggccaggcggtgaagggcaatcagctgttgaccgtctcactggtgaaaagaaaaaccaccctggcgcccaatacgcaaaccgcctctcgccgcgcgttggccgattcattaatgcagctggcacgacaggtttcccgactggaaagcgggcaggattttgccgatttcggaaccaccatcaaacaggattttcgcctgctggggcaaaccagcgtggaccgcttgctgcaactctctcagggccaggcggtgaagggcaatcagctgttgcccgtctcactggtgaaaagaaaaaccaccctggcgcccaatacgcaaaccgcctctctccggcgcgttggccgattcattaatgcagctggcacgacaggtttcccgactgcaaagcgggcaaggactgcccgctaaagctggggtgcaccagaaggtggccgtgcagggccattcgcttcagctgctatcccagctgtgttgctcatggcatggaagcagctttaaaagcattttgggacaatctggtcatccaaggaaacaaaagccttcaaagtaaggattttgccgatttgggaacccaccatcaaacaggatttttcgcctgttggccaaaaccggcgtggaccggtctgctgcaactctttcagggccaggcggtgaagggccatcaagttgttgcccgtctccacgggtaaaaagaaaaaccaccctggcgcccaatacgcaaaccgcctctccccgcgcgttggccgattcattaatgcagctggcacgacaggtttcccgactggaaagcgggcagtgagcgcaacgcaattaatggattttgccgatttcggaaccaccatcaaacaggattttcgcctgctggggcaaaccagcgtggaccgcttgctgcaactctctcagggccaggcggtgaagggcaatcagctgttgcccgtctcactggtgaaaagaaaaaccaccctggcgcccaatacgcaaaccgccctctccccgcgcgttggccgattcattaatgcagctggcacgacaggtttcccgactggaaagcgggcagtgagcgcaacgcaattaatggattttgccgatttcggaaccaccatcaaacaggattttcgcctgctggggcaaaccagcgtggaccgcttgctgcaactctctcagggccaggcggtgaagggcaatcagctgttgcccgtctcactggtgaaaagaaaaaccacccctggcgcccaatacgcaaaccgcctctccccgcgcgttggccgattcattaatgcagctggcacgacaggtttcccgactggaaagcgggcaggattttgccgatttcggaaccaccatcaaacaggattttcgcctgctggggcaaaccagcgtggaccgcttgctgcaactctctcagggccaggcggtgaagggcaatcagctgttgcccgtctcactggtgaaaagaaaaaccaccctggcgcccaatacgcaaaccgcctctccccgcgcgttggccgattcattaatgcagctggcacgacaggtttcccgactggaaagcgggcaggattttgccgatttcggaaccaccatcaaacaggattttcgcctgctggggcaaaccagcgtggaccgcttgctgcaactctctcagggccaggcggtgaagggcaatcagctgttgcccgtctcactggtgaaaagaaaaaccaccctggcgcccaatacgcaaaccgcctctccccgcgcgttggccgattcattaatgcagctggcacgacaggtttcccgactggaaagcgggcaggattttgccgatttcggaaccacctatcaaacaggattttcgcctgctggggcaaaccagcgtggaccgcttgctgcaactctctcagggccaggcggtgaagggcaatcagctgttgcccgtctcactggtgaaaagaaaaaccaccctggcgcccaatacgcaaaccgcctctccccgcgcgttggccgattcattaatgcagctggcacgacaggtttcccgactggaaagcgggcaggattttgccgatttcggaaccaccatcaaacaggattttcgcctgctggggcaaaccagcgtggaccgcttgctgcaactctctcagggccaggcggtgaagggcaatcagctgttgcccgtctcactggtgaaaagaaaaaccaccctggcgcccaatacgcaaaccgcctctccccgcgcgttggccgattcattaatgcagctggcacgacaggtttcccgactggaaagcgggcaggatttgcccgatttcggaaccaccatcaaacaggattttcgcctgctggggcaaaccagcgtggaccgcttgctgcaactctctcagggccaggcggtgaagggcaatcagctgttgcccgtctcactggtgaaaagaaaaaccacctgggcgcccaatacgcaaaccgcctctccccgcgcgttggccgattcattaatgcagctggcacgacaggtttcccgactggaaagcgggcaggattttgccgatttcggaaccaccatcaaacaggattttcgcctgctggggcaaaccagcgtggaccgcttgctgcaactctctcagggccaggcggtgaagggcaatcagctgttgcccgtctcactggtgaaaagaaaaaccaccctggcgcccaatacgcaaaccgcctctccccgcgcgttggccgattcattaatgcagctggcacgacaggcctcccgactgaaaagcgggcaggattttgccgatttcggaaccaccatcaaacaggattttcgcctgctggggcaaaccagcgtggaccgcttgctgcaactctctcagggccaggcggtgaagggcaatcagctgttgcccgtctcactggtgaaaagaaaaaccaccctggcgcccaatacgcaaaccgcctctccccgcgcgttggccgattcattaatgcagctggcacgacaggtttcccgactggaaagcgggcaggattttgccgatttcggaaccaccatcaaacaggattttcgcctgctggggcaaaccagcgtggaccgcttgctgcaactctctcagggccaggcggtgaagggcaatcagctgttgcccgtctcactggtgaaaagaaaaaccaccctggcgcccaatacgcaaaccgcctctccccgcggcggcggccgattcattaatgcagctggcacgacaggtttcccgactggaaagcgggcagtgagcgcaacgcaattaatggattttgccgatttcggaaccaccatcaaacaggattttcgcctgctggggcaaaccagcgtggaccgcttgctgcaactctctcagggccaggcggtgaagggcaatgcagctgttgcccgtctcactggtgaaaagaaaaaccaccctggcgcccaatacgcaaaccgcctctccccgcgcgttggccgattcattaatgcagctggcacgacaggtttcccgactggaaagcgggcaggattttgccgatttcggaaccaccatcaaacaggattttcgcctgctggggcaaaccagcgtggaccgcttgctgcaactctctcagggccaggcggtgaagggcaatcagctgttgcccgtctcactggtgaaaagaaaaaccaccctggcgcccaatacgcaaaccgcctctccccgcgcgttggccgattcattaatgcagctggcacgacaggtttcccgactggaaagcgggcaggattttgccgatttcggaaccaccatcaaacaggattttcgcctgctggggcaaaccagcgtggaccgcttgctgcaactctctcagggccaggcggtgaagggcaatcagctgttgcccgtctcactggtgaaaagaaaaaccaccctggcgcccaatacgcaaaccgcctctccccgcgcgttggccgattcattaatgcagctggcacgacaggtttcccgactggaaagcgggcagtgagcgcaacgcaattaatggattttgccgatttcggaaccaccatcaaacaggattttcgcctgctggggcaaaccagcgtggaccgcttgctgcaactctctcagggccaggcggtgaagggcaatcagctgttgcccgtctcactggtgaaaagaaaaaccaccctggcgcccaatacgcaaaccgcctctccccgcgcgttggccgattcattaatgcagctggcacgacaggtttcccgactggaaagcgggcaggattttgccgatttcggaaccaccatcaaacaggattttcgcctgctggggcaaaccagcgtggaccgcttgctgcaactctctcagggccaggcggtgaagggcaatcagctgttgcccgtctcactggtgaaaagaaaaaccaccctggcgcccaatacgcaaaccgcctctccccgcgcgttggccgattcattaatgcagctggcacgacaggtttcccgactggaaagcgggcaggattttgccgatttcggaaccaccatcaaacaggattttcgcctgctggggcaaaccagcgtggaccgcttgctgcaactctctcagggccaggcggtgaagggcaatcagctgttgcccgtctcactggtgaaaagaaaaaccaccctggcgcccaatacgcaaaccgcctctccccgcgcgttggccgattcattaatgcagctggcacgacaggtttcccgactggaaagcgggcaggattttgccgatttcggaaccaccatcaaacaggattttcgcctgctggggcaaaccagcgtggaccgcttgctgcaactctctcagggccaggcggtgaagggcaatcagctgttgcccgtctcactggtgaaaagaaaaaccaccctggcgcccaatacgcaaaccgcctctccccgcgcgttggccgattcattaatgcagctggcacgacaggtttcccgactggaaagcgggcaggattttgccgatttcggaaccaccatcaaacaggattttcgcctgctggggcaaaccagcgtggaccgcttgctgcaactctctcagggccaggcggtgaagggcaatcagctgttgcccgtctcactggatctggttctgaaggggctacgtgttttgctcgtggaaggtaacgacccccagggaacagcctcaatgtatcacggatgggtaccagatcttcatattcatgcagaagacactctcctgcctttctatcttggggaaaaggacgatgtcacttatgcaataaagcccacttgctggccggggcttgacattattccttcctgtctggctctgcaccgtattgaaactgagttaatgggcaaatttgatgaaggtaaactgcccaccgatccacacctgatgctccgactggccactgaaactgttgctcatgactatgatgtcatagttattgacagcgcgcctaacctgggtatcggcacgattaatgtcgtatgtgctgctgatgtgctgattgttcccacgcctgctgagttgtttgactacacctccgcactgcagtttttcgatatgcttcgtgatctgctcaagaacgttgatcttaaagggttcgagcctgatcacagcagcagcatcccatgcctcttcgttgtgtcatgctcactggtggtcaatgccgtgctctcagcagtcctgctgtggctgcagctcacagccaccttcttcctggccatgctgctcatcattagcctggccgtgtgcccgtgctatggcagacgctag

SEQ ID NO: 142630 - DNA, 1060 bp, Homo sapiens
atgcaagcgcgagtgaagtgggtcgaagggttaacttttctgggcgaatccgcctctggtcatcagattttaatggacggcaactcaggcgataaagcaccaagtccgatggaaatggtgttgatggcggcgggtggttgcagtgccatcgatgtggtttcgatcctgcaaaaagggcgtcaggatgtggtcgattgtgaagtaaaattgacctctgaacgccgcgaagaggcaccacgcctgtttacgcacattaatctgcattttatcgtcaccggtcgcgacctgaaagacgcagcggttgcgcgtgcggttgatctctctgccgagaaatattgcaatcgtttctatttcattgctgctaagttttctctcatccctgaactagtggcttcccactatggtccatctaccctgggcccaagccccaagcacttacaccagcatagagttaatattgcaatgaatgtggtagttggaacgcaaatgttattcccaagggagaaagagaaaactagaaacaatcacaggagcaattgttgggaagctggagaggcagatccaaattcccttcctttccctgtttggataaaacctcataagcacgaacaacaaaagctaaaattgacaaatggaattacaccaagcaaaaaacctctagacgtcatcgaacaatacaagggtctcactctcattgccagcgatagaagtgcagtgtgcacaatcttggctcactgcagcattgacttcgtgggctcagcctgggtgacagaccgagactctgaaaaaaaaaaagaaagagaaagaaagaaagagaagaaagaaagaaagaaagaaagaaagaaagagaagaaagaaacgttaatgatggatataagtgaaaaacgcattgaaaatagaatagctaagaaaggtgaggaatttgtagacgaaaagctggaagccagcagagattgggtcatgagatttaaggaaagaagctatctctataacataaaagtgcaaggcgaagcagccaatgttgatgtagaagcatcagcaagttatccaaaaggtctag

SEQ ID NO: 142631 - DNA, 3588 bp, Homo sapiens; identical to SEQ ID NO: 120811

SEQ ID NO: 142632 - DNA, 2250 bp, Homo sapiens; identical to SEQ ID NO: 120913

SEQ ID NO: 142633 - DNA, 786 bp, Homo sapiens; identical to SEQ ID NO: 120919

SEQ ID NO: 142634 - DNA, 1503 bp, Homo sapiens; identical to SEQ ID NO: 140972

SEQ ID NO: 142635 - DNA, 651 bp, Homo sapiens
atgaagccgcagaccctcacgggcagtgttaaagttcttaaagatgtctatgcaacaaggtccaaccagatgaagcctgtagccagagctggccacagctggttgaaagcagccccaggacaactcttcctggggggcagtgcacaggccaaggtgtcagggccggatgctctgggactggagagtgcgggggtgtcggccgcccaggggtccaggacaaagagaatgctaatgtgccagagaaggccatcagctgaatgttccccggggaactccatctcacaaccaggctccaagtctctttggtcaggcctggtgtcccctgggaaggcaggaggcagcagtggaaaggaagtgggagcttacatacctctggtgatgaggagctcactacagatgttccttaagttacttcctgataaactcatcgtcaatggaaaatatttcccacgtagcagtccggggccactcactgggcaaacacgcgtatcgcagatcaacgtggccgctacaagaggaccccggaagtctcggccctacattaggcgcacacacggaaatgcttctttccgagccctcattggctctgacggcattcattcaacgcagagctttctgagtaatgtagttgaccaggtttcaaggctgtaa

SEQ ID NO: 142636 - DNA, 3858 bp, Homo sapiens; identical to SEQ ID NO: 139061

SEQ ID NO: 142637 - DNA, 1515 bp, Homo sapiens; identical to SEQ ID NO: 136016

SEQ ID NO: 142638 - DNA, 966 bp, Homo sapiens
tcagtggccagcccctcccatgggagtaactctcttgacactgagcaccagcaaaatccagagacagacccggactggaccgcagcagacacagcccgtaccaggctgggcccctgtggacccctttactccatcaggttgggggaccaaagtaggatctagggcgcctctgaccatcttcatgggcggcgtgagcaccaccccgtagaggcggatgaggtttcggtggtcgagcgagtgcatggcattgacctcccggatgaagtcgtccatggcttctggctggctcaggacatcgggcttcaggcacttcacagccacactcacgcggacggcggcgacgttgttgttcgcctgccggtttggcatcgccgaggcggcgagacggtttttctgcaggtttcgcgcttgcagattttgcgccaccttccccacggcgtggttgctgttgaccgcgaccaccaccttgcccacgaccgccgccgccacgttgctggcgaccgttctggatttatattttgacgcttgtgctgtgcgagggttatcataaccgacattcgtgcaatctatcccctgtgtacggcatttgggctccttcgccatcgccgactctttgtccggggcctgatgcacggcaccgtcgcttttctcgtcgagatattggcggtttgccaactggataaccacgccctgagactcaagggcgtgaatcagcggtaacagacgtttatcttcacggccttttaaaataaagacttcctgaaaacgttcaggggcgcgctccagcagggcctgcacgcggaaggcgctgtctggctcaaagtttacctttttaccgacctgacgacgcttgccgccttttttacctgcatcgccttttttcgctttctcgcgcgccgttttaccgacgttgcgcggtgcgcgttcgctggagatcaggctaaagtcgattttgcgctcgtccat

SEQ ID NO: 142639 - DNA, 587 bp, Homo sapiens
ctggtttgctggaattggtggtcagtggcgacaccaaaaaagccgttgagcgcattcgtgaggtggaatacggcatcatctgcgatatgtgccgcagcgacttagacctgcgccgcagtcgctggctttcaccgatatgcccgagatcggaaatcaaaccgtcagagagatcgatggctgaatttgccagatcgcgcagtgcctgcccctgtaaaatacgcggcgatggacggagatgacgtttgatcaagtagtccgcatctttagcatcggcaacctgcaaacggttttgcaaaatcgccagcccggcggcgctatcgcccggtgtaccggtcacatagatccagtcacccggtttcgccccagagcgcgttaaggctcgtcccatcggaacaaagccgtggatacccaacgtcattgataatggcccacgcgtggtatcgccgccaatgagttgcatatcgtaataattgagaagatcaaacaaactgtcgctgaaggactcaagccacgcttcgtctacgtccggtaagggtaatgccaacgtcagccaagcccggatcggcccccatcgctggcagaatcgt

SEQ ID NO: 142640 - DNA, 1053 bp, Homo sapiens
ttaaatatcgatattcgccgctttcagggcgttctcttcaataaacgcacggcgcggttcaacggcgtcgcccatcagcgtggtgaacaactggtcggcagcaatcgcatctttaacggtaacgcgcagcatacgacgactttccgggtccatagtggtttcccacagctgttccgggttcatctcgcccagacctttataacgctggatggagaggccgcgacgggactctttcaccagccagtccagcgcctgctcgaagctggctaccggctgacgacgctcgccacgttcgataaacgcatcttcttccagcaagccacgcagtttctcacccagcgtgcagatacgacgatattcgccaccggtgataaactcgtgatccagcggatagtcagtatccacaccgtgggtacgcacgcgaacaatcggctcgaacaggttttgctcagcattggtgtgaacatcaaacttccactggctgccgtgctgttctttgtcgttcagttcgctgaccagcgcgttcacccagcgggtaacggtctgctcaggggatcctctagagtcacctgaagatgacggctgctctgtagaatccacctttctaaagtctgcagctttgaggaacacaaactgctgcgtgatatcgaaaaactgcgatccagaacggtcgccagcaacgtggcggcggcggtcgtgggcaaggtggtggtcgcggtcaacagcaaccacgccgtggggaaggtggcgcaaaatctgcaagcgcgaaacctgcagaaaaaccgtctcgccgcctcggcgatgccaaaccggcaggcgaacaacaacgtcgccgccgtccgcgtaaaccatgaccaccgtctccccagtaagcatcgttttccgtatgctcaaccagttttgcgggcgcggttgccagcaagagcgcacgcagttctgcatgctgttcgaatttacacaataggccatccggttagggggttccacggtttttttgcctcggttgttccggttttctggtgtattgtgaattttcttccggtccaggtacat

SEQ ID NO: 142641 - DNA, 1577 bp, Homo sapiens
tcatggtgcccaagttcctgtaacaatattcaggaaagattgaccacggggacttctagagtcgactgcagcatgcatgactgctatccccggatcgggcgggatcagtttcgagatacgatcgacaaagccgtacggatgccccagcacgcggcatacgtggcgaatcaccgctttcgccgccattgtaccgaaggtgatgatctgcgataccgcatcacgaccgtacatgtccgctacgtgctcgataacctgatcgcgtttctccatacagaagtcaacgtcgaagtcaggcatggagacacgttccgggttaaggaaacgttcgaacagcaggtcaaattccagcggatcgaggtcggtgattttcagcgcgtaggccaccagtgaacccgcaccggagccacggcctggccctaccggtacgccgttatctttcgaccactggataaattccataacgatgaggaagtagcccgggaagcccatctggttgataacctgaagttcagtctccagacgttcgtcatattccgggcggcgcttaagacgttcttcctcatcagggaataaaaaggccagacgctcttccaggccctcttttgcacgcttgaccagataatcttcggtgctcatgtccccggtcgggaactgcggcaggaagtattcaccaagacgcacggttacgttacagcgtttggcgatggggtcttctagatcggcttgcagcagtaatttgccgacagtcaacgcattctcgatgccgcagaaagcaaagaagggcgctttatcgacgcgatgctggctatttgcgcagaaattgaccaggtgaaagccggggtctggccgctggaagataacccgctggtgaacgcgccgcacattcagagcgaactggtcgccgagtgggcgcatccgtacagccgtgaagttgcggtattcccggcaggtgtggcagacaaatactggccgacagtgaaacgtctggatgatgtttacggcgaccgtaacctgttctgctcctgcgtaccgattagcgaataccagtaattcactgattcgactattttctaaaggcgcttcggcgcctttttagtcagatgacaaagtacaaaagtgctcagacagtcccctcgcccttttggggagagggttagggtgaggggaacaggccggcactggcgcgaatatttaccctcaccccggccctctccctgaaagggcgagggggaaaagcgtgccaacattgaagattgagccagtttgttagcaatctcaaagatacgtcaacgaattaatttttctcggaaaaacaaatggctatagcacttgtgactggtggcagtcgcggcatcgggcgggcaactgcattactgttggcgcaagaagggtatacggtggcggttaattatcagcaaaacctccacgcggcgcaggaagtgatgaacttaataacgcaagccggtggcaaagcattcgtgctccaggcggatatcagcgacgaaaaccaggtcgttgcgatgtttacagcaatcgatcagcacgatgaaccgctagcagcgctggtcaataacgcc

SEQ ID NO: 142642 - DNA, 3094 bp, Homo sapiens
gggaaccccagggtttttccagtcaaggcgttgtaaacggccggccagtccaaacttgcatgcctccaggtcgcctaaaaagattcggttgtctgaataatcaactgggtaacagcaaattacagccatcgggtggaagcggggccaacgctcgttggcgcattgctgcaggcggttttagtcaatgacctgatggtctatatcgcacctaaactattaggcagcgacgcccgcggattatgcacgctgccagggcttgagaaattagccgacgccccccaatttaaattcaaagagatacgtcatgtaggcccggatgtttgcctgcatttagtgggtgcatgatctcccggctcgaaagggaagcagcgcacgaaatattatgctaaaatccgcccccctgcggggccatactcgaacccgaaggaagaaaatgaacattattgaagctaacgttgctaccccggacgctcgcgtcgccatcaccatcgcgcgtttcaacaactttatcaatgacagcctgctggaaggtgcaattgacgcactgaaacgtatcggtcaggtaaaagatgaaaacattaccgttgtttgggtgcctggtgcctatgagctgccgctggcggcgggtgcactggctaaaaccggtaaatacgacgcggggattgcgctgggtacgggtattcggggtggcactgcccactttgaatatgtcgctggtggggcaagcaacgggctggcgcatgttggccaggacagcgaaaattccggtgcttttggggttctgaccactgaaagcattgaacaagcgatcgaacgtgctggcaccaaagctggcaacaaaggtgcagaagctgcactgaccgcgcttgaaatgattaatgtattgaaagccatcaaggcctgaaattagtaaggggaaatccgtgaaacctgctgctagtcgccgcgctcgtgagtgtgccgtccaggcgctctactcctggcagttgtcccagaacgacatcgctgatgttgaataccagttcctggctgaacaggatgtaaaagacgttgacgtcctgtacttccgtgagctgctggccggggtggcgactaataccgcatgacctcgacggactgatgaagccatacctgtcccgcctgctggaagaactggggcaggtagaaaaagcagtactgcgcattgcgctgtacgaactgtctaaacgtagcgatgtgccatacaaagtggccattaaggaagcgatcgaactggcgaaatcgttcggcgcagaagacagccataagttcgtcaacggcgtactcgataaagcagcacctgtgattcgccctaacaaaaattctcgtcttgatgtcgaactgggcatcggcgacgattgcgcacttctcaatatccccgagaaacagaccctggcgatcagcactgatacgctggtggcgggtaaccatttcctccctgatatcgatcctgctgatctggcttataaagcactggcggtgaacctaagcgatctggcagcgatgggggccgatccggcctggctgacgctggcattaaccttaccggacgtagacgaagcgtggcttgagtccttcagcgacagtttgtttgatcttctcaattattacgatatgcaactcattggcggcgataccacgcgtgggccattatcaatgacgttgggtatccacggctttgttccgatgggacgagcctgctttaagatctcccgcgccgaagcgcctttagaaaatagtcgaatcagtgaattactggtattcgctaatcggtacgcaggagcagaacaggttacggtcgccgtaaacatcatccagacgtttcactgtcggccagtatttgtctgccacacctgccgggaataccgcaacttcacggctgtacggatgcgcccactcggcgaccagttcgctctgaatgtgcggcgcgttcaccagcgggttatcttccagcggccagacaccggctttcacctgctcaatttatatgcatccgtacttcgccaatccacgtccataaatcgcaaggtgcgtcttactcgtgcgctgtctgattttaaatcgggcgatattcgtgtactggtggcaactgacatcgctgcgcgcggcctggatattgaagagctgccgcacgtcgtcaactatgaactgccatacgtacctgaagattatgtccaccgtatcgggcgtaccggtcgtgcggctgctaccggtgaagcgttgtcgctgagatcccgcgcattgcgattccgggctatgagccggacccgtcaatcaaagccgaaccgatccagaacggtcgccagcaacgtggcggcggcggtcgtgggcaaggtggtggtcgcggtcaacagcaaccacgccgtggggaaggtggcgcaaaatctgcaagcgcgaaacctgcagaaaaaccgtctcgccgcctcggcgatgccaaaccggcaggcgaacaacaacgtcgccgccgtccgcgtaaacctgccgctgcgcagtaatcttttatgccgggctatgcccggcatcaggctgatgaacaaacgcaaaactgcctgatgcgctacgcttatcaggcctacgtgaactctgcaatatattgaatttgcatgcttttgtaggccggataaggcgtttacgccgcatccggcatttcacaacaagcacttgtcagcaatttgagaacacgggaaaaaatttatctgttttaccgcccataagccaccgagacgttacttctctatagccaattgttcgcgcaactccattaaaaggtagcccagtcgattcttgcccttaccatgaccaccgtctccccagtaagcatcgttttccgtatgctcaaccagttttgcgggcgcggttgccagcaagagcgcacgcagttctgcatgctgttcgaatttagcgcgaagtgcttttcgcatcacctgttctttgaccgactcccagtttttacgcagaggcttagaacgatcgcgccccatgcgtgcggcgaccataggggaagaaacccgacggatctcttcgcggtatttttcatcaaggaatcctgcgcctaaaatagtgttctaggtagaaa

SEQ ID NO: 142643 - DNA, 783 bp, Homo sapiens
atggctgaagaactaaaaggtaaaacaagccaacaaaaagccaccaacaccaccgcaacaaacgccaagctttactacactgacgactggctgttgagggtaaaagatccaaaggaactacatgagcattggtttcaggctcagttggatcatcaagttgctctgctgcacacggagctcaggaactctaattctagtcttaagactgaaaatctttctccatctgttgtctctgcattgggggggtatagctcatgccctgaggatttctattccaccacagagtttcacgtccagctccccggaatccgaggttccctaggcacgcctcctaatatcgctgccaaggaccaagagcctgtgcccttcaacctcactgttcttaaagcttctcggctcctgagttttacagcgccaaccccttcctccgagtgtgggcacgtcgttcccgtgcggtccggcggagatgcggcaacttcgacaagaccccagccccccgggaggcgccgacctccgcccagcagccccagcccggccgccagctcccgcagcccggggaaacggcgagagatgccgctcacaaccaacgacagcagccggaccaaacagacgcggaaactcacgctctctacgacccgcctgcgtccccacgtcttcgcgcgcacgtggtacatcacgcacgttccccgatccggggcgccccggattcctggggccggccactggccgctgactacgcgtaaggcaaacaagcgacctgcgttcaagggacccgaagactag

SEQ ID NO: 142644 - DNA, 4823 bp, Homo sapiens
tttcgagacctatcgcaccactatgcagtgtggtggaattccccggctcgctcctccgtcgtggatttcgcggcgatccccccggcagctctttgcaaagctgcttgaaacttctcccaaactcggcatggatacgactgcggcggcggcgctgcctgcttttgtggcgctcttgctcctctctccttggcctctcctgggatcggcccaaggccagttctccgcagaaaaggcctgcagttactgaaatgacaagtgaaaaggaggtggctgtacttttgatgatggtccaggggcctgtgattaccaccaggatctgtatgatgactttgaatgggtgcatgttagtgctcaagagcctcattatctaccacccgagatgccccaaggttcctatatgatagaggactcttcagatcacgaccctggagaaaaagccagacttcagctgcctacaatgaaggagaacgacactcactgcattgatttcagttacctattatatagccagaaaggactgaatcctggcactttgaacatattagttagggtgaataaaggacctcttgccaatccaatttggaatgtgactggattcacgggtagagattggcttcgggctgagctagcagtgagctccttttggcccaatgaatatcaggtaatatttgaagctgaagtctcaggagggagaagtggttatattgccattgatgacatccaagtactgagttatccttgtgataaatctcctcatttcctccgtctaggggatgtagaggtgaatgcagggcaaaacgctacatttcagtgcattgccacagggagagatgctgtgcataacaagttatggctccagagacgaaatggagaagatataccagtagcccagactaagaacatcaatcatagaaggtttgccgcttccttcagattgcaagaagtgacaaaaactgaccaggatttgtatcgctgtgtaactcagtcagaacgaggttccggtgtgtccaattttgctcaacttattgtgagagaaccgccaagacccattgctcctcctcagcttcttggtgttgggcctacatatttgctgatccaactaaatgccaactcgatcattggcgatggtcctatcatcctgaaagaagtagagtaccgaatgacatcaggatcctggacagaaacccatgcagtcaatgctccaacttacaaattatggcatttagatccagataccgaatatgagatccgagttctacttacaagacctggtgaaggtggaacggggctcccaggacctccactaatcaccagaacaaaatgtgcagaacctatgagaaccccaaagacattaaagattgctgaaatacaggcaagacggattgctgtggactgggaatccttgggttacaacattacgcgttgccacacttttaatgtcactatctgctaccattacttccgtggtcacaacgagagcaaggcagactgtttggacatggaccccaaagcccctcagcatgttgtgaaccatctgccaccttatacaaatgtcagcctcaagatgatcctaaccaatccagagggaaggaaggagagtgaagagacaattattcaaactgatgaagatgtgcctggtcccgtaccagtaaaatctcttcaaggaacatcctttgaaaataagatcttcttgaactggaaagaacctttggatccaaatggaatcatcactcaatatgagatcagctatagcagtataagatcatttgatcctgcagtcccagtggctggacctccccagactgtatcaaatttatggaacagtacacaccatgtctttatgcatctccaccctggaaccacgtaccagtttttcataagagccagcacggtcaaaggctttggtccagccacagccatcaatgtcaccaccaatatctcagctccaactttacctgactatgaaggagttgatgcctctctcaatgaaactgccaccacaataactgtattgttgagaccagcacaagccaaaggtgctcctatcagtgcttatcagattgttgtggaagaactgcacccacaccgaaccaagagagaagccggagccatggaatgctaccaggttcctgtcacataccaaaatgccatgagtgggggtgcaccgtattactttgcctgcagaactacccccgggaaacctacctgagcctgccccgttcactgtgggtgacaatcggacctaccaaggcttttggaaccctcctttggctccgcgcaaaggatacaacatctatttccaggcgatgagcagtgtggagaaggaaactaaaacccagtgcgtacgcattgctacaaaagcagcagcaacagaagaaccagaagtgatcccagatcccgccaagcagacagacagagtggtgaaaatagcaggaattagtgctggaattttggtgttcatcctccttctcctagttgtcatattaattgtaaaaaagagcaaacttgctaaaaaacgcaaagatgccatggggaatacccggcaggagatgactcacatggtgaatgcaatggatcgaagttatgctgatcagagcactctgcatgcagaagatcctctttccatcaccttcatggaccaacataactttagtccaagatatgagaaccacagtgctacagcagagtccagtcgccttctagacgtacctcgctacctctgtgaggggacggaatccccttaccagacaggacagctgcatccagccatcagggtagctgatttactgcagcacattaatctcatgaagacatcagacagctatgggttcaaagaggaatatgagagcttttttgaaggacagtcagcatcttgggatgtagctaaaaaagatcaaaatagagcaaaaaaccgatatggaaacattatagcatatgatcactccagagtgattttgcaacccgtagaggatgatccttcctcagattatattaatgccaactatattgatggctaccagagaccaagtcattacattgcaacccaaggtcccgttcatgaaacagtgtatgatttctggaggatgatttggcaagaacaatctgcttgcattgtgatggttacaaatttagttgaggttggccgggttaaatgctataaatattggcctgatgatactgaagtttatggtgacttcaaagtaacgtgtgtagaaatggaaccacttgctgaatatgtagttaggacattcaccctggaaaggagggggtacaatgaaatccgtgaagttaaacagttccatttcacgggctggcctgaccatggagtgccctaccatgctacagggctgctttcctttatccggcgagtcaagttatcaaaccctcccagtgctggccccatcgttgtacattgcagtgctggtgctggacgaactggctgctacattgtgattgacatcatgctagacatggctgaaagagagggtgttgttgatatttacaattgtgtcaaagccttaagatctcggcgtattaatatggtccagacagaggaacagtacatttttattcatgatgccattttagaagcctgcttatgtggagaaactgccatacctgtctgtgaatttaaagctgcatattttgatatgattagaatagactcccagactaactcttcacatctcaaggatgaatttcagactctgaattcagtcacccctcgactacaagctgaagactgcagtatagcgtgcctgccaaggaaccatgacaagaaccgtttcatggacatgctgccacctgacagatgtctgccttttttaattacaattgatggggagagcagtaactacatcaatgctgctcttatggacagctacaggcaaccagctgctttcatcgtcacacaataccctctgccaaacactgtaaaagacttctggagattagtgtatgattatggctgtacctccattgtgatgttaaacgaagtcgacttgtcccagggctgccctcagtactggccagaggaagggatgctacgatatggccccatccaagtggaatgtatgtcttgttcaatggactgtgatgtgatcaaccggatttttaggatatgcaatctaacaagaccacaggaaggttatctgatggtgcaacagtttcagtacctaggatgggcttctcatcgagaagtgcctggatccaaaaggtcattcttgaaactgatacttcaggtggaaaagtggcaggaggaatgcaaggagggggaaggccggacgattatccactgcctaaatggtggcgggcgaagtggcatgttctgtgctataggcatcgttgttgaaatggtgaaacggcaaaatgttgtcgatgttttccatgcagtaaagacactgaggaacagcaagccaaacatggtggaagccccggagcaataccgtttctgctatgatgtagctttggagtacctggaatcatcttagttgggtgagactctttaaagtgcatccatgaagaaacctgtccatctattgagccagcagctgttgtacctgttacacttgtgcagaaagattttaatgtggggggtgggagacttttacatttgagaggtaaaagtattttttttatgaagttgtgtatcttaataaaaaggactgaattagtttttattactatattaaagcatcaacatttcatgccacataaaattatatttaataagaaccagattgaaatgagaacgtattggtgtttgtacagtgaacatgccaccttttttctcatggtttcaggtagtgcagctaccacatgtt

SEQ ID NO: 142645 - DNA, 1656 bp, Homo sapiens
tacaagaataaggaacggggagttttcaaggcaggcgggtgtttcctcagggcgcttccacactcccctttcaatcagcaaccgctcggggggacctccaccttgggacggaaccccaggacgcctctcctcggacggcgggggtttctctgcgcgcgtcctcggtcgtctggtcgcacggcttaccgaactctcgcctctcaaattctgagttctggaacagggcagcgagctgcgccggctcccctttctcgctcgctccctccgagcagcggctggcggcggggcccaggctgcgaacaaaggcggcgcggggcgcgcggccggggctggcgcgcgtctctccggcaggaggcggtggcggcgccgcgcccgagcccgcattcctcagaagcgcccggagcccgcggggcgacgtcacccccggctccgcccccgtccctccccgagcaaagtaactcttgactaacaggagcagcctccgccgagcatggagagctgccgccgcggccggccggcgacgctggcgacgctttcgcccctgaggtagtttggcgaccgcgaagaaggaaaaagggcgggcgggcggctgtcctctcaccgtcctcaccccgcgaggcccggcccgctcctccgtcgtggatttcgcggcgatccccccggcagctctttgcaaagctgcttgaaacttctcccaaactcggcatggatacgactgcggcggcggcgctgcctgcttttgtggcgctcttgctcctctctccttggcctctcctgggatcggcccaaggccagttctccgcaggtgagtggccggggggcgtccccgacgaacgcctggagtcctgggctcacgaggggtgagccaggtccccgctagggctggggacaaggatcgtggggagctctctctgtccgggggtggggaacacagggtagagggagggctgtccccagagttcgtgccaggtgggacgcggggcacccattgttcctctccgaagcttgctcggggctctggagcatgttctgtgtgtgtgttggcggagccctgtaagatgtgttgaaatgcggttctaaggacccactctgagcgttcatgggcatcgaggtctgggcgcctggtggaggaagcctgactcgcgcgtgggagcccgctcctcgggcaaaaccaccgccaggctggccccgcgctccccggatccggcctggggctctggccccgcgctccccggatccggcctggggctggaagcggactgtaaatgtctgccttctgccggagaacccaaaaggagacaagtggagcgtctcgctgtagccctgggggttctcggtcaagccgctcagagaagtccgtgaaccctggctctcccggtcccgccctctgttcccctccagttttgttatccttcgtgtaggttggttgcttctttcgttctctcctctgggggctctgaagtttcaccaggtggacgctggggagcgggctcccgagcacttgtctacctcccgccagtcctgacaacttttctggccaacctacccagcttcgcttggctggcgagcgcatctgctgctggggttcgcggaaattcatgttgagaatttaaaaatatctgaagtatgtctttcaaatcatactcattaagatca

SEQ ID NO: 142646 - DNA, 928 bp, Homo sapiens
gggtggaattccctcacaatgccaatataaatgaagcacgaagattcaggtcaacatctgacaccctcatttacaagcaaagatcagagaatatatagtaactagccacagtttcctatgatcttttctctttaatgtgaccttgttaaacactgatttttcattcagtgaaatataccacaacagtgatggcagcagcagcctgcctggagtgggcactgtgaagatgccagctgcagtgggaaaggcacagctggggctgtacgctccacggagccggcaggtgtcagctggagccaggaacaggacaagaacttgggacccgccgaatggcaggacagaaacagctataacacaaacggctgaaacacgtccctcactcaccatgttgtgggcaacaagaaaagagagaagagctgcagcccttcagggagcccagactgaggtgctcccaagccagggctgtgacaccctctttggggctatgcagttcctggcatctccaagcttccagtcactaccacgttccccagtgccagcagtggaagccacttgcagtagtcctggtccagccacagcctcacaggagccagtgcccatgccagcacctggagctccccacccagccacagcaaggcacagcagctggaccccatgctcccttgctcacacacccctcccctctgcacctggctcgcctttagcaggccatggactggtaccagtccgcagcccaggggttggggaccccgatctatatgacgtggatctgcctacctcttcatcttcataccacttcatgccctgcctattttacattccatcaacaactatgattcttgccctaaaccatgctatttctgcctctatgcctctgcctgaaatgccctcactttccacacttaactctccaccagccgcttcatag

SEQ ID NO: 142647 - DNA, 734 bp, Homo sapiens
ggcgtcgcagtggcaagaacattagggatagcggacgggcagggcaccgtcggggcagaattcgctctgtgctcatcaaggctccatctgcaatgatggtcagcagtgagagagggtcagactgcactctcgcgctgcagtggcagggtaaggtgcacacatactggtgagatggcagggcaaggaaagcaaaacctgtctgcaaagatatgcaccagcgaagcaatgttgggaattgctgtgggtctcagggaagctgcaatgtggggagggagtatgtgggctgtgagggccacccagctagagctttccagtcaggcacagtccgccagcacagaaactatgatgtgggcccccacgcgcctgagattgccctgcaagcaggtgtttctgggccttcccgggttttccgcctattgccactctgcgcggagagaagcagatatcgaggaacttgtcagcatgagaaagttcatggggagacggggaagaagagccatcatgacatgaaggagcagtcagctcagcccctatttggcttatactatgaaaactggcaaaaagaaaaagcccttttccccacctctggtggaggaacccagcacaggaggctttctcaacttcagaatctaagccctcctctgtgcaaggtgctgtgctgggactgtgaggcacacaaaggctcagatcacactctccttgtgttgaaggaatttgcaagccagttagggtaa

SEQ ID NO: 142648 - DNA, 777 bp, Homo sapiens
atgcattccaacggctccgaaggcttaagtgaaccaccgcaatccagggcaaaagtagaagaacccacccgtgaccagcgcacagacccgtggacaacggtccacgtctgcagacgcaccccgcccgaagcgctccaaccatttcgcaaaccagggagagcaagagggcctcagcaggaatttttttacctgtcagggtttggacaacaaagccctcagcaggtgctgacgggtacaacttcctggagaagcagaaaggcactggtgcttgtagacatggaagaaggcctcacgttctccatggctgacaaccgagaaggctggtctgacttggaagaagctgtgtggccaacagccaattggctgtatcacatggtcagagtccgctcagattgtctcctgatgtcattccaagtgtctgatggccgtctatggcaactgggttgggcaaaagcctgctgggaaggggtagcccacagaatgcctaatggagcgttctgttcaagaggacctagaaagcttttagaaaaaagcggcgaaacaggcattgaagaaggttgcctgtcgatccctgaacaacgtgctttagtgccgcgcgcagagaaagttaaaattcgcgcccttgaccgcgacggtaaaccatttgaactggaagcagacggtctgttagccatctgtattcagcatgagatggatcacctcgttgggcatcccggttattgttaccgatcaccatttgccaggcgacacattacccgcagcggaagcgatcattaa

SEQ ID NO: 142649 - DNA, 1578 bp, Homo sapiens
atgtcccctttcccccggcggcggcgtcccggagcccaggcacctctcggagttctgcacgtagcaggatactccctctccaaaatgcctggcgtctccctggagaaagccagcagcactgaactctctactcacccgattgctacaagagacggtgttgttgaactcggtacttttggtctggaagaaagaaaaataggacaaagagggtcccctctctctctctttcccttccgctcccccgtccatcgcacccctcacccccgccccccgccctcgcgtgtcggagcctgcatcgctctggtccttgggaagttcctaggagtcatcgctcggagaaaggaggttggacgccgtgtctctttgctgctgtcttcctggaatctgcttatgtctcacctggggcaacaattcagaccagggccatctgtgaaaattcagggactgctttgtggcaatagaaagaaggttgaaaagtttaagcacacagttattgacagcctagcaattttgaactctaccaagatagcagagttcataagacagagtacctcaggtttcttcctagaaccaagtgggaacatagccaggctctttgatacacttccaaaacgaacaggtctagaaggcaattggatgcgaatttttcacagtcttttctatgaaggaccagagctgagaggagctgggatcgcggcggcaatggaacgggcctcagaaaggcgcacggccagcgcgctttttgcggggttccgggccttgggacttttcagcaacgacattccacacgtggtgcggttcagcgcgctcaagcgccggttctatgtaacaacctgcgtgggcaagagtttccacacctatgacgttcagaaacttagtctggttgcagtaacttattgttccaaatgtcctaccattagttgtcctggtggtacaaaaagtcgttctactccttctcgttctgactcaaaagacggattctccctgaactgccacggctgcgttcgtactactggcactcttcacaatagcaaagacatggagtcaacccaaatgaccatcaatgatagactggataaagaaaatgtggtacatatacaccatggaatactatgcagctgtaaaagagaaagagatcgtgtcttttgcagggacatgaatggaacccataatcctcagcaaactaacacaggaagagaaaaccaaacaccgcctattctaagtgggagaaactcttgtgagattccccctcattcaatgctcaaaagtgtatatatcccgaacgatggggaaaacccagtcagaaaaactggcaactctaaaaagcagagtgcctttcttcctccaaaggaacgcagcttctcaccagcaactgatcaaagctggacggagaatgactttgatgagttgagagaagaaggcttcagacgatcaaattactatgagctacgggaggacattcaaaccaaaggcaaagaagttgaaaactttgaaaaaaatttagaagaatgtataactagaataaccaatacagagaagtgcttaaaggagctgatggagctgaaaaccaaggcttga

SEQ ID NO: 142650 - DNA, 607 bp, Homo sapiens
agtgtgaaactggggtggaatggggtgtccacgtatgttcccttttgccttactatatgttctgtcagtttctttcaggaaaatcttcatcttacaacttgtagggctggtgttaacttacgacttcactaactgtgactttgagaagattaaagcagcctatctcagtactatttctaaagacctgattacatatatgagtgggaccaaaagtaccgagttcaacaacaccgtctcttgtagcaatcggccacattgccttactgaaatccagagcctaaccttcaatcccaccgccggctgcgcgtcgctcgccaaagaaatgttcgccatgaaaactaaggctgccttagctatctggtgcccaggctattcggaaactcagataaatgctactcaggcaatgaagaagaggagaaaaaggaaagtcacaaccaataaatgtctggaacaagtgtcacaattacaaggattgtggcgtcgcttcaatcgacctttactgaaacaacagtaaaccatctttattatggtcatatttcacagcaccaaaaataaatcatctttattaagtagatgaaacattaactctaactgtgacaaagaagag

SEQ ID NO: 142651 - DNA, 1089 bp, Homo sapiens
ttactgttgtttcagtaaaggtcgattgaagcgacgccacaatccttgtaattgtgacacttgttccagacatttattggttgtgactttcctttttctcctcttcttcattgcctgagtagcatttatatgctgtccaagaacttgatctagctttttgtttgtgctcttatttaaatgaattttattgtagccatctgcagatttgccagggtctccttcataagaaggcatgaagccaaataggtttcccatatggctgtctggtattgagtttgctcgctcctcccaagtctccagggggcggaggctgccaaaattccgagcccgagcgcggaggcgccggaccccagcaggtggtgcccctaacaacgttccctcgtcccagttcccaatttgcctttcctccggatagagacttcctctccctaaattggaacagaagtgttgtcccaagctaggcgcagccccgctctgacagcccagatgtcccctttcccccggcggcggcgtcccggagcccaggcacctctcggagttctgcacgtagcaggatactccctctccaaaatgcctggcgtctccctggagaaagccagcagcactgaactctctactcacccgattgctacaagagacggtgttgttgaactcggtacttttggtcccactcatatatgtaatcaggtctttagaaatagtactgagataggctgctttaatcttctcaaagtcacagttagtgaagtcgtaagttaacaccagccctacaagttgtaagatgaagattttccttcctcctttttgctttgccctaaacacttcataagtgtgaatgtcctttaagaaacggataccagtgtctttctcctgacatgccttcccctctagtggcttgctgtagggccagagagtgtgagtgcccactagaaccttcggcttcatctcttgattgccagtttgagcatgctccttgtttcctgtgggtccctgactgatgcagtcattcacaggagtcagtaggatgtcatcacatgcagccatcaggtaacattcctttcctaatcttttatgtctgccttgtggcat

SEQ ID NO: 142652 - DNA, 1344 bp, Homo sapiens
atgaaagcagctgggagaggggatgtaccctgcaaagccagagatgcagagatacccaaggccatgggagcccacctcttgcatcagcatgacctggatgtgagacatggagtcaaagagcccttttgggtgacaccatttctcctccaggtctgtccaggtttctgtcatctcttgccttaccatagatattttcagtccttaatggtcacctacaaaatattcattgatgtggccagaaagttttctgctcccagacatgggtccctcggcttcctgcctcagaagcgcagcagcaggcatcgtgggaaggtgaagagcttccctaaggatgatccgtccaagccggtccacctcacagccttcctgggatacaaagctggcatgacccacatcatgagggaagtcgacagcccagcatccaaggtgaacaagaagcagactgtcttcgctgagcacatcagtaatgaatgcaagaggcgtttctataagaactggcataaatctaaaaagaaggcctttacgaagtactgcaagaaatggcaggatgaggatgtcaagaagcagctggagaaggacttcagcagcatgaagaaatactgccacgtcatccgcgtcattgcccacacccagatgcgcctgcttcctctgcgccagaagaaggcccacctgatggagatccaggtgaacggaggcaccgtggctgagaagctggactgggtctgcgagaggctcgagcagcaggtaaatgtgaaccaagtgtttgggcaggatgagatgatcgacgtcattggggtgaccaagggcaaaggctacaaaggggtcaccagtcgttggcacaccaagaagctgccctgcaagacccaccgaggcctgtgcaaggtggcctgtattggggcatggcatcctgctcgtgtggccttctctgtggcacgtgctggggagaaaggctaccgtcaccgcactgagatcaacaagaagatctataagattggccagggctaccttatcaaggatggcaagctgatcaagaacaatgcctccactgactctgacctgtctgacaagagcaccaatcctctgggtggctttgtccactatggtgaagtgaccaatgaccttgtcatgctgaaaggctgtgtggtgggaaccaagaagcgggtgctcaccctccacgagtccttgctggtgcagatgaaacggcaggctctggagaagattgaccttaagttcattgacaccacctccaagtttggccatggctgcttccagaccatggagcagaagaaagcattcatgggaccactcaagaaagacggaattgcaaaggaagaaggagcttaa

SEQ ID NO: 142653 - DNA, 795 bp, Homo sapiens
atgggatcacatgtggaacaaggagagaacaggacccaagagggacacgaacaagagacgggcaaaagaagaggagccaaggtggacaaaaattggcaagagaatctgaaaagacaagccacaggtgatcaaagtaattgcaactgcaatatgcgaagacttttgacaaatcaacactgcctcttggaacccaacagccatgatgtgaaaagcccaactcacatgcaagaccacatctcttaccaagaagctccggcctggcagtctgttcttggacagagaaggctcatgccaaggcagctgcccggcagtgtcacacgaatgctggaacaaggggggctggatgcagagaaagcatttgacaaaatccagcatcactttatgtttaaaactctcagcaaaatcagcatacaagggtcatacctcaatgtaataaatgccgtctatgacaaacccacagccaatataatactgaatgggaaaaggatatgcaggaaccatctctgggaagacatccaagggactcgagaagtcactccatccaaaagaaattgtggatttgaaggtagcaagcctcatgttttctcccgcaaagcagcagtgacagtgacaaatatctgcagtgtggctgtgaagaggcagtgtttgatgaggaaaccagccaagtgcaaagagtttacccacacaaatggggagaagatcccagtgccatctttcctttttgtcgtcatcatcatcatcgttatcatcatcatcatcatcatcatcatcacatttcatcgaaatgatttatag

SEQ ID NO: 142654 - DNA, 546 bp, Homo sapiens
  misc_feature (1)...(546): n = a,t,c or g
atggggntgnnnnnncaactgaatggccgttcaattcggcacgaggtgatgtctcacagaaagttctccgctcccagacatgggtccctcggcttcctgcctcggaagcgcagcagcaggcatcgtgggaaggtgaagagcttccctaaggatgacccatccaagccggtccacctcacagccttcctgggatacaaggctggcatgactcacatcgtgcgggaagtcgacaggccgggatccaaggtgaacaagaaggaggtggtggaggctgtgaccattgtagagacaccacccatggtggttgtgggcattgtgggctacgtggaaacccctcgaggcctccggaccttcaagactgtctttgctgagcacatcagtgatgaatgcgcctgcttcctctgcgccagaagaaggcccacctgatggagatccacgtgaacggaggcactgtggccgagaagctggactgggcccgcgagaggcttgagcagcaagtacctgtgaacccagtgtttgggcaggatgagatgatcgacgtcatcc

SEQ ID NO: 142655 - DNA, 1254 bp, Homo sapiens
atggcctccaaattgcgactgtctgacatgactggagagaaagggctcaaccttgcaccaattaagatcattctgaactcactttttgaggatggcagttctattggactccagggagctcagggggctgtggacaagccctgtgggcttgagcagccagtggtagtgcccacaaaatgtgactgttacacagccagcccaaagtgcagcagtgggcattgtgggaaggtgaagagcctccctaaggatgacccttccaagccagtctgcctcacaggcttcctgggatacaaggctggcatgactcacatcgtgcaggaagttgacaggccaggatccaaggtgaataagaaggaggtggtagaggctgtgaccattgtagagacactgcccatgatggttgtgggcattgtgggctatgtggaaacccctcaaggcctccggaccttcaagactgtcttcgctgagcacatcagtgatgagtgcaagaggcgcttctataagaactggcataaatctaagaagaaggcctttaccaagtaccgcaagaaatggcaggatgagaatggcaagaagcagctggagaaggacttcagcagcatgaagaagtactgccaaaagaaggcccacctgatggagatccaggtgaatggagacaccatggccaagaagctggactgggcccgcgagaggtttgagcagcagttacctgtgaaccatgtgtttgggcaggatgagatgattgacatcatcagaatgacaaagggcaaaggctacaaaggggtcaccagtcattggcacgccaagaagctgccccgcaagacccaccaaggcccacgcaaggtgtcctgtattggggcatggcatcttgtccatgtggccttctctgtggcacgcacttggcagaaaggctactgtcaccacactgagatcaataagaagatccataagattggccagggctaccttatcaaggatgacaaactgatcaagaacaatgcctccactgactatgacctgtctgacaagagcatcaaccctctgggtgtctttggccactatggtgaagtgaccaatgactttgtcatgctgaagggctgtgtgaccaaacagcgggctctgcagaagactgaccttaagttcactgacaccacctccaagtttggccatggccgcttgcagaccatggaggagaagaaagcatccatgggacgactcaagaaagaccaaattgcaaaggaagaaagagcttaa

SEQ ID NO: 142656 - DNA, 1362 bp, Homo sapiens
  misc_feature (1)...(1362): n = a,t,c or g
ccgccccttggatcgatgaccattggcagngcggnggaattcggatttgatggcgtgatgtctcacagaaagttctccgctcccagacatgggtccctcggcttctctgcctcggaagcgcagcagcaggcatcgtgggaaggtgaagagcttccctaaggatgacccatccaagccggtccacctcacagccttcctgggatacaaggctggcatgactcacatcgtgcgggaagtcgacaggctctgggatccataggtgtaacaagaaggaaaggtggtggagggctgtgactcattgtataagaccaccacccatggtggttggtgggcatctggtgggcttacgtggaaaccacctcgagggcctccggaccttcaagacttgtctttgctgagcacatcagtgatgaatgcaagaggcgtttctataagaattggcataaagcttaagaagaaggcctttaccaagtactgcaagaaaaggcaggatgaggatggcaagaagcagctggagaaggacttcagcagcatgaagaaagtactgccaagtcatcccgtgtcatttgcccacacccagattgcgcctgcttcctcttgcgccagaaagaaggcccacctgatggagatccaggttgaacggaggcactgtggcccgagaagctgggactgggcccgcgagaagcttgaagcagcagggtacctgtgaacccaagtgtttgggcaggatgagatgattcgacgtcatcgggggtgaccaaagggcaaaaggcttcaaaggggttaccaggtcgtgtgccaaccaattagcttccctttaaggcccaacctaggctctgtccagggttgcctgttttggggcatggcatcctgctcgtgtagccttctctgtggcacgcgctgggcagaaaggctaccatcaccgcactgagatcaacaagaagatttataagattggccagggctaccttatcaaggacggcaagctgatcaagaacaatgcctccactgactatgacctatctgacaagagcatcaaccctctgggtggctttgtccactatggtgaagtgaccaatgactttgtcatgctgaaaggctgtgtggtgggaaccaagaagcgggtgctcaccctccgcaagtccttgctggtgcagacgaagcggcgggctctggagaagattgaccttaagttcattgacaccacctccaagtttggccatggccgcttccagaccatggaggagaagaaagcattcatgggaccactgaagaaagaccgaattgcaaaggaagaaggagcttaatgccaggaacagattttgcagttggtggggtctcaataaaagttattttccactg

SEQ ID NO: 142657 - DNA, 2136 bp, Homo sapiens; identical to SEQ ID NO: 128957

SEQ ID NO: 142658 - DNA, 245 bp, Homo sapiens
gcaggtgcccctctgggacaaagctaccggaggaaggatcaggcagcaatatttgctgttctgcaatatttcctgttctgcagcctccgctggtgatacctaggcaaacaaggtctggagtggacctccagcaaactccaacagacctgcagctgagggacctgactgatcgcagctccttgccagcaatggaacaaagctggatagagaatgactttgatgagatgacagataggcttcagaag

SEQ ID NO: 142659 - DNA, 1827 bp, Homo sapiens; identical to SEQ ID NO: 127915

SEQ ID NO: 142660 - DNA, 1038 bp, Homo sapiens
ttcgacatcagcgaggatgacattgatgatggattcaggagactgtttgcccagttggcaggagagtcaggtccctcagctgcaggtctgttggagtttgctggagttccactgcagacgctgtttgcctggtcatcaccagcggaggctgcagaacagcaaatattgcagaatagcaaatattgctgcctgatccttcctccagaagcttcatcccagaggggcagccacctatatgagggagtctccttcttgctgggcgttttattcgtggccggtggttcctcccgcgtcctgctgcgttttggtgatgttggcgggggttttgcgcgactaaccaaaaaaaagaagacccaaatacccaaaatcagaaatgaaaaaggagacattacaactcataccacagaaatacaaaatatcatcagagacttttatgaacaacgatacactaacaaattggaaagcctagaggaaatgaataaacgcctggtccctcttctgtacggctgctgttgtttgctgggggttcacttcaggccctattggtctggttcatttccacacctagagatgtcactcaagaggctggagaacagcaaagatgcatgtctgctccttctgctggcatctctgaccttgaagggcactgacctgatgccaataggatcgctcctgtatagggtgtctgacatcccttttttagaatgtcaccagttgggttgcatggggaacaagacccatttaatgaagcactttgactatcccttggtggaaggggtgtgcttcgctggggggaaacccattcatctgggctgcctggatccttcagaactaccaggaggaaaggctaagtctgctggtccacagagactgcagccaccccttccgctaggggctcaggcccagggagatctaggttctgtccctgagtctttggctggagttattggagttcctgcagggaacccccacccagtgaggaaggatgagtcatggtcaggcctgaagaaacctctggccacagtctgccacagctga

SEQ ID NO: 142661 - DNA, 883 bp, Homo sapiens
atggcgccagtatctgcttctgaggacttctggcaatgtccagagacatctttgatttcgcaactagaaagtgcccctggaattcagttgatggaggccagggatgctgataaaagtcttataatgcacgaaatagcccccacctccaacagggaattaccagtccataaaatcagtattgccaaaccttgctctatgctaatgatctcatggttttttgttaataccggacaaagcttccagaggaaggatcaggcagcaatatttgctgttctgcagcctctgctggtgatacacaggcaaacagggtctggagtggacctccagcaaactccaacagacctacagctgagggacctgactgtcagaaggaaaaataacaaacagaaaggaatagcatcaacatcaacagaaatggacatcaacaccaaaaccccatctgcaggatcacagctcctcaccagcaatggaacaaagctggatgcagaaagactttgacaagttggcagaagtaggcttcagaaggtcggtaataacaaacttctccgagctaaaggaggatgttcaaacccatcacaaggaagctaaaaaccttgaaaaaagattagatgaatggctaactagaataaacagtgtagagaataccttaaatgacttgatggagctgaaaaccatggcacaagaactacatgatgcatgcacaagcttcagtagacaatttgatcaagtggaagaaagggtatcagtgattgaagataaaattagtgaaataaagcaagaagagaagtttagagaaaaaagagttaaaaagaaacgaacaaagtctccaaacaatatgggactatgtgaaaagaccaaatctacatttgattggtgtatctga

SEQ ID NO: 142662 - DNA, 3223 bp, Homo sapiens
cgatggggtaaccctttatttttatttaacagtacatttggaagaagataaggcaacaaggcaaaatttctataatgttgctagcattttcccaaggtaaagccaggaaacaaacttgtgtcctttctataagaacttctaagtgatgtcccctctaactccatggacagacactagtggtggtgaagttcataaagttttgaggtggcaaacagcttattttgtcctttatcataattggtttacaaattggatgcctggttttggcatactggttcagttgatcaagcgcaggatccctttggtctttgtaagaccagatgtataaggccgaatagggtcaagaacttgattgtaaggagaacgatttactattaccaatcaatattctacaaaacctgtctcttgtttaacccaagcgacagaggtgagtctcctctcctggactctccagatgccttgacaagattacttcatgatataccatgtttcccagttggctcatgggaaatggtaatcttggactgttgtttggtagaatcaacagctgcattttaaacttgaagttgctttaaatattccctgccaagggcctcgtgtcctttgagagcgactcaatgtttttgctcagctgttaaatacctccctgcatttttttttcctgatttaatattgctatgaacaggaaagtgtgtaaaagtaaaaagtgtatactatttacagatttaaagctttctttgaccttgtcaagggttaagcgactcatttgcatttagtataatgatatgcaaatcttttactttgatgtgtgaaacttctgctatctcaaattgacagtatcattattttcagctatgatcatccgtttaagtaaatgttcccataattttgaggtccagatacaaagtgtatttctatggaagcttagtccttggctgattttccatcatgagaagtcttcaggcagattagttataacttcaaagtactgagaaacagagccaagagataaggtcgagctctattgttccagtattctcgggatccagctgcttaaatatcttgaatagcgtttccagccgaaccaaacaccgaacaaaattatcaaaatcgatgatgagctggtcatctgcaaaccgagcaacgatgacttggtggagttgacagggcatcttgaaacctgcttcttctaatgccttccgcatttcataggaattcatggtaccagacctgtcaacgtcgatttctcggtaaattttttggtatttttgaatcttcgtccagagaatgtagaactccttcagcccccaagcttgcaactccccgtccgaatctaagcatgtcaaccataaatttgcatgtctcgatgctgaaacccatctgacttgaatatcttggcgctttgctagaacccttctcaggatggtctgcagctcaaaggcagagatctccgcatcctctcctgccaactgggcaaacagtctcctgaatccatcatccaatgtcatcctcgctgatgtcgaactcttcaagattggcctcgatttcatcatcgacagcttggtagtcagctttcttttcagaaaagacccggatgcagaaatccccatccttgttgggttcgaaggtggaaggcacgagaatgtactctcctggcggcagcttgaagcggttgagcacctacacggaggttgatgaaggggttctgagccgccccctggcgcgattcgtcaggaagaagtttttgctgaggtggatgttggtctgcccacttaactcctctggaacctcatagatgccaaagccgatggtgtgcatgtcctcgcccatcttcctctgccgccgtcggtgcttctgaatgagccccaccaggaaggtgcagccgctctccccatcctcctcgtcctcatcctcctcctccagcttgatcaggtactgagggttcatccagaatgtgttcgggtagttcctgcaacctcccgcggtggagccccgcctccagttcccatccattttggtgagtttccacttcttgtaggtatcgctggtgagagtgtctggggtcaggttacagatctccaggcgggaatagtgcctcaggaagtcactgaaagacatccagaattctccatcttcatgccgtctggtcagcctttccctctcctctgggtctatagtgttccagcttgggcagttgtcattccaccgccctgtccactccacttctccccagggatttcggatgcggatcagtttctgtaggcttccgttactttcaacctcctcggctccggtgaccgagtacgcgtgccccttcaccagcttctgaaacgtgatggcctccgagtccgcggcgctggtgatgtcgatggagcagccaaggagagagcctttttgcagagctttctggatgatcttgaacaggttgggagggggcttcttcaactcataccactcagcaatgcctccggtgaagtcttcgaagccctcagtggtggcaccccctgatagagcttcatagcatccgttgatcttggcgtatgccttctccagcagggcgctccagaactcgctcccttcggctgaatgcacaaagagcagctccccgtccttggtgggcagcctgtcatccaccaccacctccacccactcgccgtattgccagaactggaagtgaaagatccctgcatagttttcctggaagctctggtttagggggacgactcgagccaggatttcttcattcaaggtgagggaggcaatggctgccagcagccagcagtcacctagggctccttggcagatgtctgtgcgggtggctcctccaatgataaactgggggtcagcgcagatctccgtggggcgcttccatctcatgccccgggttttgctggagtagggccccaactccttgaagcccagggccgaggggatggccgggaaggacgggtcctggaagagcgtcccggcctccaggcactcgttccgcagcgcctcgtagtcctggttgaggtacttgatggccctctcgtgggagcccagcccctcggccgcctcccggtccttcgccagcttggccgcgatgcccgccatgctgcggtcccggcggccgtactgcgcagagaaaggtcggggcgactccgcgctgcgctcggctggggcgcggccagggcccggcgcgctgctgcggccactgcgggcgccgccgctgcgagcgatgatt

SEQ ID NO: 142663 - DNA, 1395 bp, Homo sapiens
agctgggaaatcctttggcctattataccatggttgctaaaaatggttctaactgaaaacccaaaccaagaaatagcaacaagtctagaattcttactactacaaaactcacctggatccctaagggcacagcaaagaatgagctattacggcagcagctatcatattatcaatgcggacgcaaaatacccaggctacccgccagagcacattatagctgagaagagaagagcaagaagacgattacttcacaaagatggcagctgtaatgtctacttcaagcacatttttggagaatggggaagctatgtggttgacatcttcaccactcttgtggacaccaagtggcgccatatgtttgtgatattttctttatcttatattctctcgtggttgatatttggctctgtcttttggctcatagcctttcatcatggcgatctattaaatgatccagacatcacaccttgtgttgacaacgtccattctttcacaggggcctttttgttctccctagagacccaaaccaccataggatatggttatcgctgtgttactgaagaatgttctgtggccgtgctcatggtgatcctccagtccatcttaagttgcatcataaatacctttatcattggagctgccttggccaaaatggcaactgctcgaaagagagcccaaaccattcgtttcagctactttgcacttataggtatgagagatgggaagctttgcctcatgtggcgcattggtgattttcggccaaaccacgtggtagaaggaacagttagagcccaacttctccgctatacagaagacagtgaagggaggatgacgatggcatttaaagacctcaaattagtcaacgaccaaatcatcctggtcaccccggtaactattgtccatgaaattgaccatgagagccctctgtatgcccttgaccgcaaagcagtagccaaagataactttgagattttggtgacatttatctatactggtgattccactggaacatctcaccaatctagaagctcctatgttccccgagaaattctctggggccataggtttaatgatgtcttggaagttaagaggaagtattacaaagtgaactgcttacagtttgaaggaagtgtggaagtatatgcccccttttgcagtgccaagcaattggactggaaagaccagcagctccacatagaaaaagcaccaccagttcgagaatcctgcacgtcggacaccaaggcgagacgaaggtcatttagtgcagttgccattgtcagcagctgtgaaaaccctgaggagaccaccacttccgccacacatgaatatagggaaacaccttatcagaaagctctcctgactttaaacagaatctctgtagaatcccaaatgtag

SEQ ID NO: 142664 - DNA, 1392 bp, Homo sapiens
atgctcactggagcatttcagattttggagttttggattagggatggtcaacttgtaccttcatctgggaatgccgataccatgaaagctgaaaatcaggatgtgggaggtgaaggaggagagttagttggcttcatggcaggaagggaaagaaagatctatggggccatactgtgcactttccattcttatttaggatttgagcagcagtttttctgttccatagcatcgtctgtggaaggtgaaagggatctgagacctaaggaactgctcggcagaagctcgaatggagaaaggtcgagcaccatattgcaaagttggctgcctggaaggttcatgagcccagctcagtccgcaccggtggccgtccaattaaggtgcttgcatcagctgctttgtgcacgtgctttcggcttgatgctaaactgcgtggagaacggtacaaacgacagtgaaaacagagagctccttgagcctgtaggacaagatttactgattgcattgtttggaaggctcatgttagtaagactttgggctgtttatttgtacatcgtgtacgttctgaggacatccaagccattcttgttgtcatcatcagatttgaaaagttgtataactgaaggtattagatacgaggagctcaatgcttccatagatctgagttttagaatttaccagctagaagaaccacttgcgagccaattccacttcggtctgcccagcattcgacacagtgctgctgctgacgcaatccgtcctcataacgaccggcgggctctccaccgccactcccgcgtggcccgcgactcagactcccggcgactggaaaggacggacgcggcactcccgccggggtcccgggacccaatgcgggcgcgacatgggtcgtgccagaatatagtggtacttaaattccagtatataacagaatataccttgtgtgacttcaggctctttgaggaacctgagaaagaaaagtggattctgaaatggatgtctctagtggataaagtaaaggtgggaacagataaggggaaagagacaccacagcagatgttccagtgcccaggtgacctagaagcttcatgtggaggtgatggaacttcagtaggcctggaagtgatgcagtatcttctgccctcaattctttcctttaatcagtcactgagtcagttaggctgccaagaaacacttatgaaacatgggaaaggctttgctcttgaagcttttctggtaattccgatgctccgtgaggtttgggtgtcactggctggatggaggaaacagcagctgactgacctggacaggatagagctcacactgggcagcaggaaagtgacgggaaaggtgatattttcatctggtgaaggccccacaggggatgctacctaa

SEQ ID NO: 142665 - DNA, 457 bp, Homo sapiens
  misc_feature (1)...(457): n = a,t,c or g
aaatgttaacagtacacctgggaattatgtccaatctaaacttacacatttttttaactgtattttccttctttangcttttcaatgtagtaacacagctttaatgctggccccagcttcagcccccatatacttcatcatcacatcactcttgagtaggaacagagccttcccatcaatttccttcacttttcctctgcatttggaatttaacttcatggggactgctcttgggggatatgtccccaactagtggtgaacttgtggtgcctggcacacttcgagaaaaatcctgggagactgaagtatgaatatacataggatttctacaggcaggattcaaataatttcctgaatttagtgatgagctcttagaatcttctgaaagattctcctctttgggaatggcacttcccccagcaaacaatggttctccttcagacgcntactcctttgt

SEQ ID NO: 142666 - DNA, 1284 bp, Homo sapiens
aggaggaaaaccaggcaagtacagtgctatggaagtgaaaaggaatgtatttcaactaggtaatggtcaacggtgacaaagaacacttaaataaggatattaatgatgcttaggtttccaggccaacttatgcaaaggtatttacaacatccaaaactgcaccccaaaaggtatttccaactgcgtggtgttcagcaaaggacatgagaccgcattgtcggccacccaggttccaatacaatggatcgccactgccccaaactctccggcgcccccttcggacccccggcgccaatcctgggtctcacagatcccgagttcagccacgagcccaaacttcaccatgtgagagcccaggacccaagaggtgacggagccccacgactcccgcccagctattccttcacccgccgtccccaggcgcgaatcctgcaccgggcgcccccacctacccgcgaccaccccgtaggagtcatcagccgcctcccccgagctggccgagggcgagcggagggctccccgcccggcccagacgggttcgtacgcccaggctggggcggggggctgcgcagcggcgctggcggggacgggggcggcggggggcgcgggtccgaggggcgcccgccagccggagcccgcgaaccgcagacttcccgccttccgcagcccggaagggagctgtccgcactcgccgcggcccgcgtgggaagggaccgcgcctggctatcgccccgcgcgggggaggggaagtggagtggaacccagcgtagggctcctgtggggcggagcctccccgatgagcgccgccccgctgctccatggcacccagtcccatcggaggcccaagggctgaggagtgtggagcactgcgtgggagtggcagccagctccacctgctgcctggtgcgggatccactgggtgaaaccagctgggctcctgagtctggtggggacttggagaacctttacgtctagcttagggattgtaaatacaccaatgggcactctgtatctatgtcaaaacggaccaatcagctctctgtaaagtggaccaatcggctctctgtaaaatggaccaatcagcaggatatgggtggggccagataagagaataaaagcaggctgcccgagccaacagtggcaacctgctggcatccgtttccagctacagcccagcgggagagcaaaggaggacacagaaatgagagttgctaggccaggcgtggtggctcacgcctgtaatcccagcactttgagaggctgaggcaggcggatcacctgagg

SEQ ID NO: 142667 - DNA, 4171 bp, Homo sapiens
tgaagctcggtgccggctcgcgcgatcggtgggacagaatttcgttgttttcaccgacgagactggaggaaacaacaccaaatagggataccatgggacaaacagtgaatgaagattccatggatgtcaagaaggagaatcaagagaaaactcctcagtcaagtacatcttctgtacaaagggatgatttccactgggaggagtatttgaaagagactgggtctataagtgctccttcagagtgcttccgtcagtctcagattccacctgtgaatgatttcaaagttggtatgaaattggaagcccgtgaccctcgcaatgccacttcagtatgtattgctacggttattggaattactggggccaggttacggttacgactggatggtagtgacaacagaaatgatttttggaggcttgtcgattccccagacatacaacctgttgggacatgtgaaaaggaaggagacttacttcaacctccactagggtaccagatgaatacatcctcctggccgatgttcctcttaaagacactaaatgggtctgaaatggcatctgccacattatttaagaaggaaccaccaaagcccccactaaataattttaaagtggggatgaaactggaagctattgacaaaaagaacccgtatctcatctgtcctgcgaccattggagatgttaaaggggatgaagttcatatcacatttgatggctggagtggagcttttgattactggtgcaagtatgattctcgagatattttcccagctgggtggtgtcgcctgacaggagatgtattacaacccccaggaactagtgttcctattgtaaagaatatagcaaaaacagagtcttctccttccgaagcaagccagcattcaatgcagtctccacagaaaactactctaatattaccaacacagcaggtcaggagatcaagtcgaattaaaccacctggacctactgcagtccccaaaaggagcagttctgttaaaaatatcacaccaaggaaaaaaggtccaaactcaggaaaaaaggaaaaacctttgcccgtgatatgttctacatctgcagcttctctaaaatcgctgaccagagaccgtggcatgttatataaagatgtcgcttctgggccatgtaaaatagtgatgtctacagtctgtgtctatgtaaacaaacatggaaactttggccctcatctggatcccaagagaatccagcagctgcctgaccacttcggcccgggcccggtgaatgtggtgcttcgccggattgtgcaggcctgtgtggattgtgcccttgaaactaaaactgtttttggatacctgaagccagataatcgtggaggagaagtgataactgcctcctttgatggggaaactcattccatccagctccctccagtgaacagtgcatcatttgctcttcgctttcttgagaacttctgccacagtctgcagtgtgataaccttttgagtagccagccttttagttcttccaggggtcatactcacagctctgcagagcatgataaaaatcagtcagcaaaagaagatgtaacagaaaggcaaagcaccaaacgatctcctcagcaaactgtaccatatgttgttcctctctctcctaagctccccaaaacaaaggagtatgcgtctgaaggagaaccattgtttgctgggggaagtgccattcccaaagaggagaatctttcagaagattctaagagctcatcactaaattcaggaaattatttgaatcctgcctgtagaaatcctatgtatattcatacttcagtctcccaggatttttctcgaagtgtgccaggcaccacaagttcaccactagttggggacatatcccccaagagcagtccccatgaagttaaattccaaatgcagaggaaaagtgaagctccaagttatatagctgtacctgatcccagtgtcctgaaacaaggcttctctaaggacccttcaacctggtctgtggatgaagtgatacagtttatgaaacatacagatcctcagatatcaggccccctcgccgacctcttcaggcaacatgaaattgatgggaaggctctgttcctactcaagagtgatgtgatgatgaagtatatggggctgaagctggggccagcattaaagctgtgttactacattgaaaagcttaaagaaggaaaatacagttaaaaaatgtgtaagtttagattggacataattctcaggtgtactgttaacattttaatttaaaagtatttctcttagcagtttttgttttgtagacagttcccataaaaatattttatcagaattgcagaactgtagtaacagttcagtcaactttgtttttttcctggagtcaccaaccagctttgggagacacagccgccactcccccagtctacttctttaaaaagcatttaacaggttagtattggcatattcaaattggcagttctttatgtctttttaaattttcattgtacagtttacaaatatacttaatgtagttaacagagaaaaacctttgattttggttaacctttatatctagaaccaaaacagctaaatcccaaaggggaaaatatcagggattgacaacttctataattaaatccatgagaatttttcctcactagagaatttaaaggtgcacctgtagatatcatcttttctcagatattttgtgtgatactctgtggtgttctgttcatgttctatcagtatatctagaaagggaatagccatataaattattttccttttattatttctctgtatgttgtatttgatcatatttaaaggaaaaaagcaagcttataagctttcatgaagtgttcttaccagtttttgataaattttttaaattataggatagaattgtcattttatgcaggagatatttatactacgagggttgtttggatggagtcagattaaattttttcagtgaaattcctattattttaaaactttccatattttcactacgcttggacatttaactaggcattcttttcttacatctctatatgaagatacctgtgtccaaaatttttgaagatatatattgtatgtgtttattcttcatatggtactttaccatatttatatattgttttatacctgtaggtttacacacaagtaaatctttttttcttgaatttaatctgggcactttgcactgccacagggggtgacgatggaactatgtatatagttaggatgttttgatttcggtaaaaaatatatgtcccatcgttgctatcaccagtacctctcagcttactcttcaggggatatgaaacaatctgtagattgggtttccataacagggaagtccgtcctaatgccaagtttctaattaatttgcttagttctgagccatttattctgctacactttgaaagatatattagttctgacttattgttggggctttattttatttttatttttttgagatggagtttcactcttgttgcccaggctggtgtgcaatagctcgatctcggctcactgcaacctccgcctcccaggtgcaagccattctcctgcctcagcctccctagtagctgggatcacaggcatgtaccaccacgcccagctaattttgtatttttagtagagacggggtttctccatgttggtcaggctggtctcgaactcccgacctcaggtgatccgcctgcctcagcctcccaaagtgctgggattacaggcatgagccaccatgcccagccatgtttggggctttattttataagttagaactttgaagaggaaatggtgctatatgtttattgttattactttgtgtaactttgatgtaatgtttataagctatgagaatcagttataaaagtattaggccctttggttggtaaatggcccaataaaatattccccccaggggcaagaatgtacattttcctttttagaaaacccaaatgtactttagacatgaatgcaactatttaaagaatagcttcatttatgttattccttacatgtcataagattcttacttaaacttggtcttctttcaagttgtttgtatgaagatgctgtacccacttgaacagtcctcaggtgtttacataaatactatgttttacagttttcatattttaaaatattaataaagttaatcgcaacgattcaaa

SEQ ID NO: 142668 - DNA, 422 bp, Homo sapiens
attgacagcttctaacaactcagtatactcctatgaacaaaatttggagcatatttgtttctctctacctgatttcttcagactgtggaaactatttgaatcaaacttgacttatggatccaataaagcccttggaaaaactggcctcatattttgtgtaaacagtccccgtacagggtttctgacttgtgttttcctaatttggaatcactgaaaactaagttttgctttcttaaaaccctgtgaactgaagccagacaacttaaacttcagaagaaaataacagcaacctatttgcatacataagccacttgcatacctgcctactaatgtatggacttcagagtaatgtggctgatatacatttttccaggattggtcttttggttattgggtgttttctcccttcttcccccaatttt

SEQ ID NO: 142669 - DNA, 1834 bp, Homo sapiens
tcagaggttataggttcttggggtctcagtgatgcatgaccttgcgttggtggtgatggggagttgggtggaggtgggaggtgatccctggggtttctgcacaaagaggagctgcgctgaagaccctgtagtgaccacaggtgtatgggatgggatcagcctgtgttctagacagtgctcaatgaatgtcacttctgtgttccattcctgatgtggtttggatctgtgtccccatccaaatctcatgttgaattgtaatcccgtgttggaggaggggtctgatgggaggtgattggatcttgggggtggagttctcatgtatggtttagcaccatcccgccttggtaccatatagttagtgacttctggtgagatctggtcgtgtaaacgtgtgtagcaccttcttcctttcttcctcctgctcctgccatgtaagatgcctgttccctctttgccttctaagaaagtaggtatgtttataccaatatcagacacggagaagtgaacctccaaattcaggatagccatgaactcctgcaaaactgcacctagcctctgcctgccatagataaaacaaattctggggctataaaagacaccaagctgctgctgcccctcagagctctctgacacagactccccatcttgctgctgagccacatcaccttgacacataacgccttctccaattcccttctccaccaggagttccattgccctcttccctttttgggcagtggccccatgccactgtctcaggaggtctcctgctgtagggaacttcccctcttgtgcaatgtgtcctccacggacaaccagaaggaggagaggaccctggagaagaggatttgcaccctctagaggataaggcagcacaatactaccatgggagagtgaggaacttgaccctctcctttgccagtgatcacctgacaagtacaagtcctgatttctgtcagcgatggctaaggctaaacaatccaccaggccatggctgccctggcctaaatcacaaggaacatcaccggcaaggccgccccctcgtagtgcaaataaaccaccaccagccaggcccccagttgagcgggaaccctgagatgcacggaagaggtcatctattagggttctcactgtgaggggatgggcaactgcccctccaaaaggtccatggcccctaccggtctgttgaattcggcggctacgtgtagaactcagaagggcaaactgtccccgatcctgtaaaagacaagttcccagagctgcagcctcccacactggcaaggacgcccaactgtggctggcatgtttggattctggcgccaccacatcccccacttccaatatttgctggatgctatctgtggagtctcccttacctcttccactctctagcggggacgaagtgagaaggtccagccgcctccaaatttgcttcccagagtgtctgccccaaatgcacaggcgagcacctatccatgggcttctgccgtaggcggctcccagtctcagcccaaaggtatccgtcacaagataggcatcacctggcagcaccctgggtacttcctgtacagggactgtgtagacaaagatataaggccagtttttccaaggggcttatattggctccataagttaagtttgattccttaaaggagagcacaccattccagtcaaagccttggtaaaacaaccagtttttcccattgcgttctaatcttaagagcttgatttccaaatgccattttccagcaaaaggaaccagatctccttggagaaataaatagcgaattctttgtctctctggctgctccttctcattatcttctataggcat

SEQ ID NO: 142670 - DNA, 825 bp, Homo sapiens
atgaaactcatggaaacacttaaccagtgcataaacgctggtcatgaaatgacgaaggctatcgccattgcacagtttaatgatgacagcccggaagcgaggaaaataacccggcgctggagaataggtgaagcagcggatttagttggggtttcttctcaggctatcagagatgccgagaaagcagggcgtctaccgcacccggatatggaaattcgaggacgggttgagcaacgtgttggttatacaattgaacaaattaatcatatgcgtgatgtgtttggatctggctctgaacgggctacgtgtcttgctcgtggaaggggttatatcaactccctagcccgatgtcagaatttagttaacagggatcttgatcacctttcccttccacaagatagcacactggtccattacattgatgatattgtgctgcatggatttagtgaggaagagaagggtcaggtggctcagtctgctgatctagatgagggattgctcaaaattcctggagatacttttgggcctgaagcagataaggacttcttgcacaaagatctcagcacagaaattgtaggtcagagctataacactcaccacatggcccaagattccattccttggaatccgtcaggccaagaaccccaggtcagagaacacgaggcttgccatcatcttggaagcggctcaccaccatcttgggagctctgtgagcaaggacccccggtaacagaatcattccaggtgcttgtcaccagtggattggataaagaaaatatggcctatatgcactgtggaataatatgcagcaataaaaaaggatga

SEQ ID NO: 142671 - DNA, 1794 bp, Homo sapiens
atgcctggaggccacacaacagcattgcttcagagagagagagctcatgctggttccccaagtcctaagcagctacagcatggcaccattttgagggcccagtccccacaagactacatcctgccctggggtccaacagcccctacatctacaaatccatggagctacattgacatctcccacttgcagctaccactgtggcttgctgctgccaccagggctgaagtgcaagctgaaacttcacatgactttgatgaggatgacagtcttccaaagaaaacggaaaaagggctctttgaaaatgtggaaccacagaagaaacacagctgttcaccaaagcatagtaaattgcacaagcattgtcatcagcagttcgaatacagagatgggcagattataagccatgctgctcctcagctagtcttgggggttcaaggtcccaatctccgatcaggcatggaggtggttttggtggagaagaaatctgatggtagtcatcagcgctggatacaccaggaagacagcagaacattctgtacttttgtcatcttgggagctcctcatgtcaagacacggaaaagagaggcagttagtggaagggagatggtgatattggttgatccgtcattggaaacgtcagagtccagagagaagaggacctttcaccttgtgagtaaccctgaccttgtgctggcagtgtctatgaccaagactagaaatgaagtttgtggctatccagttattgttcagaaatataagccgtacaacaatggagctgccaatcaaaagtggcattacatgaaaaatataaaagcacttgtggcctttcatagcactgccttggataaggaaattacatcagcaaattatgctggtgtctgtacatcatctgtgattaaagaagaaaacattgatcaaccaggatactgttatctctcacctgatggaaagagaaaaactatgctctgcttggcttgtggacaatccatgagaacagagaaaggactgaaacaattgcttccaggggttccattcctctgtatttcaggcaccaagactcagaagcccttcttacaagggcccttcaaggtcatcagtgtggctgaggttgatttgtcgtgtgacaaggctgaaaaaactctaagttactaccaagcacgtctattgtctttacggatgaagacctgcacgcaagctgcatctcacagtggcatggcagccacacaccagaaggcagtgaaaataattgcatacaaaaatggggatgggtatcgtaatgggaagttaattgtggctggaacattccccatgcttcttacagaatgcacggaacaacttgggcttgccagagcagcctccaaagtatataccaaagatggaaccccaatctttaccttgcgtgatttggttttatgggctctagatgaattctttctccagagagactctgagaaacaaaagcaagatgcagctcctgttggaaaaagacagataattgttgaaagtatggaagaaaatccaagaatgaaagtgaaaaacagattatttgcaaaatctgtgacatccgatagtttggatggtatagacaagtctttgcttaccctcatcctcagaaatcctattgccatctgggtgtcttgtggtgaaccatttctacctccaaatgctttgcagaaagcagaaaaattagagaaacagaactggctaaaaaaggacagaattttggctgatctagataccatgagacacaaaatgagacagttaaaaggtcagtatgaactatatcaagcataa

SEQ ID NO: 142672 - DNA, 872 bp, Homo sapiens
ttttttttttttattttttgcagaggcctccactttttatttcagttgtactcatctgtcccactgtgcaaatggagtcacacgctcactcaattctgagaggcctggccaaggcaaagagaaaagatgcccagagcagtctgttagagttgcattctcagactaatatctttacagtcttgagaaatcactgtcagggtttatttaaaatgcagatttttgaaggataaattttacgactaattttttttaataaactatgcaggattgttatttagaagatttgccaaatttagagtcttcagcgatggaaataattggccttcttgtcacagtcttctgtttataaagtgggtaaagaaagttttctttccagaaaaatacagcagaaaatccgatggttctgataggagttaattgtggagatgtgccagagacagcagcttcgtggatggtgacaccacaatgtctgtggcttgagggccctgctgccttcggattctggcataatttgctctgatctccatcagttgttttaactcttttggggttttgaaaccatgtcccatagacacacagatgaccatatctcgctctatgtcgtcccaggactgaattggctctccactgggggtgtacagtgctctagctgggtgggtcattttgagacgagaggagcagtcttgcagcagctctgaaatagttttgccccaggcataagtgccatcttcaggtctgcctccatttagataaatccacactcgttttgtgttgggctgcttatacaggttgctcggcttgactgctatacgtttggttgcaattggaaaatttattttggattccatttcttggatttcagaaaggtgtgc

SEQ ID NO: 142673 - DNA, 1522 bp, Homo sapiens
gaatttcttaaatagcgagaagccttattccatgaaaaaatacggaactacaagaacattctgtacttttgtcatcttgggagctcctcatgtcaagacacggaaaagagaggcagttagtggaagggagatggtgatattggttgatccgtcattggaaacgtcagagtccagagagaagaggtggagcatcagggggcccagtgggacaagatttgctgataagcacaagtacgcctctagggacacgcagacagacttgaacaagatagtctttcagcataagggaaacacagttactttaaaattttggctaggttatatcaactccctagcccgatgtcagaatttagttaacagggatcttgatcacctttcccttccacaagatagcacactggtccattacattgatgatattgtgctgaatggatttagcgaggaagagaaagatcattctggctacaactttgacaaagaattcgatagaagcaaggctctgggggtgggggtgtgtgcagtgactagttggaaaattcagtgtattataccagtgagtgatggcagtggtctgaagtcagataggagtaagaattttgaaaatccaagaatgaaagtgaaaaacagattatttgcaaaatctgtgacatccgatagtttggatggtatagacaagtctttgcttaccctcatcctcagaaatcctattgccatctgggtgtcttgtggtgaaccatttctacctccaaatgctttgcagaaagcagaaaaattagagaaacagaactggctaaaaaaggacagaattttggctgatctagataccatgagacacaaaatgagacagttaaaagggcggcgagtagcggcatgtcagccagccaccatggttcctaccaagagccctgtgcagcccgtggtggttgaaggaggctggaccgaacagactcaacaggaaattaaactcatggaacttataagacatacagaggcacacctttctgaaatccaagaaatggaatccaaaataaattttccaattgcaaccaaacgtatagcagtcaagccgagcaacctgtataagcagcccaacacaaaacgagtgtggatttatctaaatggaggcagacctgaagatggcacttatgcctggggcaaaactatttcagagctttccttccttctgggtgtggggcaggcccttctcaagaatggggagtcttatgaactacagtcaaacaagctgctgcaagactgctcctctcgtctcaaaatgacccacccagctagagcactgtacacccccagtggagagccaattcagtcctgggacgacatagagcgagatatggtcatctgtgtgtctatgggacatggtttcaaaaccccaaaagagttaaaacaactgatggagatcagagcaaattatgccagaatccgaaggcagcagggccctcaagccacagacattgtggtgtcaccatccacgaagctgctgtctctggcacatctccacaattaa

SEQ ID NO: 142674 - DNA, 421 bp, Homo sapiens
  misc_feature (1)...(421): n = a,t,c or g
nnnnnnnnnnnnnnnnnnnnnnnnnnnnnnnnnnnnnnnnnnnnnnnnnnnnnnnnnnnnnnnnnnnnnnnnnnnnnnnnnnnnnnnnnnnnnnccagtaacatcaacatcaacaaaaaggaccccaacacaaaaaccccacccaaaggtcatcagcctcaaagatcaaatccaccacgtagataaatccatgatgatgaggaaaaaccagtgcaaaaatgttgaaaaatccaaaaaccagaattcctcttcaccacatgatcacaactcctctcctttctgcaagggcagagaactggacagagtatgaatctgacaaattgacagaagtaggcttcagagggtgggtaataaactcctctgagctaaaggagcatgttctaacccactgcaaggaagctcagaaccttcataataaggg

SEQ ID NO: 142675 - DNA, 358 bp, Homo sapiens
  misc_feature (1)...(358): n = a,t,c or g
ctgctcctccctctggaagctttgtcccagaggggcaccagcctgatgccagcagagctctcctacatgaagtgtctgctgaaccctgctgggtggtctctctcagtcaggaggcacannnnnnnnnnnnnnnnnnnnnnnnnnnnnnnntcccttagcagagtgtgctgctagaatcctcctagttaggatcagctgctctcttcagagctggcaggcaggaaagttttagtctgttgaagcaacacccacagcttccccttcccccaggtgctctgtcccagggagttttatctgcaagcccctgactggggctcctttctttcagagatgccctgcccagtgaagaggaatctaa

SEQ ID NO: 142676 - DNA, 2697 bp, Homo sapiens
atgctccctgtttcagtgggatggaggggaaccctgagggaagctcgaaggcagaggttagtagatagagcatcttccggggtagctggcagcattttggcacatgatgctggaagaggatgtggccggagctgccaggcactgaatccaaaagtggtaattattcctctacatgcagacctcagcagctgctcacacattccagagcaggggagtccttgccttgggcttggttcagcatctaagaaatacagtgacattgcagggtggcagcacctggcgacgcagggcagagccgtccacgtagagcacattgagaatgacaaccctggaggatggcgagagagaccacccagcagggttcagcagacacttcatgtaggagagctctggctggcatctggcgggtgcccctctgggatgaagcttccaggggaaggaacaggcagcaatctttgctgttctgcaccctccactggtgataccccaggcaaacagggtctggagtggacctctagcaaactgcagcagacttgtggaagaggggcctattagaagaaaaactagcaaacagaaagcaaaaacaacaacatcaacaaaaagggcccccacacaaaaaccccatcctaaggtcatcagctcaaagatcaaagcaagggcacaaaactggacagagaatgagattgacgaattgacagaagtaggcttcagaaggtgggtaataacaaactcctccaagctaaaggagcatgttctaacccaatgcaaggaagctaagaaccttgataaaagattacaggaactgctaactggaataaccagtttagaaagaagcgtaaattacctgatggagctgaaaagcacagcacgagaacttcatgaagcatacacaagtatcagtactcaaatcaatcaagcgttacagaatcagagtgtgcaccaatcccaaccacgggtattggaggtagagactactccaggatccttgagaaatggtccaggggaagaatcaaacttcagaacttcatcacagcaggaaatcaactatagcacacatatcttctctcctggaggcagccccgagggaagcccagttctagatcccccaccgcatctggagcctaatagatcaacaagtaggaaacattcagctcagcacaaaaataacagagatgacagtttagattggtttgatttcatggcaactcatcagagtgaacctaaaaacactgttgttgtgtctcctcatcccaaaacatctggagaaaatatggccttcgaagatctctaacagcacatctcagggtaaggagaagagtgagccaggccaaaggagcaaagtggacattgggttgcttccatcaccaggagagacaggtgttccatggagggcagacaatgtggaaagtaacaaggaaaaaaaggctagcactagattctgaagcagcagtctctgctgataaaccagactcagtactgactcatcatgtccccaggaacctgcagaagctgtgcaaagagagggcccagaagttgtgcagaaatagcaccagggtgcctgcacagtgcacagtcccttcccatcctcagtccactcctgtacatagcccagacagaaggctggactcacccaaaagaaagagaccgaaatcccttgcgcaagtggaagagcctgcaattgaaaatgttaagcctccaggttcccctgtggccaaactggcaaaatttactttcaagcagaagtcaaaactgatccactcctttgaagatcacagccatgtgtcacctggtgcaactaaaatagcagttcatagtcctaaaatttcccagcgtagaacaagaagagacgcagccttgccggtgaagcgtccaggaaagttaacatctaccccaggaaaccagatctccagtcagccacagggtgagacaaaggaggtgtcgcagcagccaccagagaaacacggaccaagagagaaggtgatgtgtgcccctgagaagaggattattcagcctgaattagagcttgggaacgagactgggtgtgctcatcttacttgtgagggagacaaaataggaagaggtttcaggcagtaataaaagcggcaaggttcatgcctgcacattagccagattggcaaacttctgcttttactcccccatcggaatccaaatcaaaatcccctcctcctgaaaggaagaaccgaggtgagagaggcccaagctcccctcctacaaccacagctccaatgcgtgtcagtaaaaagaaatcttttcagctccgtgggtccaccgagaaactgattggttccaaagaatccctcttcactttaccagaactaggtgatgaagcatttgattgtgactgggatgaagagatgagaaaaaagtcatagttgggaaaagctttctggtcaaatctcaccttcttcaactccacagaggaccttcaggatatcaatatggtatttataaatgtatagaacaattggccatattgaggatcactctgaatactggctcccccttaaggctttctaatttcaggttaatcttcatgacttaaaaagttgtataatcagttgaggtcagtgtgataccagcagctgagctgaattaattatgttgtgcttaattttacaaatggagtacttgtattcctgttcctgaagctggttctggtttttggtttggtttgat

SEQ ID NO: 142677 - DNA, 1413 bp, Homo sapiens
atgaaggagttctcgtcaacagcacaaggcaatagagaagtgttccatgcagggacatctcaaagacatgaaagtcatcacaatggagatttttgtttccaggatattgataaagatattcatgacattgagtttcagtggcaagaagatgaaagaaatggccatgaagcactcatgacaaaaatcaaaaagttgacaggtagtacagagcgatatgatcaaaattatgctggaaacaagcctgttaaatatcagcttggattcagctttcattcgcatctgcctgaactgcacatatttcacactgaagagaaaattgataatcaagttgtgaagtctatccacgatgcttccttggtttcaacagcccaaagaatttcttgtaggcctgaaacccatatttctaatgactatgggaataatttcctgaattcttcattattcacacaaaaacaggaagtacatatgagggaaaaatctttccaatgcaatgacagtggcaaagcctataattgtagctcactcttaaggaaacatcagttaatccatttaggagagaaacaatataaatgcgatatatgtggcaaggtctttaattcgaagcgatacgttgcacgccatcgtagatgtcacactggtgagaaaccttacaagtgtaatgagtgtggcaagaccttcagtcagacatattacctaacatgccatcgtagacttcatactggagagaaaccttacaaatgtgaagaatgtgacaaagctttccatttcaaatcaaagcttcaaatacataggagaattcatactggagagaaaccgtacaagtgtaatgagtgtggcaagacctttagtcagaagtcgtaccttacatgccatcgtaggcttcatactggagagaaaccttacaagtgtaatgagtgtggcaagacctttagtcggaagtcacattttacatgccatcatagagttcatactggagagaaaccttacaagtgtaatgagtgtagcaagacctttagtcacaagtcatctcttacataccatcgtagacttcatactgaagagaaaccttacaagtgtaatgagtgtggcaagaccttcaatcagcagttaacccttaaacgccatcgtagacttcatagtggagagaacccttacaaatgtgaagatagtgacaaagcttacagtttcaaatcaaaccttgaaatacatcagaaaattcatactgaacagaatccttacaagtgtaatgagtgtggcaagaccttcagtcggacgtcatcccttacataccatcatagacttcatactggacagaaaccttacaaatgtgaagattgtgatgaagctttcagtttcaaatcaaaccttgaaagacataggagaatttatactggagagaaactacacgtgtaa

SEQ ID NO: 142678 - DNA, 348 bp, Homo sapiens
gggatgtctgtgaggactctttccaaataagatcccattctcagttctggagattaggacctgggcacatctttctgggagacaccactcagcccactgcactagctgtgcgtggccccaggttgcctgcttaccattggcgacacatcccagctgcacctgcacgttctgcagcctccaggcccctggacggcctgggcaaagccctctgagccccagacgggcctgtgggcctgaagacctgccccctcctccttatgtctgagacctagccccttccttggggccgtccctgggtccactgatgtcccaatcccagccacgtagaactccaccactgagaggccg

SEQ ID NO: 142679 - DNA, 708 bp, Homo sapiens
ccgcgctgcaggaattcggcacgagctgacatcagtgcctcatccgatgtccaaccccggccagaggaaccaccgtcgcttcagccccactctgaccttggaagccccaccctgcatggaggcagaggtgggaactctgtcatccaccgttccccacagaccactcacagccgctttaagagaacagccagggcttctaggcaggagcacgacagtgttcacgctgatggccagggagcctcctcagccagcagcagccgactcgtgcttgtgcattgttcagatggaagcatgatcattggatggaagttcctggcacaggtgcaagttgaccctgagtcattccagaaggattcgggcctcaccggaaagaacgccaggaaaagccatagggcaacagctcttctgccatttcagtcctcatgggtgaaactgggtctatgggagacagctagcaagtgtctgggcagcccccctggccctaagaagttcccgtcgcagggtatgctggcaggaagtggtctgggtcatcttggagatgcaaggtttggatggcgttgggcactgcaggaggagctgcccagcagtgcaagctcccagggtcctggacctctgaccctgtgtcagcccttgtttggtggccctgagcagggccacccagaaggtgggggtggaggacagttcagccgcagcctggaggctcactga

SEQ ID NO: 142680 - DNA, 906 bp, Homo sapiens
tcagggaggcggggtcttgcccaactggatatcttctgtgatgcagatttgtatgccagggtccccttccacgctcagcagtgtgaggaaggagatggcattagtgtcagtttgcacatggaacagcttcttctccacgtgtttgtctgaggcacaggtgtcggtcttggcaaaaggcatgggctgttgtttgctgcacgttctgcagcctccaggcccctggacggcctgggcaaagccctctgagccccagacgggcctgtgggcctgaagacctgccccctcctccttatgtctgagacctagccccttccttggggccgtccctgggtccactgatgtcccaatcccagccacgtagaactccaccactggcatggggctcttgagcattccccgagaacctgtgctcagtgggcctgaattgatggacagagcggaagccggcttggcgtgagctgcggctgttcggggcccgtgatggaaccaggagcagggagcgtggatagcatccttaaaagtccgccagttgggaggctgtggcaactgctttccttctctgagacttgtgttttccaagacgggcgcagatgggcgctcagcacgggccgggcgtgatccaattacacagcagatttcagacgcccagacttggagctggggaagcctggcgccctggggagaacactgccctttgtgctggtgtcctggggctgctctcacaaagggttcaaagccaccagctggggcttgaacaacagaagtgtctcccctcacagttctggaggcagagaccaatgtcaaggtgtcggcagggccctctccctccagtgctctaggggaggacccttccttgtctctttcagcttctggggcgtccaggtgttctttggcttgtggccacat

SEQ ID NO: 142681 - DNA, 1842 bp, Homo sapiens
tcagggaggcggggtcttgcccaactggatatcttctgtgatgcagatttgtatgccagggtccccttccacgctcagcagtgtgaggaaggagatggcattagtgtcagtttgcacatggaacagcttcttctccacgtgtttgtctgaggcacaggtgtcggtcttggcaaaaggcatgggctgttgtttgcctgcccacaccttgatcttggacttcacctccaggactgtaggaacatgaacgtctgtggttaaagcacccaggccctctgctacggcccccccgggagagaagcgcactccctggaaaccccagcctgctgggtcatggctcatcccagctgctgcagggttgacgtcggctacaccaggcctggccccgcacacacggtccctgttgccagcagaatgtcgagggtcccctccgcagagctgactcgtgcctctgcaggactgagccagggcccagccgcctatttcttcactttgttgggtgtgtttgagtggcctgggcttgccacaagtggggggagctgacccacgggcaaagctcccagagccacggcacggatcagggttgtccaacacaaaggcatcaggctcccagcttggctcactctctctgaaaaccacacgctggcccagacaaccctctgcgaaggcgacggtgaactgtggcctggagcccagcctacagccccttctagaccacaacagtccactctctccggggtcacgggcactttggtggggtacactcaggggctgtctggagctgtgctctcccccagtgtgaggaatcatcgaggcttctcggaggaggagagaacagaggacagtgcgtcgggcctgctcagggccaccaaacaagggctgacacagggtcagaggtccaggaccctgggagcttgcactgctgggcagctcctcctgcagtgcccaacgccatccaaaccttgcatctccaagatgacccagaccacttcctgccagcataccctgcgacgggaacttcttagggccaggggggctgcccagacacttgctagctgtctcccatagacctcttttgccaacatctgcttgcagcaggagctgtgccaggaacttccatccaatgatcatgcttccatctgaacaatgcacaagcacgagtcggctgctgctggctgaggaggctccctggccatcagcgtgaacactgtcgtgctcctgcctagaagccctggctgttctcttaaagcggctgtgagtggtctctgcctccatgcagggtggggcttccaaggtcagagtggggctgaagcgacggtggttcctctggccggggttggacatcggatgaggcactgatgtcagaacatgtgcacgtgtgaggtccaaggtccaaggccagcagaggagggggctgcacatctgagcattcggtggggggcgttgcacatcccagcactgctcaagaatgatttgtgtgcctactgagcaaaggttctgctggactctgggtttactgcagctgtggaccagctgctggacagggtcagggtcaggatgtggagggacactggggatatgcctttctccttcgggcagctgggaagatgggctgctgccccagaggaggaagggaagcctgcacgttctgcagcctccaggcccctggacggcctgggcaaagccctctgagccccagacgggcctgtgggcctgaagacctgccccctcctccttatgtctgagacctagccccttccttggggccgtccctgggtccactgatgtcccaatcccagccacgtagaactccaccacagacactgactcttcagcccacagcat

SEQ ID NO: 142682 - DNA, 525 bp, Homo sapiens
atgagtgtctgcaacttcattcttgaagtcagtgagaccaagaacccatcggaaggaaccaattctagacacattttggcaacccagatgggacacatttggcgacccagatgggacacattttggcgacccagatgggacaatcgcctattgccaagtgttaagatggcaggagtggaatcttggattcaccacaccccagttaaattttggacacccccggaggaacctgcgggaccatcagctcaggagtcccaagatcagccagaccagcctcgatacacctgcgaaccattggaggacttgcatctcctattttggaaggaaacatcccagactaaaaaggctcttacctctgatcctgaggaaaaacccattcctccttaaaaaagataagtgaaaacctacataatctttaatacctctccttgcccctttaatggaatccttttactatttcataatattattaagcagcatactaaccatactctttacgataggactacatactatagctcctgc

SEQ ID NO: 142683 - DNA, 990 bp, Homo sapiens
gattcagctgcctctgaaaacctgtagcccaataatggttattccccaggagccgcgcgaagcatgagctaattttcagtgagcgcggactttggggtaacggttccagcacagcacatccctttctcctcttttcactcatcggcaccgctacctgaaaaccctggccgggtgctggggcttgaggagcagttcccacttcccagtctttttcacttttcacagctgcaaagttcacggagttgaactgcagtgctttcagttcactgctcactctgccacgatcaatctctgttgtaaattttcctcccagagcacgtgacgatgcacttcttgactatatatcccaactgcagcagcggagttgtcagagcgcagagccggacagagcagaagaaccctcttggactggacgatttgggaattcaaaacttgggacaaactgtcagccttgcccctgctgtggaggcagcctcaatgctgaaaatggagcctctgaacagcacgcaccccggcaccgccgcctccagcagccccctggagtcccgtgcggccggcggcggcagcggcaatggcaacgagtacttctacattctggttgtcatgtccttctacggcattttcttgatcggaatcatgctgggctacatgaaatccaagaggcgggagaagaagtccagcctcctgctgctgtacaaagacgaggagcggctctggggggaggccatgaagccgctgcctgtggtgtcgggcctgaggtcggtgcaggtgcccctgatgctgaacatgctgcaggagagcgtggcgcccgcgctgtcctgcaccctctgttccatggaaggggacagcgtgagctccgagtccttctccccggacgtgcacctcaccattcaggaggagggggcagacgatgagctggaggagacctcggagacgcccctcaacgagagcagcgaagggtcctcggagaacatccatcagaattcctag

SEQ ID NO: 142684 - DNA, 388 bp, Homo sapiens
gccatagcccctggccacaccaccgctccgtaactctctatggattcctggatgacaatctcctttcctgcaaaccgataatgctcctgagtgtagctggcgtaatctgtaggaacaaatttctggaggctatgaagagatggttctatcttgttggattcttctaggactcccccggtgctgtctttctgcggagcccccttcttctcagcctctaaccagccacccggggagctgagtccttcccgccggcgcccaggctgctgcgcggagctcagacacacgtccatagccggagcctcatttctctggagtctgtgtttcccagatggatattctcagcttttcaaagcttaaataacttctttcaagctaggttctaattctt

SEQ ID NO: 142685 - DNA, 1519 bp, Homo sapiens
gaaagatcaatgtggaaatcaatgagtctcctattcatattctgggatgggaacaggaatagcagcccagggcgagctgtggtgaaacagccaatcaagttattgtcagtggtcccctgggatcatgtgcctgttatggaagaagcaacggagccagggaagaaatggacatcatctagaggtttggacttgggaagtgcaactccattgcctttagttgcaatagctggaggagacttcaggttattttccactgtagaaaggggggaacaattaacttcctgcagttgtgagaaagttggaaagaaggagaaagtgagcacctgtaagataaacaaattctcctgtgaatcagagcctggcagagcattcttggctggcttgagcctaggaggaaagcagagcagccttgtgtttgctccaaatcccagcttctcatccatgatgtcgttaaccccagaatccacatgtacccccagtgaatccaacaagatagaaccatctcttcatagcctccagaaatttgttcctacagattacgccagctacactcaggagcattatcggtttgcaggaaaggagattgtcatccaggaatccatagagagttacggagcggtggtgtggccaggggctatggctttgtgtcaatacttggaggaacatgccgaggaactgaatttccaagatgcaaaaatacttgaaattggtgccggaccaggccttgtttccattgtggccagtattttaggagctcaagtcacagcaacagatttgcctgatgtcctgggaaaccttcaatacaatcttttaaaaaacacactacaatgtacagcacatctgcctgaagtgaaagaactggtatggggggaagacctggacaaaaactttcccaagtcagctttttactatgattacggtcctagccctcagatgtggtctacccatcactacttcctggaccaggctgctcacccacccatggtgtacctttccccagcccagggacggtgctgctttgggcaaacaaattcacggttcagccaccgactatgaatttttagataaattcaagccaagtttttgacacaacactgttggctgaatatccagagtcgatcagtcaaactttttaaggggatactaaaatggggactaaatccaaccaaaatgccctttcacaacgttactgtgtcttttgagcaatgtgttagaaattgctttggtaatagacttctttcacaggattgagaaggtagtgcatagaaacaacttgtatacttggaacaaatgtaacaatactgcagaaactttctaatttctaagataatttaagattatctggttaatctaaatatctaaaaagaacaacataaaaacatgaaagtagctttgttggctccaacgaagttacatgtttaataaatcttacatggattaaagaataagggaatttctttcctatttctgctatagagcatatgtttaaaccttgcaatataagcctcgcacatgcttt

SEQ ID NO: 142686 - DNA, 410 bp, Homo sapiens
  misc_feature (1)...(410): n = a,t,c or g
cacaattatggcatttcttcctacagtcctgcttctatcttgagggccattttaaataacccttcatcctacatacccatttatcttgcttcctttttctcccttttgtcccactagtataagagattgcgcttcagtaaactatcctgaggtggagagaaaaaaatcaaaatgtgatcaataataatagtttaacaaagttaagactgcatgcnnnnnnnnnnnnnnnnnnnnnnngttggatgcccaaaagcactctttgtttcctttacaagatgatgactcttcggatatttcctttttccatatgggcaccttggcttttaaagtatcaatggcatatctcacagcttcaagagatgcagctctgtgggctgaggacacaacaatgattatgcttgcttctgacc

SEQ ID NO: 142687 - DNA, 1107 bp, Homo sapiens; identical to SEQ ID NO: 134882

SEQ ID NO: 142688 - DNA, 1338 bp, Homo sapiens
tgattcggtcccgctgtcctaggcgggatggtgccgctgtgccaggttgaagtattgtattttgcaaaaagtgctgaaataacaggagttcgttcagagaccatttctgtgcctcaagaaataaaagcgttgcagctgtggaaggagatagaaactcgacatcctggattggctgatgttagaaatcagataatatttgctgttcgtcaagaatatgtcgagcttggagatcagctcctcgtgcttcagcctggagacgaaattgccgttatcccccccattagtggaggatagtgcttttgagccatctaggaaagatatggatgaagttgaagagaaatctaaagatgttataaactttactgccgagaaactttcagtagatgaagtctcacagttggtgatttctccgctctgtggtgcaatatccccaattggaagggccttacagaaaatacctttgaagggaaaaaagtcattagcttacgaatatgaagcatatctacccatggcggaaaatgaagtcagaaagatttgtagtgacattaggcagaaatggccagtcaaacacatagcagtgttccatagacttggcttggttccagtgtcagaagccaagccataatcatttgctgtgtcctccagcccacagagctgccatctctttgaagctgttgagctattgccctttgatacttttaaaaggccaagggtgcccatatggaaaaaaggaaatatacgaagagtcatcaacttggaaaggaaacaaagagtgcttttgggcatccaacacgttaatcacttatgtttttagagcatgcaatcttaactttgttaaactattattattgatcacattttgatttttttctctccacatcaggatagtttactggaagcacaatctcttatactagtgggacaaaagggagaaaaaggaagcaagataaatgggtatgtaggatgaagggttatttaaaatggaactaaagatagaaggaggactggtaggaagaaatggaataatttaaatgtgaggaaagatatctgtgggtagacatggtccttccatggactaatttctaattgtaactcaacacacattgaggtatgggccctcctcagtgactttaactagctcagaaacggtactcccccaccaaccccacctcaccgccccccatcccggttctgggagagcattgttattaaggatgcatgacaggaatgttggcagaactggaaagtattaaaaaagcattatcagacagtcttgatattatacattttcagaaatatattaaaaataataaactaaaacccatgatttcaaaagtt

SEQ ID NO: 142689 - DNA, 546 bp, Homo sapiens
ctagctctcctccaactgccccagccaaactccgcattgttccgctggttggtggcctgccagcacgctggtgcctgtcggtgtgcgcctctcaatgtcccgatacccgtgtgcatgtctttcttcactggtggtgctcttccttatgtccagcacctgtgtgtctatctttgtgcagagggctatgaggccattttcctccagattctgaggatcaaagcagtcccaattgttcaggatacactttagaggagtataagcttctgcgatcccagacgatccccagttgtaatgggaagtttccttgtcctcctcgcagggcatatgatgggatatgactcgcttcttcagtgccttgctgctccagcctgtgttttccaaaaaatcaaaaccatttccaatactcttgttatgtgttattttattcttatcctttaattgatccaacagctttcctttcagactaaattggcttaattgtaccccagagatgcccacaaaatgctgaattgaatgagcaaggccctcggtctctgatagaggcat

SEQ ID NO: 142690 - DNA, 978 bp, Homo sapiens
atgacggcagagtttgcctggggaagttggaggagagctctggggaaaaccatccccggagagactccaggggacaatccatctcccttatggctcctccatctgctcagagctcttcctccagtgacacttctcagtgaaacccaaaggctggagcagcaaggcactgaagaagcgagtcatatcccatcatatgccctgcgaggaggacaaggaaacttcccattacaactggggatcgtctgggatcgcagaagaatgtgcaaccagttctcttcaccatccccagcttatactcctctaaagtgtatcctgaacaattgggactgctttgatcctcagaatctggaggaaaatggcctcatagccctctgcacaaagaggtctgagcagcggggcattgaagaatcaagtcacacctgcatcacatgccttgcgaggggggacaagggaacttttcccatttcactactaccatgctggctgcagcagggagttgcgactcagcctgtacactccatggagttccctgggcaccactgcagcagtcccaggcctcctggtctatgggccaagctgcagctgcagatccaggcctcctggtctatgggcagccgcccaaactacagctgtgggtccgagcctccctgtgctcttgtggggaaccggaagcaggcaggatctgccctctggggtgcagcttcagctgcccaaccagcagctgcagacctgggcctcccactccatggagcaggcaggagccagggacaatcgggagctctgccccttccaagttgtgacaaaagcccttctgttaacccaaaaccttcagctacagaaacagaagtagctttttcactctgggatgacaagagcaaaaaacaaagagctacaaggtgccaggaaactgaaaaagggaattcagtaggatcaggaaaatggataaatgaaagaactggagaaattcaaggctcataa

SEQ ID NO: 142691 - DNA, 566 bp, Homo sapiens
agctttctggctccctcaaaacaaacaaacaacaacaacaacaacaacaaacagccattgttttgagtccaagtgcttcaaaaggctcctgcttaaagactggtctgtggtaaacatggcggttctttctagcccacatgtggcctaaaactctgtcagctctgtcaggcactagtccccggggagatggcccagcgtccatggggtgcgctccagctgctcggttcccaggaacgttgttatttttggccctggtgttattaagattgtgcccagattccctgcaaatcggccactaagcagcatggggccctagtgaaagcacgcggagaacagagggggcagcgcgcttcgggagactccccggccttggagagctccagcctccccggggggcggaggggccggccagaaggactcctgcgccccacacccgcagcgccgacaaggcgtgcgcctggtctacagcgctccccgactgctcccaacccaggggcacccagggccgaagcttcctctacagagcctccccctccttaggaaacaaaacaaaacaaaacaaaaac

SEQ ID NO: 142692 - DNA, 2773 bp, Homo sapiens
  misc_feature (1)...(2773): n = a,t,c or g
ttagcttttatggatacagagtgagagtatatagacaagactctgccacccagtggtttactggcataattactcatcatgatctcttcacccgcaccatgatcgttatgaatgatcaggtactagaaccacagaatgtcgatccttctatggttcaaatgacctttctagatgatgttgttcactctttgttaaaaggtgaaaatattggcattacatcacgacgcaggtctcgtgccaatcaaaacgtcaacgctgttcacagccattatacacgtgcccaagcaaatagtcccagaccagcaatgaactcccaagctgctgtaccaaaacagaatacacaccagcaacagcaacaaagaagtatccgtccaaataagaggaagggctcagatagcagtataccagatgaagagaagatgaaggaggaaaaatatgattatatatcacgaggagaaaatcctaaaggtaaaaacaaacacttgatgaataaaagaaggaaacctgaggaggatgaaaagaaactaaatatgaaaagacttcgaactgacaatgtttcagacttttctgagagcagtgactcagaaaattcaaataagagaataatagataattcctcagaacagaagccagagaatgaattgaaaaataaaaatacttcaaaaataaatggagaagaaggaaaaccccataataatgagaaggcaggagaagagaccctaaaaaatagccagcctccctgggatcaaatacaggaagataaaaaacatgaagaagcagagaagcggaagtctgttgacactcagcttcaagaagatatgattattcattcgtcagaacagtccacagtttctgatcataattctaatgatttacttcctcaggaatgcaatatggataaaacacataccatggaattgctaccaaaggagaagtttgtatccagaccacccacaccaaaatgtgttattgatattacaaatgacactaatttagaaaaggtggctcaggaaaactcaagtacctttggccttcagacacttcagaaaatggatcctaatgttagtgattcaaaacactctattgcaaatgcaaaattcttggaaacagcaaanaaagattctgaccagagctgggtcagtgatgtagttaaagtggatctaacccaatcaagtgttacaaatgcttcttcaggaaatgatcacttgaacatggaaaaagagaagtatgtctcttacatttctcctttaagtgcagtttctgtcatggaagataagctgcataagcgaagtccacctccagagactataaaatctaaacttaatacttcagtagatactcacaagataaaatccagcccatcacctgaagttgttaaacccaaaataactcattctcctgattctgtaaagtctaaggccacttatgtgaacagccaagctactggtgaaagaagattggcaaataagatagaacatgagctatcaagatgcagttttcatccaattcctactcgaagcagtacattagaaactacaaagagtcctcttatcattgataaaaatgagcattttacagtttacagagatcctgcacttattgggtcagaaacaggagctaatcatatttcacctttcctaagccagcatccttttcctcttcactcctcatctcatagaacctgtttaaatccaggtacccatcatcctgccttaactcctgcaccccatttactagccggatcatctagtcaaactccattacctaccattaacactcatcctctgactagtggtccacaccatgctgttcatcaccctcatttacttcccactgtgttacctggagtgcctactgcctccttacttggtggccacccacgactagagagtgctcatgccagcagcttgagccacttagcgctagcacaccagcaacaacaacagttgttacagcaccagtcacctcatcttcttggacaagcccatccttctgcttcatataatcagcttggactttatccaattatttggcagtatccaaatggaacacatgcatactcaggacttggtttgccttcttctaagtgggttcacccagaaaatgcagttaatgctgaagcttcattaaggaggctggcatactgtgtagtgcagtttttagaaaaggacagcaccctcacggaaccacgattctcctatctcagcctcccaagtagcggtaccttccaccccgtggtgaagatcagagctctcagcctttttgaaagggtaaagggagacagatttacacagtgtcaggaacgaagggcctcggcagcaagagcatctcagagccgaggctttggccacccgttgtctatcaatattgatgctcaggtactgcgatgggacctcccgggcagggcgtactgtgctctctgtgcgcacacctgtgggcgtcagatacaacagcctgagcagtgctgggcctgcgctttttacagtggtgtagagtgcagtgcagctgaaaccaggttagttgatcttatggtgtcatctagaaaaacaagagatgcagattctgggtcacgaaggcacagtgcccacttgttccgtggcacagccccagagctcctgttgaaggaacagactccaggactgactttccacttgattttcggagctcgcacatcccgagagattcatgttcaagctgcattttagacatagctggcaagagtattttcgtggtaaacgtaaacttactattggtaaagattcttattgaggaa

SEQ ID NO: 142693 - DNA, 618 bp, Homo sapiens
atgaattgggtgttacaaaaatttatcactgcatggaagtttatgggctacagaaagtcctccaacagcgcaagaggaagcaccataaaagagcacattgagttggatgcacagagacctgtcaggagaagtgggccaatacaagcatcaggcgctcatcccaagaagggaaggggtgtgagttgctcagtggaagagccaagtgaccagcagagtccgtcaccaccctcccctcttacctttcagcccaaagacggagaaatcaacttttcagtaattggtcagtatgtggattatcttgtgaaagaacagggagtgaagaacatttttggtaagtcaactctggggatgtcgctgcatgtctccagctcagtctttagaaggtatatcttacctggttaccagccaagaggtcacacagtcatggtgtcacaggtaaacattgacttccagacccgagaagccacgaggaagaacctgcaggagccatccctgacttgctttgaccaagcccaaggaaaagtacacagcctcatggagaaagactcttaccccaggttcctgaggtccaaaatgtacttagatctgctgtcccaaagccagaggaggctcagttag

SEQ ID NO: 142694 - DNA, 359 bp, Homo sapiens
gccagggagtgctggggaggggagaagagggaagaagcaggaagagagcagacacagggtggagactcaccagtcctgccaggtggggctttgtctggtccggactgtctctggtacgagagggcacatgcacattctcacgcagctccactctccctggccttcaagcctgctgcccccgagctccttttacagtgccaggtctgagtgtggctgaaagagccatctgcagagcctgctccatgcacatggtcagctctttgtggaagctgcttactggggggactttagaactcagcctttttgtcccacagaccgcatacttctggtggttttttccccctaaattgaaccactcc

SEQ ID NO: 142695 - DNA, 594 bp, Homo sapiens
ctaaccagattcaggtggtgcaagtcccttcacatctggtggggagtcacagccagctggatcagcactgaagtaggccaaagagcaaaactgtggacagaaaggaatgctgaactcctgccagggcagagcacctggaatgtccgtatcttcaaggctacagtcaaggtcattaactgtgactgagcctacagaggatgggctagagggttgcagagagagctcaagttcacaaaagcaataagggtcttgcaggatttggatgtaggggagctccaagcaattccctccctccatgctaggatccacacagcttaagtctgtgtttgagatcttcagcacacttgttggtacttctgtcctccacagtgagtctatttgctcctcgagggccaaaaccttgtcttcagtgtccacatacctatctgagcactgccattgtacatgacctaataggagctcagtggattcaatgatctttttatcattttgctttaattttactctaatgacataaatgtgttgagcaaaatatcgatacgctcttcctctggccgcgtaagatgtgcctgcttctcctttgccttctgccat

SEQ ID NO: 142696 - DNA, 918 bp, Homo sapiens
tcaattaaagatccggttgctgctttccctgcggcactgtgacagggataacagaacagcgttgtcccctgcagttttctcacacctatttatgccgttaggtaggaggcggttttttggcctgtggaggacagaagtaccaacaagtgtgctgaagatctcaaacacagacttaagctgtgtggatcctagcatggagggagggaattgcttggaggtagggtaatcacttacaagaggatagaaggatattcttgtcagcattctgcttccacgccagcctaacttgctcctctgcgccatgaccaccaccactaccttcaagggtgttaaccccaacagcaggaatagctcccgggttttgcggctgctgggtggtggatccaatttttcattgggttttgatgaaccaacagaacaacctgtgagaaagaacaaaatgtcctctagtatctttgggacacctgaagaaaatccaccttcttgggccacattggcaggtgccaagtcagattcaggtggtgcaagtcccttcacatctggtggggagtcacagccagctggatcagcactgaagtaggccaaagagcaaaactgtggacagaaaggaatgctgaactcctgccagggcagagcacctggaatgtccgtatcttcaaggctacagtcaaggtcattaactgtgactgagcctacagaggatgggctagagggttgcagagagagctcaagttcacaaaagcaataagggtcttgcaggatttggatgtaggggagctggcaggactggtgagtctccaccctgtgtctgctctcttcctgcttcttccctcttctcccctccccagcactccctggcttatgcattttgaagtgataagccagtttagaattcccacatctcatttgttcagccat

SEQ ID NO: 142697 - DNA, 435 bp, Homo sapiens; identical to SEQ ID NO: 142524

SEQ ID NO: 142698 - DNA, 6507 bp, Homo sapiens
ctatactaggggttgttttataagcatttctaatggagggtcctgccttgcagctcttttggcttcaatatctgcttggcagttctcttctatttccctttcctttcctttctgatgaccccggcagtgtaagactgccacctctttaggtttctgtacagccaataataatttcctaatggcttcctgatgtttgataggtgttctctcagaagttaggaattccctttctttccatattgctgcatgggcatggaggactaggtaagcatatttagagtctgtatatatatttgcccttttttcttctcctaattctagtgcccaagtgagggctattagttctgctagctgagcactagttcctggagtgaggggattactttcaagtattccattatcactgaccactgcataccccacttttcgaagtcctttttctacaaaggaacttccatcagtatacaagttgaggtcgggatcagtcaaaggaacctctaaaaggtcccctcgagtggcataggtttgagaaattacttgttgacagttatgttttatcttttcttcattgtctggaagaaatgtggctgggttaagagttgcacaagtgcacagtcgcagcactggcccttcaagtaatagagcctgacatttaagtaaacagttgtctgacagccacaagtctcctttagcagtgagtatgccattcacatcatgagatgtccacacagtaagatctcttccctgtattattttaactgcttcagatactaagactgctactgccaccacctttgccactacatcaatttccttagtcaggtatgccacaggttgcaagctcatccctcggatctgtgtaaggactcctagagctattcctgttttttctgtgacatatgaagaaaagtcttgccctgttggcaaacttaacactggggcttgggttagggcctggaaagccacttctacttcagttgtccatcttactaaatgggtattggctttctgagtttccttaattagtgtatttaatgacctggctatttcgccatacctgggaatccattttcggcagaaacctattacgccaaggaatccccttagttgctttagggttttgggatgaggataagccagtataggctggatgtgttcctcactgagggccctggtgcctttggataattttagccctaagtaacctgctgtgagcagagttgagcctttggtttggaaaccatgtagccacaggtagcgaggaaattgaagagcgcttgggtggcttgatggcacaaggtttctccactgtctgttgggtttctgtactcctaaaattggagtactgcaggggttactgcatggttttactaggccttgggcttttaggtccttaacaatcttttggagtccttgttgggccttgggtctgagggggtactgcctttggtagggaaaggaggtggaatcctttagtttaacttgaacaggacgggcattctttgctcgtccatattgtccttctgttgcccagacttcaggattaattccttcctcaagcaggggacaacaaacgggtgttccttctcctatgttcaggtgtataatggcccctgcttttgctagaatgtctctcccagcgtgcccaacattgcctttgtgctcaggggtgagttcctttccagggtgcgtaaccacccatggacctctgtttatcggattagttatgcttaccgatgtagcagtcctgcaccccttttcccgcctttcttgaccacaaagaaaggggtctgggctgctggattctagtggtcctttaccagcatgcccaacattgcctttgcgctcaggggtgagtcctagagctgggctgggttccttttgaatcaggattgagatagtcttttgattctgtaagtactttaaggcttggctgagtgcaaacagctcacacgtttgaggagaccagttattaggcaatttttctaactctgcttccacaagagtccccgtatcaattactgaatacccattgtggtttttttcctcaatcacctgggaggaaccatctatcgtcctgtcctgagtcttaagtccggtggccacactaatcgtttttaactggccgacaagtgcccggtattttcctccaattttagccgtgcaggaacaatggcaagcctttagcccaattgggagcggcaatgggcgcctcgctggatcaggagcacagcggacacccttatcagcataagcatttcctagagtaatgggatctgacgccttttggtggcccttgcagtgtgtgactccagcttcctttggaagtaaagcagccttgagaagagtttttattaaagaggcattaatgatggaggacccttgcgtagtgaggaaacctctttcagcccatataacagcatggtggtgcaagatatggaaggcatatttagagtcagtataaatattgacgtgtagtccctttgcaagagtgaaggcccgagttaaggcaatcagttcggcttgctgagaggtagtggaggggggcagagcagtagcctcaatgatggatgtggaagattctatagcatagcctgcctttgctggtgagtggcgatcaggcctggtggaactgccgtcagtaaaccaaatgtgatcaacatgaggaacagaaaagaaggaaatatggggaaatggggtgaatgtcaggtagatcagagacatacaatcatcagggtcaggtgtggtatccagaataatgtgggaggccagattgaagtctgggccaggaagaatggtaattgtgggagactcaacaaagagtgaatacagctgaaggagccggggagcagaaagtatatgcgtcaggtgtgagaaagaaaatagattttggaagttgtgagagctgtagagagtgagttgagcatagtttgtgattttgagggcctctaaaagtattagggcagcggaagctaccgcatggagacatgatggcgagcctaaaacagtaaggtcaagttgtttggacaaaaaggctacagggcatggtcccggtccttgtgtaagaattccgactgcacagccctgcacttcggctgtgtgtaatgaaaagggttgggatgagacagggagagctagtgtgggagcagtctctaaagctgtcttgactatgcctttagctccagccacctctttaagaggaaattgttgggcagatgggggagggctagtcacagaacgaaactgtaagccggactgagtgtgaggagaggaggtgataaaaggattatagggtgggggagcagaggctgaggaagaattgggacctggctcggcctggtgaggagcagctttatggtgaaaagagggcaggtatgtcagctcagtgatttcatcaaagaatttctgtccaggtcgaaacattgttccactttgattttttctcctctttggattttgaaagctttcatatagctcagcaaaattcttccagtcatcttcactaatggatggtcttgtgtgaccaagtgcagtcattaaatgtgactgactaatagccagtctggttttgattggtcctggttggttcatggattcgtcctccaaatcagaagaggttccatttccaagttctgattcataagagcttccaaagtagagccggtacatattgaattttgattcatctggaaggatctcggacatctctaaagaaacaagggactgatctaagccacattctccatctccagctgaatcgtcagagccactgctatggttaagaaagaccattgaagacagacttaggtcactatcagagctggaacttccatcctgatcaggaggaggacagtatacacatttatctagtcgaccaggcctaagcagggcagggtcaatcaagtcagggcgactagtagcagccaatacataaacaccctgtaagccttctactccatccaactgagtcagcaactggttaactactcggtctgtaactcctgtattatcatgaccccgccgaggagcaatggattcaaattcatcaaagaaaagaatgcagggctttgcagcctgtgctctaataaaaatatcccgaacagcttgttcacttgctccaatgtatttgctgagtaactctggccccttgacacttataaaattcattctactctctcgtgcaattaccccagctagtaaggtttttcctgttccaggcggaccatacaacagtattcctgttctttgtcgtatgggcaagtttgcaaataattctggatacttggcaggtaactggatagtatccatgagtatctgcctaacttcatgtaacccaccaatcttgtcccaacccaggtctctaggtttatgcaggttgacacttcgcaaagacgcaggaagaaatccgcggagagccttttggaagtccaatgttgttaaaactaatttttctctggtggatatactctgacgagagagtcgagaatgtatggctcgatccacaagtactgtaaaatctctagccacaaacccgccagtttctttagctacatgctgcaggtcaagatcggtgaacttgtttatatcacagtccaatttattttttattacattacacagaatttcacatctttgttcctgattaggaggctgaatgtgttggacgcactgaaatatgtgaactccttgagcagaaacaagtaaaggatgtagagattgctgagactgacttgtggcaatcagtgcaaccaaacttcccatggagataaactcttttatcatatcattcaaagcatgagcaagccgctggctctgcaccgcatcaggactgtgctcatgttccgggacagcaggcagtccagcaatgaggtcaaggtcatccagcaggacaacagatggctgcatccacactgcctctgagaaagccacctctagggttttttgtatgttttcaagcctttttcctcgtaaagctttacagtcaactctctccacatgggcatccagtttgtcaaatgcttctttacagattgctttggctaaagttgattttccacttccctttcctcctgtgagtaaaagagctccattcctaagtcctgcaacaagagacatcagctgccgagacaaagggcgtcccaggaggctgtgagtgatgtgctccaaggaggatacgcctaaggaattcactccttgttttcttcttttaccataggatctagaaggaccatctttagtttccagcttaataaattcttcctctgatattaccaaaggaagcatggtggtagtagactgctgtagccatgaataaaatacagtttttatgtcttcttcacttatgtctttaggccagactttcccaagatggagaacttctacatttttggtatatttgatggcattgttcaattcttcaagtccattccagactacttgtagcacacaggccttctcatcttcttcattatgatctgacctaatttttttttgatctagtggctctgacatctgcttctctttttcaggtgataacacattttgttttgttttactttgctgttgctttggagaaagtagcttaactagctttccatatgtcacagtaaagctgggctctacatcaaaatattcctggtcccatggaaatacatgaatggcacagtgtttatgaaaaacagaggttgctgacgcgttatatatactaggaggttgagatttgcatactctgaaaatattgtctagaggaacaacctttgactgcatatttttgaatgcattgatttcagttaaaccccaagatgtctcttgtttcttctcagattgaaaggaaaaaatgcttcctatcatagtccataaacttgctactgatgatgagtcaactggaatctctgactcgttttcattagattcagtgattcccacagtatttgactgaagttgcttggtttgaagttctttcatcattcctttctggtctcttccataactatgaagttttttatattcagcatcagcttttgaaaatgtattctctttggctcggcgtgtctttggctgaataaggagtttggtgtcagtttccagccttccataagaggcagctggtattagtgcaacaatttggataaatatgtacgtttgttgatcaacccaaacaggaaaaatggcttttggaaaaactattcgaatttgatctagaagatgttgttcaagggaaacagcatgcagctcctgtcccccatttgagagtccaagtttttgaccaacttgtctgttaatttcagccacattttcaccttgatcactaaaatgcctgccttccacccagctcaagaatgcaggctggtgactccagaccacttctatagcttgattctgcagcagatgcagctgggccacgagacgccgcggcaggtggaggaagcagtcgcgagcgttggtgaaggccacagtcactgccgccccgcctcccccagcacccgccaggcgatcgctgccccacat

SEQ ID NO: 142699 - DNA, 1929 bp, Homo sapiens; identical to SEQ ID NO: 121630

SEQ ID NO: 142700 - DNA, 398 bp, Homo sapiens
ttaactgcttcctgctgaattggggcatagtaggggtcgtgcagttgagatttcctcgtgaggggtgccttcaatgtcatcaacatcaaagcatgggctagtgggccggtccaggggtccgcagtagatcttagtcatggactgcatctggggctccatttgaagaacgatttgtagttttacagcttcaattctggaatagacaaaccagagatcgccaaactctcgggctgcagttttggcggcacttttctcatttggggttagtgactgatctagcagtaacattatatctctccatgtcagatcaaaggattgtcttaacccttgtaaaacatcaatatagccatcagggttatctgagaatttacctaggtctattttaattttcctcaagt

SEQ ID NO: 142701 - DNA, 309 bp, Homo sapiens
gaacccagcccaactctagaactcacccctgagcgcaaaggcaatgtcgggtatgctggtaaaggaccactagaatccagcagccccaacccctttctctgtggtcaagagaggcaggaaaagaggtgcaggactgctacatcaaatagaagctgtgaagctgtaaaactacaaattgttcttcaaatagagccccagatgcagttcatgactaagatctaccacggacccctggaccagcctgctagcacatgctatgatgttgatgacaccgaaggcacccctcctgaggaaatctcaactgcatga

SEQ ID NO: 142702 - DNA, 1088 bp, Homo sapiens
acaatgaagaacagatagaacataactgtcaacaagtaattgctcaaacctacgccactcgaggggaccttctagaggttcccttgactgatcccaacctcagcttgtatactgatggaagttcttttgtagaaaaaggacttcaaaaaggggggtatgcagtggtcagtgataatggaatacttgaaagaaatcccctcactccaggaactagtgctcagctggtggaactaatagccctccctcgggcactagaattaggagaaggaaaaaggggctcatcagaatctatatgcttcctctcattcttagtgccccctatgaccatctacactgaacaggatttatacaatcatgtcgtacctaagccccgcaacaaaagagtacccattcttacttttgttgtgggagcaggagggttaggcggattaggtactggcattggcggtatcacaacctctactcagttctactacaaactatctcaagaactaaatggtgacatggaatgggttgctgactccctagtcaccttgcaagatcaacttaactccctagtagcagtagttcttcaaaatcgaagagctttagacttgctaaccgccaaaagagggggaacctgtctatttttaggggaagaatgctgttattatgttaatcaatccggaatcgtcacagagaaagttaaagaaattagagatcaaatacaacgcagagcagaggagcttcaaaacaccggaccctggggccttgtcagccaatggatgccctggattctccccttcttaggacctctagcagctataatattgttattcctctttggaccctgtatctttaacctccttgttaagtttgtctcttccaaaattgaagctgtaaagctacaaatcattcttcaaatggagccccagatgcagtccatgactaaatctaccacggacccctggaccagcctgctagcccatgctctgatgttaatgacatcaaaggcacccctcctgaggaaatctcaactgcacaacacctactatgccccaattcagcaggaagcagttagagcggtcatcagccaacctccccaatag

SEQ ID NO: 142703 - DNA, 296 bp, Homo sapiens
gttcagatattctagttgaattggagttggtgggctagtacaccttctgtgcaacctgacggtggccgacctcttctacatctgctcgctgcccttctggctgcagtacgtgctgcagcacgacaactggtctcacggcgacctgtcctgccaggtgtgcggcatcctcctgtacgagaacatctacatcagcgtcggctctcctctgctgcatctccgtggaccgctacctggcagcgtgccatcaactactaccgcttcctggtgggcttcctcttccccatctgccgaattcc

SEQ ID NO: 142704 - DNA, 470 bp, Homo sapiens; identical to SEQ ID NO: 122632

SEQ ID NO: 142705 - DNA, 1926 bp, Homo sapiens; identical to SEQ ID NO: 122143

SEQ ID NO: 142706 - DNA, 333 bp, Homo sapiens; identical to SEQ ID NO: 127246

SEQ ID NO: 142707 - DNA, 633 bp, Homo sapiens
atgcccacttactgcccgggggcttccttgctgatactgacatataagaccccaaaggagctgctgagcatttatgtgagtacaatccggaagtccagatgcagggagaggaggaacagaagactgggagctagaaatttccgctctgaagaacaaatctatgaccaatggaggctagatcaagtgggtaaatttttcccctttcctagacctagagagaattaccactttggtagtgaacatgtgggatctttttcacttgataaatgttgcaacgagaaactgtatgaagtcattgacttgcatttgaaaaagaaatttttaaacactgaaacactgagtttggtgaaatgtgaagtttcaagatgctgggtaactctgaatttgcttctcccatatcacgcttattccaaatttaactctcttggagggaacggcagaatcaaagctgtaaaactacgaatggttcttcaaatggagccccagatgcagtccacaactaaaatctactgtggtcccttggaccggcctgctagcccatgctccgatgttgatgacatcgaagtcacccctcctgaggaaatctcaactgcacaacccctgctacaccccaattcagcaggaagcagttag

SEQ ID NO: 142708 - DNA, 1368 bp, Homo sapiens
tcagtaggaggcttcccttttctctaatatgcatggcaaaacactggctccctgctttgcctgaaaatggctatatgaagcagttctgtgtctctggtctgggtgttttgtttcatggctgtgtttttctctgctggcatcactgttgttttgtactctaggtttggagcctaggaagtccaaggtcaaggggcctgcatctggtaaaggccttctttctgtgttatccccgctccaactgcttcctgctgaattggggcatagtaggggtggtgcagttgagatttcctcaggagggttgcctttggtgtcattaacatcagagcatgggctagcaggccagtccaggggtccatggtagatcttagtcatggactgcctctggggatccatttgaagaacgatgtgtagttttacagctttgattctgggaatccatattcggcagaagcctggtatgccaaagaaccctcttagttgctttagggttttgggatgaggataagccagtatgggctggatacgttcctcactgagggccctggtgcctttggataattttagccctaagtatttagcctgttctgagcagagttgagctttggtttggaaacctttgtcccctggggcagtgggccttccattgattcctttgacataaggggcatggatgagggggtggcttatttgtatttggacaatctttttaaagtgtccttgtagaccacactggaagcaagccctattaggcattggatttgcccagcctttccgtgttccagagcctccaaagtctgcttgcctgagggccataactaaagcggtagccttttttaaatcccgtttgtcttgttctgcctgcttctccttatctctattatgaaaaaccaaggttgccaagttcaatagggtttctaagtttttgaagttttttctgatgtctgtagctgactgagtgataaacttatcctttaagattagttggccttcaatagagtcaggtgacagagaggtatgctttctcaaggcctcccttagtctctccagaaaggcggtaggattttcttccttaccctgtgttatagtggacatcattgaataattcatgggctttttcctagttttccttagtccttctagcatgcaagttagcaaatgtctgcggcaccaatctccgtgttttgattctgtgtcccagtgagggtgtacactgggaacttcctgctggcctgtgggcaatcgttctctttcctctgttgtcatcctgtcattgacctgactgagataccagagatcgccaaactctcgggctgcagttatggtggcacttctctcatttggggttagtgtctgatttagcagtaacat

SEQ ID NO: 142709 - DNA, 714 bp, Homo sapiens; identical to SEQ ID NO: 137325

SEQ ID NO: 142710 - DNA, 492 bp, Homo sapiens
atggtggcaagcctcgtgttctctgacctggggttcttggcctcacagattccaaggaatggaatcttgggccatgtggatgaacccaggcacgtagctgtgcaggaacaacggcaagcctttagcccgatcgggagcggcaatgggcaccttgctggatcaggagcccagtggacatcctgctggatccagagggatggaagtcagcggcaggaaccagatgtttctaacacagacaaatcctctgtcctcgagagctcacggcaagtggtgaagacaagctacacaaacccctgggaagaaaacatcatggaaaaggctgccaaagatcctgtaagctgccatgggagcaaaggaagactctgttcggcccacctgggagccttcgacagagaaaatacacagcagctgctatccatcgtcatcaccagtgtcatcatcgccatccccatcatcaccaccaacaccgccacccccccagcgacacactag

SEQ ID NO: 142711 - DNA, 1080 bp, Homo sapiens
acagctttagagactgctcccacactagctctccctgtctcatcccaacccttttcattacacacagccgaagtgcagggctgtgcagtcggaattcttacacaaggaccgggaccatgccctgtagcctttttgtccaaacaacttgaccttactgttttaggctcgccatcatgtctccatgcggtagcttccgctgccctaatacttttagaggccctcaaaatcacaaactatgctcaactcactctctacagctctcacaacttccaaaatctattttctttctcacacctgacgcatatactttctgctccccggctccttcagctgtattcactctttgttgagtctcccacaattaccattcttcctggcccagacttcaatctggcctcccacattattctggataccacacctgaccctgatgattgtatgtctctgatctacctgacattcaccccatttccccatatttccttcttttctgttcctcatgttgatcacatttggtttactgacggcagttccaccaggcctgatcgccactcaccagcaaaggcaggctatgctatagaatcttccacatccatcattgaggctactgctctgcccccctccactacctctcagcaagccgaactgattgccttaactcgggccttcactcttgcaaagggactacacgtcaatatttatactgactctaaatatgccttccatatcttgcaccaccatgctgttatatgggctgaaagaggtttcctcactacgcaagggtcctccatcattaatgcctctttaataaaaactcttctcaaggctgctttacttccaaaggaagctggagtcacacactgcaagggccaccaaaaggcgtcagatcccattactctaggaaatgcttatgctgataagggtgtccgctgtgctcctgatccagcgaggcgcccattgccgctcccaattgggctaaaggcttgccattgttcctgcacggctaaaattggaggaaaataccgggcacttgtcggccagttaaaaacgattagtgtggccaccggacttaagactcag

SEQ ID NO: 142712 - DNA, 5229 bp, Homo sapiens
tcagatcagaaatttgtctccgacgtaaaggatagccataatgtgatagggaattcccagaagatgctgatgctgctggtccagaaaccacactttaaacaccattgtgtttggaggaaggtgagcaaggtggaggctaggttgaaaatgtttaacatctgccatgcctgaagcaccagtgacggtggggctcactactcctgtcatgcctgcatttccagatgttgagatgatgggaactgaagtttcagtaatgcctgtagtaaaaggttcggtgagaggacctagagttgttcctgtgcttgggccaccggtaaccagtgtaattgctgctccggtgcttaatatggtggtagctgttgtagtggaaacttctaaaagtgaagaaaatttctggccaacgagctgatctttgcatgtttttgcagtcactgtgccacaaggttcataatgccatctgcattccccaggcgcattgtagtaatcacagtagacaggacacagatttggttttctccatgagacacagactccaactgcactacacgcctctgcgtacatagccacggcagtgcagaatcccaggtacttcccctccatgtcacatgcacaggcttcttcaatgcacacatcatggtaagcactggggtcaaccttgttgtggcagtctctgaaggtgctgtctctgaggatctcacatttccgcacagcccaggctttacagtatgggtttgaatcacatgggaaagtctgagccactgtatctgaacattcttggcttgttttccaactattcccaaattccagtgctccagaagctactgaagagtatcttgttgtgaaatcatccttgagatcaccattgttatttccacaaagaccacacactttgccctcaagaaatgaatactggcagagaccgtcaaaactgtaactcttcccatcaaaagttctaacatgaccttccccatagatgtggcagatggtttgacattcattttgggtacaactccaagaccctttaatgcaggtacatttattgtcatcaatatggatgagtttgcctggttgcatgacctcgtcgtttatgtaacagtcacactgagatttcagtacacagtttccttcattattctggtacattgcatcagggcaggtgcatccatcaactggaacatcttctacatcacagctcctatctctttctgacaaggatcggcaagaactattacaggcttttacattgtacttgaacactaggccacttgggcaagaatgttcacataggccagttctccatcccactatgtatgtttccttctcagcacacgctttcacatagttgcctaaaattgtacataggcagtcctgactgttttcacaagtgcaagtatattttttgcattcctcatgatagggtttagggttcacaattgggtggcaggaagccaaaggcccacttgaatcaagaagaattccacagtgcctttcagcaaatttttctttttctatactaatacatgaagaggggtttcctttaggacaggacatcatttcccaagagttagcaaatgcctgagatgtcttctccaatatattctgacttgacatgaaatcatcctctgctttgttgttgtaggaaccacagagtcccacagtgtctgtgaattggttgggtggcatagaaacatacaattgcatcacaggaacaatttgtatttgtagtttcacatgaaagtatgtttctacttgaaggtatgaggaagatgcattgaatatctgtattttatctgaatagtaataaccttgatttctaatcttgtcatttgtgactgttccatcactgttgaatacgtatttgtcaactggaacagagtgaacggccaggaagtggcagtttccaggaaagttgtacttaacaccatcaaaggtggtaagggaacttccttccaccttacatcttccagggcataatgcttcggtgcaagaccactttgcatcttggcatgtgcactgagaaccacaaggaccttctcggacttctcctggctgatacactgttccactggattcacagggacattcagcttttaatacacattttcctttctctccaatgtcatccaacagataaccttctgggcaggtgcagccgctcacacattcactgtcttgaaaaggagccacattagaacaagttgcagggttggagggtccacattctttgtagatatgttgttctggacatctttgtgttccacaaaccacatcggagtcgcttcgccaggattcaaaggtgccaggaccatctgaggcacagaggcgggacagttctgaataagtgtcacatgtagatgttttgtctctagtttggcagtattcatcaatgcagatcattttgtagtcattggatagagcagcaacctttccacatttctcaaagtaggttccaataattttgttacagtgctgtattccatcttcacaaacttcatagcttttaccaacagcattgggacaatcaccaggaattttactattggcaatgtgctcattaatatcttgccctgaaccactaaggccagtttcaccaaattcatttagtccagaagcaccaacaccaagttcatctgcactcttacctcctccaccacttccagaatcagaagaccaagtgtttcctcctgagtcactgacatcagatccaggactcaagtttccagcctcatcagggtcactgcttctctttctattcccaccagttctactgagttcaacttcatgttgatcagatgaccccaatatgactcctgaatcttcagagatgccactagaattttcaaacccatttcttgcacttgaatcacctaaatcactagaactagattctctagtaacttttattccattttcactaagctcattaccaccaaatttccttgaaccagaatacttaaaatcaaatccagctccaactttttttcctccaagtccaaattcaagagactcaagcattcccactgagctacttgaatcagatccaaaacctttgaatccagcctcagcagatacactgccactcattccattccctccaatttcattgattccaaatccctcttgaccagaatcccataaattggatatcgaatttagagagccaccaccaacaaattgattctcacttctgaaactggtatcacctagatcaatggaaacagatcctccagaactactcgtttgatttccttcaactgttttgctactaatgccagtgtcaccaaatgaattcgaatcagaaacttcaaaaccaaatgcagcatcacctttccctgctccaagtttcaaaccagaagaaccagttccaactgcatcaggtccaaagactatggtttcacccccagcagatccactgcctctagtttctctcccatcagctttactgacttccaatcccttttcatcagatatcccccaaccaaatcccacatccagagaggcaccactgctactaaagccagcaccatatcttgtgttggtgctatctgctgggctgtcttctgaccttgaattcccagcatcccagcgttctctggacttgtcttcatcctctcctgtagcaccaaattcaaagctaaagagtggcttttttttgtctgagtcaccagaggatgaactaccataaaaaaagccacctggtggggtgtcttctgactttgaacctccagcatcctgactgtctccggacttgtcttcagcctttcctggagcaccaagtcctaagctaaagaatggctttgtcctgtctgagtcaccggaggatgaactactgttaaaaaagccacctgctggggtgtcttctgactttggactcccagcatcctgacgttgtctggacttgtcttcagtctctcctggagaaccaaattccaagctaaagagtggcttttttctgtccaagtcaccagaggatgaactaccataagagaagccacctgatctgcttgctgctattttaccatctttgaagaagcaccaaagtgccacaaccaagtaccataagatcaacttcatggttgtgatttgggaccctgaatggacccttaagacagctaggcaattatattttctagtccatttgctgtcatattcttctatttcatatcttctctcctctccaacatccaacacctctttcccatcatccctttctgttaataacattatttccagttttacttcgatgtcatcaacattggagcgtgggctagcaggctggtccaggggtccacagtagatcttagtcatgggctgcatctggggctccatttgaagaacaatttgtagttttacagctttgattcctgcttttcgaagtcttttttctacaaaggaacttccatcaatatacaagttgaggtcaggatcagtcaaaggaacctctagaaggtttcctcgagcggcataggtttgagcaatcacccgcctgctcggcttggcggggagcgggatgtcgctgggggcgatgccagacgggccgcctctgatagcctctaggctctggcgcgcttccccgcccctcccgcgcaggcgggcgtgggatcccggctgatccagtccgggttttgcggcggagcgggcgggctgcgcgtgcggcggcttcaactgtcgcggtaggcagcagcaggctgaagggatcatggtgcagtacgagctgtgggccgcgctgcctggcgcctccggggtcgccctggcctgctgcttcgtggcggcggccgtggccctgcgctggtccgggcgccggacggcgcggggcgcggtggtccgggcgcgacagaggcagcgagcgggcctggagaacatggacagggcggcgcagcgcttccggctccaggtgaggcaacagccagtctgaagcaacgctagtgtctttcccccaggagctgcacataggtcaagcacgatgtccccaggatgatcccaggcagcaaagttattgaccagtgcaccatacttctgctctgagaggagactgacacggattgatggccaaagatctccaaactgcacactgtaagtcatgtcaaaattctgcaaagccagtcgaacagcagggaatttgggctctgtggcagcccatttcttcttatatcgatgtctccgcgggaccgtcgcgaggtccacacgcttcagcagctcccggacacccctcagtgtcagcgcagccat

SEQ ID NO: 142713 - DNA, 2300 bp, Homo sapiens
tgttatttatttatttatttatttatttatttatttatttatttatagagacaagggcttgccatgttacccaggctggtcttgaactcttgagctcgagcgatccccacctcccaaagtgctgggcttacaggtgtaagccatcatgtccagccgttcagatattctagttgaattggagttggtgggctagtacaccttctaaattaaatgagtaaaggatttagaatggtgcctgacacacagtaggtgctacattcatgttagctactattataaacctttcctgcctctgactttcagggtcttgcccaccaccagcgatgcccagcccttggtagagcttgaaccaccttctataaacaggatggcggtggagagacaggcccagtccctgagcccatgaggagtgtggccccttcaggcccaaagatggtgaacatcactgcagacaactcctcgatgagctgtaccatcgaccataccatccaccagacgctggccccggtggtctatgttaccgtgctggtggtgggcttcccggccaactgcctgtccctctacttcggctacctgcagatcaaggcccggaacgagctgggcgtgtacctgtgcaacctgacggtggccgacctcttctacatctgctcgctgcccttctggctgcagtacgtgctgcagcacgacaactggtctcacggcgacctgtcctgccaggtgtgcggcatcctcctgtacgagaacatctacatcagcgtgggcttcctctgctgcatctccgtggaccgctacctggctgtggcccatcccttccgcttccaccagttccggaccctgaaggcggccgtccgcgtcacggtggtcatctgggccaaggagctgctgaccagcatctacttcctgatgcacgaggaggtcatcgaggacgagaaccagcaccgcgtgtgctttgagcactaccccatccaggcatggcagcgcgccatcaactactaccgcttcctggtgggcttcctcttccccatctgcctgctgctggcgtcctaccagggcatcctgcgcgccgtgcgccggagccacggcacccagaagagccgcaaggaccagatccagcggctggtgctcagcaccgtggtcatcttcctggcctgcttcctgccctaccacgtgttgctgctggtgcgcagcgtctgggaggccagctgcgacttcgccaagggcgttttcaacgcctaccacttctccctcctgctcaccagcttcaactgcgtcgccgaccccgtgctctactgcttcgtcagcgagaccacccaccgggacctggcccgcctccgcggggcctgcctggccttcctcacctgctccaggaccggccgggccagggaggcctacccgctgggtgcccccgaggcctccgggaaaagcggggcccagggtgaggagcccgagctgttgaccaagctccacccggccttccagacccctaactcgccagggtcgggcgggttccccacgggcagaatcaaagctgtaaaactacaaatagttcttcaaatggagccccagatgcagtccatgactaagatctaccatggacccctggaccggcctgctagcccacatgctccgatgttaatgacatcgaaggcacccgtctcgaggaaatctcaactgcacaacccctactacaccccaattcagcaggaagcagttagagcggtcgtcagccaacctccccagcagcacttgggttttcctgttgagagcggggactgagagacaggactagctggatttcctaggctgactaagaatccctaagcctagctgggaaaggtgatcacacctgcctttaaacacggggcttgtaactcagctcacacccaaccaatcaggtagtaaagagggctcactaaaatgctaattaggcaaaaacaggaggtaaagaaatagccaaccatctattgcctgagagcacagtgggagggacaatgattaggatataaacccaggcattcgagccagcaacagctaccctctttgggtcccctccctttgtatgggagctctgttttcactctattaaatcttgcaactgcactctcttctggtccgtgtttgttacggattgagctgagcttttgcttattgtccaccattgttctttgccgctgttgcagacctgccactgacttccatccctctggatcaagcagggtgtccgctgtgctcctgatccagcgaggcgcccattgccgctcccgatcgggctaaaggcttgccattgttcctgcacggct

SEQ ID NO: 142714 - DNA, 1197 bp, Homo sapiens
atggagcttgcatatgtggagcagaaggactttgcgcatctcggcctggagcccatcaccttgctgcagcagaccacctcgggcctggcccacctccactccctcaacatcggtgagaggctacactttaccaggaaaacggcccgggccttcgaggacatctacattgagcagcggcgagtcattcgcaccatcctagaatatgccgacaaggtcttcacaaacatcttcatcatggagatgctgctcaaatgggtggcctacggctttaaggtgtacttcaccaacgcctggtgctggctcgacttcctcatcgtggatttctctcctgatcccctgcctggatctggcatttggcccacatggaaggtgggagcagacccaggctctgagaaagtgtcgccctcctcctcggtgggcatctccaggtcggactcctcggaggcgataagcacctgtatggtcagcttgcaatgccagcttggacactcgccaaggaagaagggagccccgagcaagaccgccacgggagacaccggcatctcgacggccatggaagaagacgtcattgcacgtgaattgatagagaagatgattgcgatggatcctcagaaacgcccctcagcgaagcacgtgctcaaacacccgttcttctggagcctagagaagcagctccagttcttccagggatttgcgtatttggaaccacatcaaacgtatttcgcctgcggggcaaacagcgtggccgctggtggcaatctctcagggccagccggctgtacaagaagcatggcattagcatttgcctctgatgagggcttctggctgcttccactagtggcagaaggcaaaggggaaccggagtgtacagagctcacagggcgagagaagcagcgagaggggagaaggtgccaggctctttttaagaaccatctctcacaggaattaataggggattttgccgatttcggaaccaccatcaaacaggattttcgcctgctggggcaaaccagcgtggaccgcttgctgcaactctctcagggccaggcggtgaagggcaatcagctgttgcccgtctcactggtgaaaagaaaaaccaccctggcgcccaatacgcaaaccgcctctccccgcgcgttggccgattcattaatgcagctggcacgacaggtttcccgactggaaagcgggcagtga

SEQ ID NO: 142715 - DNA, 821 bp, Homo sapiens
atggcaccagcatctgcttctggagaggcctcagggagcttacaattatggaggaaggtgaaggaggaacaggtatttcacgtggtggagcaggagcaagagagttgccgggggttggcgggggccacactttacaacaaccagatctcgacgagcacccctccagctgtcccctgcaagtccaggagcctggccacgggtcagaatggcttccttgtgggagcagtccctctgcctaggaagagtgaggactgccctcatgaggaaagctgcgaaggaagcgtgaaggaaaagcgacggaccccccggaaaacaaaggtgaagaaaggaaccgcgcggtcaaataggaaaaaagacctaggatatgctacagctatcagtccctgtcttaagcgggcagcattagaagcagagctcttactctgcccagtaatgcagaatcggcaaggcaatcaggtgtatgtttataaaaagataagaaaaaaggcattaggagccgaaagccgtgcagccgagcaagcagtaaataaaaagaaaggctcggcagcccggaagttcacagaaacagagccagcacaggcaaaaggcagcgcttttacaagtgtaaaacagctaccgcccagggacccgccggctcagctctttagctctgcaggtgacccaaggcaagtgctccttgtttacaagcgacatcccagattataattctctgctaaaatttaactaaaatgcaagaatttgaaaaacctcttttctgataatggccactggtgctctctctctcctacccctgacggagctctccaaatccaatttaagtt

SEQ ID NO: 142716 - DNA, 373 bp, Homo sapiens
aaatgttaaaccaaaagaatatatgaagggcatataatgaagggatatctacaaagttgtgacagggctaatgggaagaacaggggatatgaggcagcccaagatcagcaacagtagtgatccagtgtcaccctgtgctggttatgaagatttagtctcttctatcttttccaataccgctttgctagccacctccccaaaccctaccaatagaaagcactggaggaagactagagggctggaaggatgtgaaaagatttcccactttgtttgttgacatcctcacagaatgggttcttcaacctggcagtggcagttgaatccagtaacagcagttggcttcagtttggagatcttccatgctcctaaaatc

SEQ ID NO: 142717 - DNA, 1505 bp, Homo sapiens
gtgtgtttgcttgcgttgaggggagcaggaccataggccctagaggcccccagctgccttctgagactgggcgaaaccctcggcagcgcgcagggggcgctagggcgcgaggggcgggcactgacgggcaccaatcacggcgcagtcccaccctataaataggctgcgttggggcctttttttcgcatcctgcttcgtcaggtttataccactttatttggtgtgctgtgttagtcaccatgtctgaaacagtgcctcccgcccccgccgcttctgctgctcctgagaaacctttagctggcaagaaggcaaagaaacctgctaaggctgcagcagcctccaagaaaaaacccgctggcccttccgtgtcagagctgatcgtgcaggctgcttcctcctctaaggagcgtggtggtgtgtcgttggcagctcttaaaaaggcgctggcggccgcaggctacgacgtggagaagaacaacagccgcattaagctgggcattaagagcctggtaagcaagggaacgttggtgcagataaagggtaccggagcctcgggttccttcaagctcaacaagaaggcgtcctccgtggaaaccaagcccggcgcctcaaagctcaaaaaggccacgggggctagcaaaaagagcgtcaagactccgaaaaaggctaaaaagcctgcggcaacaaggaaatcctccaagaatccaaaaaaacccaaaactgtaaagcccaagaaagtagctaaaagccctgctaaagctaaggctgtaaaacccaaggcggccaaggctagggtgacgaagccaaagactgccaaacccaagaaagcggcacccaagaaaaaattgtttggtgctgaacagaataccagagaccaaataatttataaagaatacagatttatttcttacaattctggtggctataaagcctatggtcgaggggcccacctctggcaagggccttcttactgttatggcagatgtagagctgatactgtgtggctcaaagttcctattataaatcacattgttgactgtgtggtggtcaaaacctccagttataagaggactgaaaatggaagagtggacaaacgtatcagagatagtaatgacagaaagcaactaccacctccaggtttaggagaacaaggaaaagattctttgaagagatccccagaactgggacctctgaggagtgtatgctggaccactgatgatgatatgtctgtagatagaggcatgatgaggctgattttaggagcatggaagatctccaaactgaagccaactgctgttactggattcaactgccactgccaggttgaagaacccattctctccaccaacaaatcagaactttttctaactgcacctagtgcacctagagtctactccagaatgctcatggagaaagtttctgaaagaagatggacagtgaaagatgctcagttcctaaggaggggcatatccaatgtcctcttcaaatgtggccaaaaggaataa

SEQ ID NO: 142718 - DNA, 552 bp, Homo sapiens
cgtgcccgttcagaagcccgcgcggctggtccccagcccgaccggtcccgctctgcccctccccgtccctgccgggcccggacctgcgccgcccgcgacgtggaaggcactggaagcgccgccggggctgcccagaggccgggtccccgctccactttgcgcaaacttgtttttctaaggtcagcgctgcgagctggctacatcgtcctcttaaggtggagcggcagacgtgtgatggatcttcctggtgagcaaggccgtttctacgcgctgaaagggcaaatgccggaagatgaaatcgctttgttgcccgaagaatatcaggtcgaatcagtggttaaacttcaggttccagccctggatggcgaacgcgcatacaccagcgaaaggccgggtggcctggacattcgcatttggcgaagctttcaaagttctggcgatgttggtgttactggtggtggcgttggcggttttaaaggcggtattcttgccgctgatcgttacgtgggttttggtgctggtggttcagatactggcaccggctgtaattaa

SEQ ID NO: 142719 - DNA, 715 bp, Homo sapiens
attccgccttttagaggtattcgaaccaggggttagcaaaaaaaattccccaattggtatcgcactggaaaaaattttttaaaccttttattcccccctttgggttacctaattgtttgaaatccccgggggcgcccccttataatttgacccccttttttaatgcttgacttttaagccttaaaaaaagttttatccgccccgcggcatacctcgaagggagcaggagtgaaaaacgtgatgtctgtgtcgctcgtgagtcgaaccgttgctcggaagcttctgctcgttcagttactggtggtgatagcaagtggattgctgttcagcctcaaagaccccttctggggcgtctctgcaataagcgggggcctggcagtctttctgcctaacgttttgtttatgatatttgcctggcgtcaccaggcgcatacaccagcgaaaggccgggtggcctggacattcgcatttggcgaagctttcaaagttctggcgatgttggtgttactggtggtggcgttggcggttttaaaggcggtattcttgccgctgatcgttacgtgggttttggtgctggtggttcagatactggccccggctgtaattaacaacaaagggtaaaaggcatcatggcttcagaaaatatgacgccgcaggattacatagcccaccacctgaatacccttcagctgaaaaagcgtacattctcgctggt

SEQ ID NO: 142720 - DNA, 369 bp, Homo sapiens
gctacataatcgcggcgaggcgcgcccaacgagccccagagcgaagggaacggtgcccggcggacgggcacccggaaccggaaggccgacagacgcacaaccaagctggtcaaccatatcgtatgcggcagtcggtttggatctgccgttccaacgcgctccaacccgatcccgtggatcaacacttggctggaagtggaagtcagttcttatctggtcgggagattgactcggaagtggacaccgacgatttgagtaacttccagctctgtggcccgcgttaccctgcgcatcactggcacacaactgctgtgccaggagaacacccttcccttctggcggcgctggaatcccacaatgtggcggttg

SEQ ID NO: 142721 - DNA, 340 bp, Homo sapiens
cagccaagtgttgatccacgggatcgggttggagcgcgttggaacggcagatccaaaccgactgccgcatacgatatggttgaccagcttggttgtgcgtctgtcggccttccggttccgggtgcccgtccgccgggcaccgttcccttcgctctggggctcgttgggcgcgcctcgccgcgattatgtagcctgcaattcgtgaaccacgaacccaggccaactccaggtagtaagcccccagtgacgggtgaatgcgtccagatgcggattcttgaacgagctgccatggatttgcgcccaaggaccccaattgtacggattggccacgactggacgt

SEQ ID NO: 142722 - DNA, 933 bp, Homo sapiens
atgacgctacgcttaccgctgccactagaagcggtggggctggaaaacgccgcgcgcgtgctgaagctgtacccgttcgagatgagcggccggcatagttgcagcggggatcctctaggagtcaaccctaaacccaactacattccggggctgattgcggtggtcgggtgtgatggcaccggtaaatccacactgaccaccgacctggtgaaatcgctgcaacaacactggcaaaccgagcggcgctatctggggctgctctccggcgaagacggcgacaaaatcaaacgattgccgttggttggcgtctggctggaacggcgactggcggccaaatcctcgaaaacccaaagcatgaaaaccaaatctccggcgctatgggcggcggtgattatgtactgcttctcgctgcgaagaatggcgaatctacgcaaggttcagcgactggcgcaaagtggcgttctggtggtcagcgatcgcttcccgcaggctgaaatttcgggcttttattatgatggaccggggattggcgtcgaacgtgcgaccgggaaaatcagcatgtttctggcgcagcgcgaacggcgtttataccaacaaatggcgcaatatcgcccggaattaattattcgcctgggcattgatattgagactgccatctcccgcaagcctgaccatgactatgccgagctgcaggacaaaatcggtgtcatgtcgcaagaacctgcctgggctaagccccaattctggggctcacccgtcctgcatcacgtaggtatcggaaattgcgccgttaatgccgtagacttcggacattttcgccaccaccggtttgaaggtgctggtgaggatgccggaccctgcctgcaacaacatgaaaccaattatggttttaatcgtgcctttaataataacgctgacacttttgcgcagtag

SEQ ID NO: 142723 - DNA, 1248 bp, Homo sapiens
atgcacacccacgcgcgggaaacctgcctggcgttagggaaacccgccgatgacgctacgcttaccgctgccatagaagcggtggggctggaaaacgccgcgcgcgtgctgaagctgtacccgttcgagatgagcggcggcatgttgcagcgcatgatgattgcgatggcggtgctgtgtgaatcaccgtttatcatcgccgatgaaccgaccaccgaccttgacgtggtagcacaggcgcgcatcctcgatctgctggaaagcattatgcaaaaacaagcgccgggaatgctgctggtgacccatgatatggacaaatggggccgcatcatcgcggatgtggaaagccagtaccgttaccagaccaccaatccgaaaatcttcgctggtggtgacgccgtgcgtggtgcggatctggtggttaccgcaatggcagaaggacgtcatgcggcacaggggattattgactggctggggctggatgtagataagctgggcgctcttgaagagcgtcgtaaagtattgcaggtcaaaacggaaaacctgcaagcggagcgtaactcccgatcgaaatccattggccaggcgaaagcgcgcggggaagatatcgagcctttacgtctggaagtgaacaaactgggcgaagagctggatgcagcaaaagccgagctggatgctttacaggctgaaattcgcgatatcgcgctgaccatccctaacctgcctgcagatgaagtgccggtaggtaaagacgaaaatgacaacgttgaagtcagccgctggggtaccccgcgtgagtttgactttgaagttcgtgaccacgtgacgctgggtgaaatgcactctggcctcgactttgcagctgcagttaagctgactggttcccgctttgtggtaatgaaagggcagattgctcgcatgcaccgcgcactgtcgcagtttatgctggatctgcataccgaacagcatggctacagtgagaactatgttccgtacctggttaaccaggacacgctgtacggtgttggcctatatcctttgggggcattggcctccggttggctcccaaaacgccgggaacgtaaagacgcgacaccggggcccacggggtacccaggggctcacggaaacctcgaattgcccgaaaggtccgagggacctagggcggggggggaaccgaggcgaagaacagggcacacacagaaagggtccccggacaggggccagacgccccccaagggcccatga

SEQ ID NO: 142724 - DNA, 4770 bp, Homo sapiens; identical to SEQ ID NO: 118283

SEQ ID NO: 142725 - DNA, 1398 bp, Homo sapiens
ttaattgagccgattaaaatcaggattcgcgccccacggattgccgcttaaatgtccaccgctattgagcatgatgattccggcaagcccaatggcaatacccacccattccagtttgcgcgttttaatgccaaacaggcggctgaagcacagggtaaagaggggcacggttgcaaccactacggcggcgatgccggaaggaacattttgatgttcggcaaccgtcaccatgccattaccgacagccagcaataacaggccaatcagcgcggcattgagcagcggacgtagcggggggagtttgtgtccgcgcagtagcaaaaatgccagcaataaaataccggctgccaggaatcgaacgcccgccatcattaacggaggccagctttccacgccaatccgaatgacaaaataggttgagccccaaatgatatacaacgcaaacagcgcgccaaaaagcggtaacaacaggttaaaggccatcacgctgataaacagcgccagccccggccagaacatttgcagcggctgggtccagatatactggcgcgcgtcgttaatcatcacgccccattcggcggtcggcgcggtcacaccgaggccaaggaaagacatccccgcgacgtgcagcatcatatggccgatatccagcgttgccagcaccagcagcgaagggatcaccgcgcctgccagatgatcgacaaacacccgcacatggcccgcaccggaaagccgtgacgccagcacaaactcgcgttggcgtagtgaaatcaccaggctgcgcaccatgcgtgcataccacgcccagtgcgacagggcgatggcgataattacgttggtcagcccggtgccgagcacgccaaccataaagaacgacagaatcgaggtcgggaaggtcataaacatatcggcgacgcgcatggtggcctgatcaacgcgcccgccaatcaacccggcgctgccgccaataaccagccctaatgtcagcaccagcagcaggcaggccattaccgaaccgagcgacacgcgggtcgctgccatcagccgcgagaaaatatcgcgacctaagtgatcggtgcccagccagtgctgcgcatccggcgaaagcaggcgcgacggcaaatcaatcgcctgacgctcatcctgctccattattgcctgaccactaagctgaaaaacggtgtaaaaccaggcatcgtcgctgccttttacttcctgccaggtgcgggataaattcaccccgctggttgtcacggtactcagctttagtcctttggcaaaatgcgtgtccagtacacccgtgtaacgctcagtcagcaggcgtccggtaaaatttccgcatacctgattgatttgggaaagccattgctgaaactcattatccactgcggggttcat

SEQ ID NO: 142726 - DNA, 5017 bp, Homo sapiens
atgccttcctgccattgccctcttggcagctctctacgaccaccagcaactctagagcgaatattccccgcaaaaaaagtattgcaactcgggttcctggtacctcgaaagtcggcggagaatctaaaaccccggaactactggaactggtcagaagatgaagcctggcagtcacagtttgatcaaaaagatctgatcgaaaatgaactaactctggatctgaaagcggacgttaccggcaaggtcagttttccggtagattggggcgcttatcgtctggaagtcaaagcgccgaatgaagcggtcagtagtgttcttttctggtctggctatagctggcaggacaacagcgacggtagcggcgcagtgcgacccgaccgtgtcacgctgaaactggataaagccagttatcgccctggcgacaccattaagttgcatatcgccgcgccaacggcgggtaaaggttatgcgatggtcgagtccagtgaagggccgctgtggtggcaagagattgatgttcgggctcaagggctggatctgacgattccggtcgataaaacctggaatcgtcatgatctgtatttaagtacgctggtggtacgtcctggcgataaatctcgctccgcgacgccaaaacgcgcggttggtgtgttgcatctgccgcttggcgatgaaaaccgtcgcctcgatctggcgctggaaacaccagcaaaaatgcgtcccaatcaaccattaaccgtgaaaattaaagccagcactaaaaatggcgagaagcctaaacaggtgaatgtgctggtgtctgccgttgatagtggtgtgctgaatattactgactacgtcacgccagatccgtggcaggcgttctttggtcagaaacgctatggcgcagacatttacgatatttacggtcaggttattgaaggtcaggggcgtctggcagctctgcgtttcggtggcgatggtgatgagctgaaacgtggtggtaaaccgccggtcaatcacgtcaatattgtcgtgcagcaggcgctgccggtaacgctcaacgaacagggcgaaggctcggttacactgccgattggcgattttaacggtgaattgcgcgtcatggcgcaagcctggacggcagatgacttcggtagcaacgaaagtaaagtgatagttgccgcaccggtgattgctgaactgaacatgccgcgctttatggcgagtggcgatacctcgcgtctgacgctggatatcactaatcttaccgataaaccgcaaaaactgaacgttggcctgaccgccagtggtttgcttgaactggtcagcgattcacccgcaggcggtgaattaacgccatcggccggagccgcagtaaccttcgcgacactggtactcaaccgccacattgtgggattccagcgccgccagaagggaagggtgttcatcctggcacagcagttgtgtgccagtgatgcgcaggagctggaagttactcaaatcgtcggtgtccacttccgagtcaatctgcccgaccagataagaactgacttccacttcctgcggagcaacctgcacgttatcagacaccagccaagtgttgatccacgggatcgggttggagcgcgtctggaacggcagatccaaaccgactgcctgcatacggatattggtgatgtattcaacgtactggcagagaatgtctttattcagaccaatcctcgaaccgtcgcggaacagataatccgcccagtctttctcctgttgagctgcctgaacaaacaggtcatagcactcctgcttacactcttcggcaatttccgccatctcggatcgtcgcccgctggcagcgattacattgctggtccgccgtaagtcgatatccaaaggattcccacaaagcgatcggatcgaaactgtacaccgcttcgcgattcgactgataggggatcgtctcagtctggattcgagcatgagcgtggtaggaagcgaattattccatatggcgcagtgccgcaaaaagcaccgctcagctgacacatatcatccccgtctcgtcaaaagaatcccttcgctgctgttgctgcaaccgctggatatcgcccatatgatgctgcacgtcgcggggatgtctttccttggcctcggtgtgaccgcgccgaccgccgaatggggcgtgatgattaacgacgcgcgccagtatatctggacccagccgctgcaaatgttctggccggggctggcgctgtttatcagcgtgatggcctttaacctgattgaactacgtaatatcgcgctacaggccgcgcagccgctggtacacggtgtatcgttaaccctgcaacgcgggcgcgtgctggcgttagtcggcggtagcggcagcgggaaatcattaacctgcgccgcaacgctgggcattttgcccgctggcgttcgccagacggcgggggaaattttagccgatggcaaaccggtttcgccttgcgccctgcgcggcatcaaaattgccaccatcatgcagaacccgcgcagcgcctttaatccactgcacaccatgcacacccacgcgcgggaaacctgcctggcgttagggaaacccgccgatgacgctacgcttaccgctgccatagaagcggtggggctggaaaacgccgcgcgcgtgctgaagctgtacccgttcgagatgagcggcggcatgttgcagcgcatgatgattgcgatggcggtgctgtgtgaatcaccgtttatcatcgccgatgaaccgaccaccgaccttgacgtggtagcacaggcgcgcattctcgatctgctggaaagcattatgcaaaaacaagcgccgggaatgctgctggtgacccatgatatgggcgttgtggcgcgtctggcggatgacgtggcggtgatgtctgacggtaagattgtcgaacagggcgatgtagaaacgctgtttaacgcccccaaacatacagtgacgcgcagcctggtttccgctcatctcgccctctacgatcgacctgcagcagcaagctgcactggcgtcgtcgcggcgcttttcctgaccaagccccatttccagacacagtttgctgttgcgggcgcggtggcctttaagcaatttctggatttcacaccagttctccgagtcatcctgctcgagaaaaccagcaggaccaaaagcacgagtggcgctgttttcaaaagcggctttaacttcatcggaggcggctttgtcagtaatacagaacgcccacacttcaacttgatcagggccgcgcggatgccagacgcggaaagcatggctgaacagagcatgatactggtcactggcgaactgctctgccgggaatttccagttacagttgatcacccacttttgtacgccgccgacaatttcggtgccgccttcgcgacgatccagcatgccatccagataccaggcaatgtcacccagtccccagtgggatttacacaacccttgtgggtaggcgcgaggttccagcggtacatcgatcaactcgccgttaatgccataagaccagccgtgatacgggcaggtaaaggcgcgagtgttgccgcaatctgcataactcacacgcatggcccggtggcggcattggttgagaaacgccttgatgctgccgtctttctgacgcactacgacaaccgcatcttctcccatcccgagtatgagcagatgggtatctggcctggcgatgactatttctcccgtcgttacgactatctcaccgaatatgttcaggtgctgcgcgacctgtggggcacggggaaaagcgattttaaaggcgattttttcaccatgaatgattgtcgcgtgagtccgcaaccgagtgtccccatgaaagtgatctgcgccgggcaaagcgacgctggcatggcgttctccgcccggtatgccgatttcaacttctgtttcggcaaaggcgtaaatacacccacggctttcgccccgaccgctgcgcggatgaaacaggccgcagagcaaaccggacgcgacgttggctcttatgtgttgtttatggtgattgccgatgaaaccgacgatgccgctcgcgccaaatgggaacactacaaagcgggcgcggatgaagaggcgttaagctggctaaccgaacaaagtcagaaagatacccgctccggtactgacaccaacgttcgtcagatggccgatcccacttcggcggtaaacatcaatatggggacgttagtcggttcttacgccagtgtcgcgcgcatgttagatgaagtcgcaagcgtgcctggtgccgaaggcgtgctgttaaccttcgacgattttctgtcgggaatcgaaaccttcggcgagcgcattcaaccactgatgcaatgccgcgcccatctacctgcgctgactcaggagcaaagtgcgctgatcgtggtggatatgcaaaacgcttatgccacgccaggcggctacttagatctcgccgggtttgatgtctcaaccactcgcccggtcattgccaacattcaaaccgccgtgaccgcagcgcgagcggcagggatgctgatcatctggtttcaaaatggctgggatgaacagtatgtcgaggctggcggacccggctcaccgaattttcataaatcgaacgccctgaaaaccatgcgtaagcagccgcagctgcaggggaaattgctggcgaaaggctcctgggattatcaactggtggatgaactggtgccgcagcctggcgatattgtgctgccgaagccgcgctacagcggtttcttcaatacgccgctggacagcattttgcgcagccgcggaatacgccatctggttttcaccggcatcgctaccaacgtctgcgtcgaatcgacgctacgcgacggcttttttctggagtatttcggcgtggtgcttgaagacgcaactcaccaggcggggccgaaatttgcgcagaaagccgcgttgttcaatatcgaaacctttttggcggcaggacgtcgaaaattctgcgacgcgctttctcccacgtcctttgctcatatcgcttaa

SEQ ID NO: 142727 - DNA, 1188 bp, Homo sapiens
atggcgtcccaatcaagacgtaggattaccacgtcatttagtgcaacaactagcattcattgtgatcccatacaagcattgaagtacgacgaatttaatcactggtgggcaacagagggcgactgggttgaagagcctaactatcgccgtaatggtatgagcggggtgcaatgcgtcgagcgcaacggcaaaaagctgtatgtaaagcgcatgacgcatcatctgtttcattccgtacgttatccgttcggccgaccaacgattgtccgtgaggttgcggtaattaaagaactggaacgggccggtgtcatcgtgccgaagatcgtttttggtgaagcggtgaaaattgagggtgaatggcgagcgttgctggtgactgaagatatggcggggttcatcagcattgctgactggtatgcccagcatgcagtatcgccttattctgacgaagtacggcaagccatgttgaaagcagtggcgctggcgtttaagaaaatgcatagcattaatcgtcagcatggctgttgttatgttcgccatatctatgtgaaaacagaaggtaatgcagaagctggttttcttgacctggagaaaagtcgtcgccgcttgcgtcgcgataaagcgattaatcatgacttccgccagctggaaaaatatctggagccaatccccaaagcggactgggagcaggcgtgtgcgacaggagccgcagtaaccttcgcgacactggtactcaaccgccacattgtgggattccagcgccgccagaagggaagggtgttcatcctggcacagcagttgtgtgccagtgatgcgcaggagctggaagttactcaaatcgtcggtgtccacttccgagtcaatctgcccgaccagataagaactgacttccacttcctgcggagcaacctgcacgttatcagacaccagccaagtgttgatccacgggatcgggttggagcgcgtctggaacggcagatccaaaccgactgcctgcatacggatattggtgatgtattcaacgtactggcagagaatgtctttattcagaccaatcatcaaccgtcggggaccacacaccgagcaaacaacacaccaagcccaaggcgacaactcacactcgacacccgacacgacaacaccaacaaccaaagccacgacccctacactactaacatcttactataa

SEQ ID NO: 142728 - DNA, 1440 bp, Homo sapiens; identical to SEQ ID NO: 115661

SEQ ID NO: 142729 - DNA, 1581 bp, Homo sapiens
ctatgcttccggcggcagacagacgccaattccgccaattccacagtaaccatacgggttgttatgcagatattgctggtggtcatcttcggcataatcaaacggtgtggcgttcgcgatttccgtggtgatgtgcacgatcgtcatcggcggcaagcatcgccgcctgaaaacgtgccatgactggcgcgagctgcggcatcctgttgtgccgatccccgacattaaaatggaaagattgggatccagccccatcagaatcggcattaacgaccgatcaggcccgaaccccaaacagccaaatccggcgccaacacggccggatgggtttggacaaccgggcacacgaattgtacgtggcccggtcagcccgtagggtgtggtgtgacgatgaatcgcttcgatggcgcaaaacagaatgtcgtgggtgccgacgctcaccacctggctgatacggcagtcaaacgaaaccagagcctcttccagttgcgggcatccggtcacccccgtctgccagcgggcgtcggcaaagcggtgttccatgggcgttttgccgccaaaaaggtttgaaagcggctcctgcccggcgctaagtgtatttacacacagcgttcgattttcattgaatgccggccagacggacgccccacgattcaggcacaccagtaatgtgggcggcgtatcggtcacactgcagacggcgctggcggtgaacccggcgcgcccggctggaccgtccgtggtgataatattgaccgccgcgcccatgcaggacatcgcatcgtcgaaaagtttgttgatcgacaatgttctatagtttgctccggcgagacgcacggcggtacgataaaattcgtcaagcagcagtatatgctgggtggagccacaatcttcgccccccaggctgccgctttcattatgacggaagcggttttcatcaatcaggaagaagctgactaaccacaccgcgaggagcgcccattttccaacagtagcaggtaccggcacgccttcgcccacgcacagaatggtgcccacttcgataatgtcgacttcttcggcaatcaggcgagtggtttcgtaggcgctatccatagtctggttgtccagcgcgacttgcaacatcggtaatgacatgttcaattccttcttaagttcctgctcggtacggcaggcgcgtaaacggtcaaaattctcttcatcttcaaacaggttgacgatctgcatgatgcccacttcctggtgagtattggcatcgaccgccgccatggtgatgaggatatccaccggatcgttgtcatcgtggttgaactccagcggctttttcagcgttaccagagagaaaccggttttcttaacgccctcttccggacgcccgtgcggcattgccaggcccggagcgataacgaaataaggaccgaactgttcaacgccatccagaatcgcctggtagtaacgcggctctaccacatctgccgccaccagcaggtcaacgccgattttcaccgcttcctgccatgtctctgcttcagcctgcaggcggatggatttattttccagccagcgaatcacgtaattcat

SEQ ID NO: 142730 - DNA, 1257 bp, Homo sapiens; identical to SEQ ID NO: 136696

SEQ ID NO: 142731 - DNA, 2178 bp, Homo sapiens; identical to SEQ ID NO: 132458

SEQ ID NO: 142732 - DNA, 1180 bp, Homo sapiens
ctatgcttccggcggcagacagacgccaattccgccaattccacagtaaccatacgggtttttatgcagatattgctggtggtcatcttcggcataataaaacggtgtggcgttagcgatttccgtggtgatgtgacgatcgtcatcggcggcaagcatcgccgcctgaaaacgttccagactggcgcgagctgcggcatcctgttctggggtcagcggataaatcgctgaacgatactgcgtgccggggtcattgtctttgaagatcctaacggcgaagatggcgacgatgaagattttgtcgatgaagacgatgacggagttcgccatcccggttaatggcgctatcccaccgccgccgaccacttcaccctcgtactcaacgacccaatatgcatggccaggctgactatatacttgatacagctcgtcaagattcggatcggcgacggtgtagcctttatcaacggtaagaccgtattcggcggataccatcgcccgtcgcgctttatcggcgagctgccggaagagtgtgtggaagaggtgcgcctgcgcgccacggtaagccgcccggtcagccatcagcggatgggtacgccgatggtcgagaacgacagcggctacaagctcggccagcgcgtacgccacgccggcgatgctatttctgacgttagtcatatttcctgcgtcggtaatgatttcggtttcaatgatattttctcccgctacgttgaagcggtaggtcgcgaaggcgatgtactgctggggatctccacctccggtaactctgcaaacgtgatcaaagcgatcgcagcggcgcgtgagaagggaatgaaagtgatcaccctgaccggtaaagacggcggcaaaatggctggcacggcggatatcgaaattcgcgtaccgcactttggatatgccgaccgcattcaggagatttacattaaagtgatccctatcctgatccagttgattgaaaaagaaatgtttaaataagcctggcgtaggccggataaaacgtttacgccgcatccggcatttgtgcgctgatgcctgatgcgacgctgacccgtcttatcatgcctacaaatctgaacgcgaaccgtaggccgaataatgcgttcacgccgcatccgacctgaaaattcttaaatcaatcttcgccgggggccatgcgctc

SEQ ID NO: 142733 - DNA, 261 bp, Homo sapiens
cagtatcccgatccgctggtaatgccgctggagtaaacgatcacgccagcaggacgccgcatgcactgcaagggggcgtgtatgaaaccactgctggatgtgttgatgatcctcgatgccgtgcgggaactggaaaagcaggcgatcaaactgcatgaaggctgggaaaacgagctggtgattggcgtggacgacacgtttcctttttctctgcttgcgccactcattgaagctttttatcaacatcatagcgtgacgcgc

SEQ ID NO: 142734 - DNA, 2406 bp, Homo sapiens
ttagaaggcacacgcataccgatggttttgcgtttttcctgcaacagacggcgtggcacttccttcgtccccttcaggatgaaggtatagttgcccggcgtgttgtttttcattaaacgacaacgcaacgttatcaacaaatgaataggtcgagagttcagaaagatcgcgacacatcagggtaaagttgtgaccgtccggcagctggcgaatacgacaaatacgctccatcgcgtttttatcttcaattttacagccgatcgcatagccggaatcagttggataaacaatcaccccgcctttacgcacgatctccaccgcctggttgatcagacgttgcggcaaatcattctgcgcggctttgattttgacggccaggaggcgctgaaagattctcgcgtgctgatagtgggcctgggcggcctcggctgtgcagcctcgcagtatctggcaagcgccggtgtcggtaacctgacgctgctcgacttcgacacggtttcgctctcgaatctgcaacgccagacactgcacagtgatgccacggtcgggcaaccgaaggtggaatccgcccgtgacgccccacatatcgcgattacgccagtcaatgcactgctggatgacgcagaacttgcagcattgattgctgaacacgatctggtgctcgactgtacggataacgttgcggtacgtaatcaactgaacggcagcagcgataacgtgggtaacgcagcgccccggcaatgaccgcgcacgatcgggacgccattgcgagttcatcagaaacttgcgcgcgtagtcgttggtctgtggagtacgcttctccggtttgcgcgccaccagattcacggagtaaaaggcgctcggcatcgaattcagccgcgtcgcatgttttttgacaaattcctggaacgctgaatggtagtgaccatagcgaatagaagcaccaatgaccacacggtcatagttttcccactgtggttcttcaatgcggtgcacattggcgacatccgcctggatccccagttctttcagttccgaagccaggtaggaggcaatctcgcgcgtttgtccgtccagcatgttggcaatcaggatccatttagccaccgggttcatactggtaaagttatcagcaaccacgccaagccctggccccaggttattcaatgtcgcaacaaccgacgcaaaggcagaaaagtcatccacgcccgtggcgataatcgccagcatactgacaataaacaccaatgcataggcggagaaaaatccccaacggcttcgaggatacgttccggcagtgcgcgatttcccagctttaatgctatagacggcgttcggatgcaccagtcgtttcagctcacggttcccctgcttaaacagcagcaggatgcggatcaccttcagggcattttcactgatatctttgcgggaaatagcatgctgctcacgcgggatcaccgtcacctgtggacgggcgactgcctgttcagcctcgctttcctcgcggcttagcaccgtgcgggaactggaaaagcaggcgatcaaactgcatgaaggctgggaaacgagctggtgattggcgtggacgacacgtttccttttctctgcttgcgcactcattaagctttttatcacatcatagcgtgacgcgcaattatctttacttcctttcttgtttcttccttgatttttcatccctgattcaaattcattatcatcagcatgatgccagcaataagtgccaggcacgatggtagcaaaatgtaatgccgcaactgtttgtgatacagcatcatcggcgtcaatactaatcccatcagaatgacaatccgccactggtatggtccacattgcaattttctgggtatccataattatgacacggttgtcggaaacttgctcttggccaagtatgctatgccatatctggcttcggtaggtattccgaatcttggtcaacgggcttttatgtaacgtgactgagagaggaagttcctggctttccccgctgttactttccagaagaaagctctcgacatgttccagcatcgcctgggcgggttgatccttcctgccatccacagaagtacgaacagcacggtagagcgtatgatttcgcagataccagtgaacagtgagtaaggtttgtgcttcactgagaggagccagcggatcgcgactttgcgtggtaaaaatagcttcttcacccaacaccatgattttgtccgtactccgattcctccgggcgaccagttgcaggagatcgttatcaagaatggtgatggtgcgctgtagctgattgaactgctggatttctttctgtgagcgttgatgcaactcggaagcttgcgaaaaaatcataaacgccagcacgctaagcattgagaaaatcgccagcgccgccat

SEQ ID NO: 142735 - DNA, 2298 bp, Homo sapiens; identical to SEQ ID NO: 139105

SEQ ID NO: 142736 - DNA, 5316 bp, Homo sapiens
  misc_feature (1)...(5316): n = a,t,c or g
ggccggaaagtagtggtcacttccgcttaaatcttgcgcaaacatttaactcgtttggcgcaattatcgcgggtgtctttgggcaaagtcttattttgtctaacgggccacattaattcgcaagaacgttctcgataaaatgtctccagagcaattgagtgcgtataaacacagcctggtattatcggtacagacaccttatatgatcatcgtggctatcgtgttactggtcgccctgctgatcatgctgacgaaattcccggcattgcagagtgataatcacagtgacgccaaacaaggatcgttctccgcatcgctttctcgcctggcgcgtattcgccactggggctggggggtattagcgcaattctgctatgtcggggcacaacgggctgctggggctattggaatctgtgaaaaaatccagaagccctgttaagccccccccggtatccgtaacaacggggacgatattagagactcgagctggctcacaattaccgggactcggcaatattctgcgtcttgcgggcctgtcggaccgggacgtcatcccggacgcttctttgccggaaaaaccgcgcctgatgatggcccgtttactggggctggaacctccgcagttcagaaatagtctggacagcggcaaaggtaagattattgatggcagtcggatttgtaatgaactgggatttgaataccagtatcccgatccgctgggggcgtgtatgaaaccactgctggatgtgttgatgatcctcgatgccttagaaaaagaaggcagttttgcggcggcgtcggccaaactctacaagacgccgtccgctctgagttacaccgttcacaagctggaaagcgaccttaatattcaattgcttgatcgtagcggacaccgcgctaaattcacccgcaccggaaaaatgttattagagaaagggcgggaagttctgcataccgtgcgggaactggaaaagcaggcgatcaaactgcatgaaggctgggaaaacgagctggtgattggcgtggacgacacgtttcctttttctctgcttgcgccactcattgaagctttttatcaacatcatagcgtgacgcgcctgaagtttatcaatggcgtactcggtggttcatgggatgccctgactcaggggcgagcggatattattgttggcgcgatgcatgagccaccatcttccagtgagtttggtttttcacggttgggcgatctggaacaagtctttgcggtcgcgcctcatcatccgtttagccctggaagaagagccgttaaatcgtcgtattattaagcgatatcgggcgattgtggtgggggatactgcgcaggcaggcgcttctacggcatcacaacttctcgacgaacaagaagccattaccgttttcgattttaaaaccaaactggaagctgcaaatttagcgggctcgggctgcggctattttaccccgttatctggcgcaacgttttctcgatagtggcgcgttaatcgagaagaaagtggtcgcccaaactctctttgaacccgtctggattgggctagccggcgatttgggcgcagtggagtagcaacgcgcaggatcgctggcatcttggcgtgatggcaggctacgccaatcagcacagtaatactcagagtaatcgtgtgggttataaatcggatgggcgcatcagcggttacagcgctgggctgtacgcgacctggtatcagaacgatgcgaataagaccggcgcttatgttgacagctgggcgctgtataactggtttgataacagcgtcagttccgataaccgttctgctgacgactatgattctcgcggtgtgacggcctctgttgagggtgggtatacctttgaagcgggaacatttagcggcagcgaagggacgctgaatacctggataaatacagccacaggcgcaaatcacctggatgggtgtgaaagattccgaccatacccggaaagacggaacgcgcattgaaacggaaggcgacggaaatgtgcaaacgcgacttggggtgaaaacctacctgaacagccatcaccagcgtgacgatggtaaacagcgtgagttccagccttacattgaagcgaactggatcaacaatagcaaagtctacgccgtgaagatgaatggtcaaaccgtaggccgtgaaggtgcgcgtaatctcggtgaacnggtgttagccggactgcgtgaaggcggtattgacgcgtatcctgtcgacccgaaagaagtcgacgtgacgcaactgaagtcgatgggctttcagaaagtgtttatcgcgctacacggtcgcggcggtgaagatggtacgctgcaggggatgctcgagctgatgggcttgccttataccggaagcggagtgatggcatctgcgctttcaatggataaactacgcagcaaacttctatggcaaggtgccggtttaccggtcgcgccgtgggtagcgttaacccgcgcagagtttgaaaaaggcctgagcgataagcagttagcagaaatttctgctctgggtttgccggttatcgttaagccgagccgcgaaggttccagtgtgggaatgtcaaaagtagtagcagaaaatgctctacaagatgcattaagattggcatttcagcacgatgaagaagtattgattgaaaaatggctaagtgggccggagttcacggttgcgatactcggtgaagaaattttaccgtcaatacgtattcaaccgtccggaaccttctatgattatgaggcgaagtatctctctgatgagacacagtatttctgccccgcaggtctggaagcgtcacaagaggccaatttgcaggcattagtgctgaaagcatggacgacgttaggttgcaaaggatggggacgtattgacgttatgctggacagcgatggacagttttatctgctggaagccaatacctcaccgggtatgaccagccacagcctggtgccgatggcggcacgtcaggcagaggaaagcacaatggaagcattaggaatgatcgaaacccggggcctggttgcactgattgaggcttctgacgcgatggtgaaagctgcgcgcgtcaagctggttggtgttaagcagattggcggcggcctgtgtactgccatggttcgtggtgatgttgcagcctgtaaagccgcgaccgatgcaggtgccgcagcggcacagcgtatcggcgagctggtatctgtacacgttatcccgcgtccgcacggcgacctggaagaagtcttcccgatcggcctgaaaggcgatagcagcaacctggggagcttttacctgaaatacgccacggaggcgggtatgaaactggcagtcgtcactggacaaattgtttgtaccgtacgccatcacggactggcgcatgacaaattgctgatggtggaaatgattgatccacaaggtaatcctgacgggcaatgcgccgtcgccatcgacaatattggcgcgggaaccggggagtgggtgttactggtgagtggcagttccgcccgccaggcgcataaaagcgaaacgtcaccggtcgatctgtgcgtgattggcattgtcgatgaggtggtgtctggcggtcaggatattgaacaggtggtgaaagcggtactgctgaaaatgcaaagcagtgacacgccgtccgccgccgttcatgagatgggcgttttcgcgtccctggatgacgccgttgcggcagccaaagtcgcccagcaagggttaaaaagcgtggcaatgcgccagttagccattgctgccattcgtgaagcaggcgaaaaacacgccagagatttagcggaacttgccgtcagtgaaaccggcatggggcgcgttgaagataaatttgcaaaaaacgtcgctcaggcgcgcggcacaccaggcgttgagtgcctctctccgcaagtgctgactggcgacaacggcctgaccctaattgaaaacgcaccgtggggcgtggtggcttcggtgacgccttccactaacccggcggcaaccgtaattaacaacgatatttacacggaaacaccggtcaaagtgtctggctttaagcgcgtcatagacgagcaggactggacaatcactaaggtgacacattttctgaataatagcggcttcacgacgtcattagagcttgagcatgccgcacatgcgcgtacaagccgctatatcactgacacgacaaaagagcgttatcaccagtgtcagaacgtgaattgcagcgccacgttcatcacttatgagtcggtacagcgatacattgtgaagccgggagaagtccacgtcggtgtgcgctctaaccacctgagctacaagcctgtagaggtttactgctcattttcatcagacaatctgtgtgagcactgcaaagtacgcttctttaaggcgtcagtcttcgtccagggggccgccttcgccaccggtattcctccagatctctacgcatttcaccgctacacctggaattctacccccctctacgagactcaagcttgccagtatcagatgcagttcccagtaattccgattaacgcttgcaccctccgtattaccgcggctgctggcacggagttagccggtgcttcttctgcgggtaacgtcaatgagcaaagagtcagagcacaagttggcatgttatatgaagatcttgccggacatgctgcttttgatggcatattgttccacgatgatgctttgctttcagattatgaagatgccagtgcaccggctatcacggcttatcagcaagcaggctttagcgggagtctgagcgaaattcgacaaaacccggagcaatttaaacagtgggcccgctttaaaagtcgtgcgttaactgacttcactttagaacttagtgcgcgcgtaaaagccattcgcggtccacatattaaaactgcacgaaatatttttgcacttccggtaatacaacctgaaagtgaagcctggtttgcacagaattatgctgatttcctatatagctatgactggaccgcgattatggctatgccgtatctggaaggtgtcgcagaaaaatcggctgaccaatggttaatacaatggaccaatcaaattaaaaacatccctcaggctaaagacaaatctattttagaattacaggcacaaaactggcagaaaaatggtcagcatcaggctatttcttcgcaacaactcgctcactggatgagcctattacaactgaatggagtgaaaaactatggttattatcccgacaattttctgcataaccaacctgaaatagaccttattcgtcctgagttttcaacagcctggtatccgaaaaatgattaa

SEQ ID NO: 142737 - DNA, 4224 bp, Homo sapiens
atgacgaaagtgacctcactgacgcaacagcaaagagcagaactgtgggcgggtatcaggcacgatattggtctgtcgggagattcaccgctgctttcgcgtcacttccctgccgctgagcataatctggcgcaacgtctgctggccgcgcaaaaaagccattctgcccgccagcttttagcgcaattaggggagtatttacgtctggggaataatcgtcaggcggtcacggattatatccgtcataactttggtcagacgccgctgaatcagctctcaccggagcaattaaaaaccattctcaccctgttgcaggaagggaagatggttattccgcaaccacagcagcgcgaggcgaccgaccgtcctttattaccggcggagcacaatgcgctaaaacagctggtgaccaaacttgcggcggcaacgggggaacccagcaaacagatctggcaatcgatgctggaactttccggggtgaaagatggcgagttaattccagcgaaactgtttaaccatctggtgacctggctacaggcgcgtcagacgctaagccagcaaaatacgcctcgacccggggggggagaaattcccccttggtgctcgtccgtgttagcagaaagcgaaagaaaaaaaagaggaagaaagaaacaacgaggaattgactcccccgatgttggagctctcttattagtccgcgctactttctacatatggcaacaaccgccggttaataaaattgcgctgggcattgagtacgccgccagtaagtattacggctggcaacggcagaacgaagtccgcagtgtgcaggagaagctggaaaaggcgctctcccaggtggcgaacgaacccatcaccgtcttctgcgccgggcgtactgacgcaggggtacacggtaccgggcaggttgtgcatttcgaaacaaccgcgctgcgcaaagacgcggcgtggaccttgggcgtaaatgcgaatttacctggtgacatcgctgtgcgttgggttaaaactgtacctgatgattttcatgcccgatttagcgccacggctcgccgttatcgctacatcatctacaatcatcggctgcgcccggcggtactgagtaaaggggtaacccatttttacgaaccgctggacgctgaacggatgcatcgggctgcgcaatgcttgctgggcgagaatgatttcacctcgttccgtgcggtgcagtgccagtcccgaaccccgtggcgcaacgttatgcatattaatgtcacgcgtcacggtccttatgtggtggtagatattaaagcgaatgcttttgtacatcatatggtcaggaatattgtcggcagcctgatggaagtcggtgcccacaaccagccggagagctttcccccgggaacccccgggaccccctttggtccagaaggtgggcgaatccctggggctttacacaacgacacaggaaaaggctctggcgcgccaaaaacgtggccacgtcaggccgataaacatcaccgccgaagcgatcaaaaacagcacgtttaccaccagcaccactggaatattcccggcgaggaacaggctttgcagggtgctgacgaaataacgagcgggaataatgtacgtcaccgcgcggatcaccgcgggcatactgtcgatctgaaaaataaagccggaaagcataatcgacggcagaaaagcggcgttcagggcgacctgagcggcattgaactggttgcgggaccctacccgtattgttatttataccgtgatgccaacgatctcgccaatgaaggcattacgctgcgctttattttacaactctgtctggcggcctggcgctgtttattctcgtccagctcgctaaactctacgcccgacacaaacatgtggatctgtctgcttcgcgccgcagcccacttactcacccaaaaaatgaaggatagaacgatgttgcaacattattcagtgtcatggaaaaaaggactggctgcactctgtttactggctgttgctgggcttagcggctgcgatcaacaagagaatgcggcggcaaaagtggaatacgacggactttcgaacagccaaccgctgcgtgtcgatgccaataaccatacggtaaccatgctggtgcaaattaatggtcgtttcctcaccgacgacactcgtcacggtattgtgtttaaagatggctccaacggacataaatcgctgtttatgggttatgcgaccccgaaagcattttatgaagccctgaaagaggcaggtggtacgccgggcgaaaacatgacgatggataataaagaaacgactcatgtcacaggcagcaaactggatatttcggtcaactggcaaggggcggcaaaagcgtattccttcgatgaagtgattgttgacagtaatggcaagaaactggacatgcgctttggcggtaatttaacggcagcagaagagaagaaaacgggttgcctggtgtgtctggatagctgcccggtcggcatcgtcagcaatgcaacatacacttatgtgttatacctgggctttagcatacaccggaacgttaaccgattgccagcgaagtgggtgaacagtcgatcatttcccgtgcggtcggatctgctgggcgtggtgtctcctggcctgaagcggaccgattcactgcctgctaacctgctggcaacagcgctgtgcgtactggcgtggggctacttcctccatcagggcgtggtcgatccgctgggcggcattaacactctgtggccgctgtttggtattgccaaccagatgctggcagggatggcgctgatgctctgtgccgtggtgttgttcaagatgaaacgtcaacgttacgcctgggtggcgctggtaccaacggcctggctgctgatttgtaccctgaccgcaggctggcagaaagcgtttagcccggatgcgaaagtcggcttcctggccattgctaataagttccaggcaatgatcgacagcggcaatattccgtcgcagtatactgagtcacagctggcgcaactggtgttcaacaaccgtctggatgccgggttaaccatcttctttatggtggtcgtggtggttctggcactgttctcgattaagacggcacttgcggcattgaaagatccgaagccaacggcgaaagcgcaagggtttgtaaaaaaggtgaagggaaacggtattttgcctgtccagttgtactttatcgccagtcttcggattacgtccgtgcaaagagaaactgccgagaccgcggatttcgatacgctcgccgtgcgcaagagtcgaggccatatgctccagcatctcttttactgcatcttcaaccgtcttggcgggaatgtgcgattgcctggcttcgtctttcgcacgaacagacaggctgattgcgcggtttttacgatcaacgccggtgaatttagcttcaacttcgtcgccaacgctcagaaccagggtagcgtcttcaacgcgggggatcctctaagtcacctcagcatgcagccggggctatggaatgcagagatgcagttaaatgaaaaaggatattattttgccgtactggtattaggactgttttctgcggcgtcttatcaaaagaccgttcgggacaagtatgaaggcataccgaccacttccatttattatatgacctgcctgactgtctttattatctctgttgcattactgatggcgcaacggaaaaccccgtcgtgtctggctgtggaacagtggcaacagcgcggtattcgcgtggggtcgtatcgcggggatatggtgccattctggcgcaacagccctgatgtgcagatcatcgtaaccgacgacggtttacagcattaccgtctggcgcgtgatgtggaaattgtcgttattgatggtgtgcgtcgctttggcaatggctggtggttgccggcggggccaatgcgtgagcgagcggggcgcttaaagtcggttgatgcggtaatcgtcaacggcggtgtccctcgcagcggtgaaatccccatgcatctgctgccgggtcaggcggtgaatttacgtaccggtacgcgttgtgacgttgctcagcttgaacatgtagtggcgatggcggggattgggcatccgccgcgcttttttgccacgctgaagatgtgtggcgtacaaccggaaaaatgtgtaccgctggccgatcatcagtctttgaaccatgcggatgtcagtgcgttgacaaggtctcactctgttgtctag

SEQ ID NO: 142738 - DNA, 1007 bp, Homo sapiens
atggcggctctacaaatggtaaacggccaaaagtgggtttcctccaaccaaaagtactggttggtttataagactaccgacccacctcgtcttaggcccattttctcgggttatcagcccatgtgtccctttaatggtcggcccttctggattcataaaaatcccatgggtgttcactgggcagtggccaccgggctggcgttgatccccatagtcggaattgccgaatttggctggttctggttcggtggtgaaacctatatggcggcatggaacgtcagcggcctgggcacctttggtgcaattcaaagtacctttaacgttacgctgtggtcgttcatcggtgtggaaagtgcctccgttgccgcaggtgtggtgaaaaacccgaaacgcaatgtccctatcgccaccattggtggggtattgattgccgccgtttgctatgtactttctaccaccgcgattatggggatgatccctaatgccgcactgcgcgtttctgcttcgccattcggtgatgccgcacggatggcgttgggtgacaccgccggggccattgtttccttctgcgcagctgcgggttgcttaggttcactgggcggctggacgttgctggcgggtcaaacggcgaaagccgctgccgatgacggactggttcccaccgatttttgcccgtgtaaataaagcgggtacgccagtggcggggctgattatcgtcggtattttgatgaccatcttccagctcagcagcatttcaccaaacgcgaccaaagagttcggtctggtttcttccgtctcggtcatctttacactggtgccatatctttacacctgtgcggcgttactgctgctcggacacggtcactttggtaaagcacgcccggcatatctggcagttactaccattgccttcctctactgcatctgggccgtgtacataactcacattgacgcctgtgttgtcgtatatatcgccggctatcgagcagcgaagctaacatgtgcag

SEQ ID NO: 142739 - DNA, 1682 bp, Homo sapiens
atgcgggagatcgttgccggaatatcctccaacgacgctcgacggcggggccttgtgcggcaaggtgaagattacgcgcatcagcaagggagaggtgcggcagcgacattcatgactccatcaatcgaacgctgccgcggcgtaactagttgccagaagccagcaagtcattaccagcgtttgcccggcgcttaccaacgcactgacatccgcatggttcaaagactgatgatcggccagcggtacacatttttccggttgtacgccacacatcttcagcgtggcataaaagcgcggcggatgcccaatccccgccatcgccactacatgttcaagctgagcaacgtcacaacgctacccagatgcatgggactctataatgccaaccgtctgaccgaaatcctgtcagaaacctgttccattatcggggctaatattcttaacatcgcccgccaggattacgaaccacagggtgccagcgtcactattctggtgagtgaagaaccggttgacccgaaactcatcgacaaaacagaacaccccggcccactgccagaaacggtcgttgcccatcttgataaaagtcatatttgcgtacatacctacccggaaagtcatcctgaaggcggtttatgtaccttccgcgccgatattgaagtctctacctgcggcgtgatttctccgctgaaggcgctgaattacctgatccaccagcttgagtccgatatcgtaaccattgattatcgcgtgcgcggtttatacccgcgacattaccggtatgaagcacattatcgaccatgagattaattcgattcagaactttatgtctgacgatatgaaggcgctgtatgacatggtggatgtgaacgtctatccaggaaaatatcttccatacccagatgttgcttaaagagttcgaccttaagcactacatgttccacaccaaaccggaagacttaaccgacagcgagcgccaggaaattacacgtgtggtgaaaaacccgaaacgcaatgtccctatcgccaccattggtggggtattgattgccgccgtttgctatgtactttctaccaccgcgattatggggatgatccctaatgccgcactgcgcgtttctcgttcgccattcggtgatgccgcacggatggcgttgggtgacaccgccggggccattgtttccttctgcgcagctgcgggttgcttaggttcactgggcggctggacgttgctggcgggtcaaacggcgaaagccgctgccgatgacggactgttcccaccgatttttgcccgtgtaaataaagcgggtacgccagtggcggggctgattatcgtcggtattttgatgaccatcttccagctcagcagcatttcaccaaacgcgaccaaagagttcggtctggtttcttccgtctcggtcatctttacactggtgccatatctttacacctgtgcggcgttactgctgctcggacacggtcactttggtaaagcacgcccggcatatctggcagttactaccattgccttcctctactgcatctgggccgtggtggggtccggagcgaaagaggttatgtggtcatttgtcaccctgatggtcatcaccgccatgtatgcgctgaattacaaccggctacataaaaacccgtatcccttaggatcaccaataagcaaagattaa

SEQ ID NO: 142740 - DNA, 2310 bp, Homo sapiens
  misc_feature (1)...(2310): n = a,t,c or g
ttatattccgcaaccccgaaaacccgttggggaaccggggttaccctgtctttgtgcccaccaagcccaacatgtttggacccaaggtttaaatttatagggttggatcacggaaatggtttcccaattgacctgttgttcgctggtttcgggtattgtggcgggtaagcgtttcaaaggcttttctctccgccttccgccgccaagggttgtttgctcatccgccaggcgggtaaacccaagcagggcgttgaacagcaatacgggcaggtgcggcattcccggtaccaccgccagcacgaacataatcccggtgncggtgtagagcaccgacgggcttgccagcagctggttacgcacgtcatgggcgatatcgccgttgtcgctgacgcgggtgacgataatcgccgccgcggtggagagcagcagggaagggatctgcgccaccaggccgtcgccgatggtcatcagcacatactgctggaaggcagcatcggcgctcaggttgtatttgaagatcccgatacagacgccgccgatcaggttgatcgccagaatcatcatcccggcgatggcgtccccgcgcacaaacttcgatgccccgtccatcgcgccgtagaaatcggcctcgctggcaacatctttacgccgggtttgcgcctgcgcctggttgatcaatccggcgttaagatcggcgtcaatcgccatctgtttgccgggcatcgcgtctaaggtaaagcgggcagaaacctcgaaaatacgctcggcccctttggtgacgacaataaagttgattgtccacagcgtcagtaaatccgagcgtgaaagaattataaccgcgctgcacgggcagtcgatttttaacggtggtgggaaaatcgtctcttccgtaaaaatcctgcgcgcgcccaaaaaatggtcctgccagaaaggttcggctaatcggcttatccgaatggtttcgccggtacgtggcgactcgataaattgcccatcgcccaaatacacgcccatatgatcggctatctcgcggctgtggatatggaaaaacagcaaatctccccggcgcaggtcgttgttcgccacaatcgttgcccggcgatagtggtacatctcattggccgtgcgcgggagcttagcctcaaggatcttgttgtaggcataaaaaaccaacccgctacagtcaaagcctttatcaggccgcgtaccgccccagacgtaaggcttgccaagctgctgctccaggcggtgaatcgccacttcggtaatgttatgcagatggtcgctgcttaaaaagtggttgttttccgccagcgcctgccagcgtctgtcaatcgcaatgagcggagcaggaaaccattctgaatgctgttttatctgctcccggttgtgctggttatgacccccggaaagtgcaagtggcaccaaggccagggcagcactgggcttgtctcccattacccgctggcaggacatcaaccctgcactctcccggagcaatgacactggctctactttgccgtttttactggcgtgatcgttggactgatcctcgaacccgtgccgggtgccgtggtggcgatggtgggtatatccatcatcgccatactctctccctggctgctgttcagcccggagcagctcgctcagccaggctttaaattcactgcaaaatccctctcgtgggccgtttccggtttttctaattcggttatctggctgattttcgccgcctttatgtttggcacaggctatgaaaaaaccgggcttggacgccgcattgcgctgattctgagtatctgcaaaaatatccgcagccacaatccctacaggaattaagtcgtcatgactgtctggtgaccaaagagcgcgatatgacccatggaatatgggagttggggaacggtcaggagaaaaaatcggtgaaggtaagcgggcatctttcctccaatagcggcgagattgtgctgcaatgggcgctggtacggtttggaagaaccaccagtaatacttctgggggaactcagacccatcatcatggaagaggccaggaaagaggcaagagaggacgctgagggggctgatggagaacaggtacacattcaccacatggcccacagtttcctcaaaatgaagggtccggaaggaacgcccaactgctgtgtttagacctaagtaattagcctcatagggagtttccagaatgtttattggacccagggttgagccaggggtcttcttcatcagtggaccagaaagctgccgtattcttttcatccacagtaggcgtgtataggcctggcgcttcat

SEQ ID NO: 142741 - DNA, 892 bp, Homo sapiens
atgaatgcatgccgtagtccgctgctgaagaagaaatccgccaccgagctcggtgagctggcaaccagtatcaacaccattgcccgtgatgcgcatatggaagcgaatctggagatggagattgttccccagggattacgcgtgctgattaaagacgaccaaaaccgcatgttcgactcgctcgataataaaattattattaccgggcataacgatgcgatggcctacaaaaacaatatctacaacaactggaacctttcgggtgaccgcgcgctttctgttcgtcgggtgctggaagaggccggaatgccggaagataaagtgatgcaggtaagcgcaatggcggaccagatgctgctggattccaaaaatccgcaaagcgcgggcaaccggcgcattgagattatggtgctgaccaaaagtgcgtccgatacgctgtatcaatactttggtcagcatggggataaagtggtgcagccgctggtgcaaaagctggataagcagcaggtgctttcgcagcgaacgctggagatgcgcgacaatcccgccctgcgcgatatccctattgctattggcggcagccgcgaacgtcggggggtgatcagcaccgccaattatcccgcgcgtaaatttggcgtacgtagcgctatgccgacagggatggcgctcaaagtgtgcgccacatctcaccttgcttgcggggcgctttgacgcctacaaagaagcctcaaatcatatccgtgaaatcttctcgcgctacacctcgcgcaggctgcaatctgagctcagccacctacacaccaccgtggccgacactttcattaaaaagtttcctgagacgacttgcgtgcatgttgacttcatgatcagcgccgctgggaagaacccctga

SEQ ID NO: 142742 - DNA, 1011 bp, Homo sapiens
gctgatgtgggcattgccgaaggtaacccgtggcccagtgtatatggccgggtctcctcaaactgcattcattcaagtaggacccagggtgcatgcccatctccagcccagggcagctcccctgtaagctgggtgagctactgaagccaaggcgggaggcagctgacaacacccacagcccatgcggaggtggtggaaaggctggactcagcagcaacaccaaatcccggaccaggcagaaaccacccaagactgaggggctcgtgccagagcggtggccacagccccaccccaccggctcaggggttcttcccagcggcgctgatcatgaagtcaacatgcacgcaagtcgtctcaggaaacttcttaatgaaagtgtcggccacggtggtgtgtaggtggctgagctcagattgcagctgctaagacaccagccacttaccaagagaaagccaggctgcttcaaacccagggcccacggcaaaaaaagcatcacttccggccggggaagtctggaagccacgccttgtgggaaggtcacactgggcatctaggccttcgcctgcattgcagaagggagagccagggtccccctcctgggagaacgcctgcgttccccaagccccacaccggcttttgcaccaacaaaaggctttttaagcacagagccgggtaaaacgtaactgtagacccaaaggcaaccaccagccctggggaccctgggacatgacctccaaggcacgtcctgtcagtcatggtgacaggctggctggggttggcagggagcttgctctccttctcggagggccggagcagcgtggggccaaagacagtggcgaggttgtgcagggacatcttattgaccgcctccttctctgccacccgatgccctctgcgaagttggggtagaactcgtcagtgaagaggggctcgggcagctcacgggagtacagcttcagcgtggcctgcgatggcgttcacgtacatctcgctcatcatcaccgaaacgtc

SEQ ID NO: 142743 - DNA, 1401 bp, Homo sapiens
tcaacagccaggacttcccagcctgcgggggcctgtgtcacgctgaactggacaggactgcagcagggctcgtgcatcagcacctggcatccaggccacactagtgttgccgctgaaaagctctgtcacggggatgttgaaggggatggatgtaatggtccggcatccgatctggctacatttgaggtcaagccgctgcgcctgcgccactgccagatctgttgtgactccaactggcgaaggcctgggtgccactggggaagtgtggcggggactagctaacggagccgccgctacaggggaacgtacgctacagctgttgatactaaggccccaagagagttccagcagggctttgttatccggacgtacagcgatgcccaggccggtgccaaaatattgcggatcggtcactttctcagtagcaacaccaagttgtggattggttttcagccattcgtttaccaccgctgtgtcaccaaataccccatcaatacgaccatttttcagatcgataaaggcattctgataactgtcataagagacagttttcacttccgggtgctgatcctgaatatatttctggtgcgtagtaccgttttccatcccaatacgtttgcctttcagatcggcaaacgttttgtaggtatcttttttggcaatcacgacggctgagttttcatagtagggcgtggtaaacgatacctgtttgctacgctccggggtgatatccataccggagattacggcgtcatattttctgaatttcagggacgggatcaggctgtcgaacgcgtgattagtaaaagtacattctgcctgcatttgtttgcacaaggcttttgccagatcgatatcaaagcccacaatctcattattagcacctatagattcaaagggtggataggtggctgaaacgccaaaattgattttctcgttccggatgaaaacttccaaaacggcaaactggatctggaaaacgggcgtatcgacgggggtttttgggtgacaccggaggggtccactgtaggggcttgaaactttcagcataaagtcatactgaatactcattttcacatcccagtaattcaggcgatcgcccagcgtactgccatcgcgcttttcccgccctttatcggcagcaagaaagaaattcatcccttgtaacggcccttcgctgacccgatagttcataccacctaagatacccgtgccttcaatccgcacatctcgtttactggattcatagccgcgagtcacaatcggtgcaaatgtcagcgtaaattgcggcgttaaacgatagttgacgcccaattgccaggactgcattccttcacggttacgatcaagacttaatgaaaagggatagccaatgtcggtatccaccacggcaccattcat

SEQ ID NO: 142744 - DNA, 3082 bp, Homo sapiens
gcaatattttggcaccggcctgggcatcgctgtacgtccggataacaaagccctgctggaaaaactgaataacgcgctggcagcaattaaagctgacggtacttatcaaaaaatcagtgaccagtggttcccacagtaagattcagaaagccgcaaccgcggcttgagactgatgacaaaggtaaaattgcctgatgcgctacgcttatcaggcctacatggcccatgcaatgtattgaatttgcacgcttttgtaggccggataaggcgtttacgccgcatccggcaacagtgccaactgcctgatgcgacgcttgcgcgtcttatcaggcctacaaattcccgcaccatccgtaggccgataaggcgttacccgcatccgcaacagttgaaaagctggagaaaatgccgcatcaccgacgataccgccgagaatcgccactgcgttcagaccgatttggaccacggtaaagaacatgccgggattttcctgcatattcagaacgcgttgggcatttatattgccttcatcagccaccagtttaagtttgattttgcgccagatcctcggaaggggaagttgattaatttgtgtgaaatacacattgaaagccgattcgaagaaagtgaaccggcatttctcagtggcatagtactacgccgtcatatgacagacgccaattccgccaattccaaaatgcatgcagctgccttaccccaccacgtgctaagggcaggagttgagtcagctgtggcctgccctgggggctggggtccttggggagaacacgggcatgttgatttggacactcattcagcaaacatctacgaagcacctgctgtagaatgcactggacgttgccaatccgtacaacaggtgatagtgaacgccaagagaggccccctttgtcctcacggaccttctcttgtaggagcaggaagagtgaggaaaacttttaacagctcccagcagatgcccgtatgtctcattgagcctgtgttcgcttctaaactgatccctgttagagcgatcttcggatcaatcggtccgatcgtgcagggtaaatcgaccctgttccgtatgatctctgctcaggaacagccggacagcggcaccatcactttgggtgaaacggtgaaactggcgtcggttgatcagttccgtgactcaatggataacagcaaaaccgtttgggaagaagtttccggcgggctggatatcatgaagatcggcaacaccgagatgccaagccgcgcctacgttggccgctttaactttaaaggggttgatcagggtaaacgcgttggtgaactctccggtggtgagcgcggtcgtctgcatctggcgaagctgctgcaggttggcggcaacatgctgctgctcgacgaaccaaccaacgacctggatatcgaaaccctgcgcgcgctggaaaacgccctgctggagttcccgggctgtgcgatggttatctcgcacgaccgttggttcctcgaccgtatcgccacgcacattctggattaccaggatgaaggtaaagttgagttcttcgaaggtaactttaccgagtacgaagagtacaagaaacgcacgctgggcgcagacgcgctggagccgaagcgtatcaagtacaagcgtattgcgaacttcagcaccaagttactttttgtcgacctgcttaagaatgcctacctatacgatctccatttaccgttgttaaacctgatgctgacgccagatgagcgcgaagcgttggggactcgcgtgcgtattgtcgaagagctgttgcgcggcgaaatgagccagcgtgagttaaaaaatgaactcggcgcaggcatcgcgacgattacgcgtggatctaacagcctgaaagccgcgcccgtcgagctgcgccagtggctggaagagaatcaccgcaggcaacggcaaagtagccgaacgcgcctcgccgcgctggctggcgttttcaatcaccacccaactgaaagtgctgtcaccatcgatgccagcttcaatcgccacccaggtgaggagacgaggcaaagccgatacgaggacgaaggagaagacacccgagagcgaggagtgatattatctgtacatggggagccaaagcagcaatctccagcaaagtcgcgcgttattcagtttttccagcagggctttgttatccggacgtacagcgatgcccaggccggtgccaaaatattgcggatcggtcactttctcagtagcaacaccaagttgtggattggttttcagccattcgtttaccaccgctgtgtcaccaaataccccatcaatacgaccatttttcagatcgataaaggcattctgataactgtcataagagacagttttcacttccgggtgctgatcctgaatatatttctggccagtacagggggtcacttcctgtctcgtattacctgtcgggtccagtactttctcagcaaatccttgcgtatttctgggagttttctgtggtcgaaaagggcacggttgttcagcttctgcggaggtggattacccgcgtatggaccactccgggttatttggctttggatgctgctggatctgcgttcatgtctgccggcaccgatgtcttctcgtggatccggtcaccgttgtttcggtgattcccagccggccaccgttgttctgcgcaccagacgctggaaactgttcctgatcccggaagagtattcgccgccgcaggtgctggttgataccgatcggttccttgagatgaatcgtcaacgctcccttgatgatggctttatgcacgcagtgtttaacccgtcatttaacgctctggcaaccgcaatggcgaccgcgcgtcaccgcgccagtaaggtgctggaaatcgcccgtgaccgccacgttgaacaggcgctgaacgagacgccagagaagctgaatcgcgatcgtcgcctggtgctgctaagcgatccggtgacgatggcccgtctgcatttccgtgtctggaattccccggagagatattcttcatgggtgagttattacgaagggataaagctcaatccactggcattgcgtaaaccggatgcggcttcgcaataa

SEQ ID NO: 142745 - DNA, 1704 bp, Homo sapiens
atggtgccagctcctatgccattattcacttcgaccgttatgaaattggagctttgtgtaaaaccaatgattgtccatgcgttatctggaagttgccatggctataatgtttgtccgatgagaagattacatcgatgtgacaggccatcaataaaaagagatttggttgattataatatcattaatgaattgctttttaattgtagcaaaattcaaccagttgaaaaccagaaagatgctaatgaaactttagagttaaaaattattgagcttcagatgaaaattaataatttaatcgttgcattgtctgtcgcgcctgaagttaccgctatagcagagaaaataagactattagataaggaattacgaagggcttcggtatcattgaaaactttgaagagtaaaggtgtaaattcattcagtgatttttatgctattgacttaaccagtaaaaatggacgagagttatgccgtacacttgcctataaaacattcgaaaaaatcataattaatacggataataaaacctgtgatatctattttatgaatggcattgtttttaaacactatcctttaatgaaaggatttaccctggagttacaaaaggtatcgttacacgccctactagaaaactcagccgtcgtgatggccaaaaaagatacctacaaaacgtttgccgatctgaaaggcaaacgtattgggatggaaaacggtactacgcaccagaaatatattcaggatcagcacccggaagtgaaaactgtctcttatgacagttatcagaatgcctttatcgatctgaaaaatggtcgtattgatggggtatttggtgacacagcggtggtaaacgaatggctgaaaaccaatccacaacttggtgttgctactgagaaagtgaccgatccgcaatattttggcaccggcctgggcatcgctcccctgctggaaaaactgaataacgcgctggcagcaattaaagctgacggtacttatcaaaaaatcagtgaccagtggttcccacacgccaacaacctgacgcataaaaccttcgaagccattcagtattacctgctgaaagcctctaatgagctggcgaaagagcaaggcgcgtgcccgtggtttaacgaaaccacttacgcgaaagggatcctgccgatcgatacctataagaaagatctggataccatcgctaatgagccgctgcattacgactgggaagctctgcgtgagtcaatcaaaacgcacggtctgcgtaactccacgctttctgctctgatgccgtccgagacttcttcgcagatctctaacgccactaacggtattgaaccgccgcgcggttacgtcagcatcaaagcgtcgaaagacggtattttgcgccaggtggtgccggactacgagcacctgcacgacgcctatgagctgctgtgggaaatgccgggtaacgatggttatctgcaactggtgggtatcatgcagaaatttatcgatcagtcgatctctgccaacaccaactacgatccgtcacgcttcccgtcaggaaaagtgccgatgcagcagttgctgaaagacctgctcaccgcctacaaattcggggtcaaaacactgtattatcagaacacccgtgacggcgctgaagacgcacaagacgatctggtgccgtcaatccaggacgatggctgcgaaagcggcgcatgtaagatctga

SEQ ID NO: 142746 - DNA, 3299 bp, Homo sapiens
ccttcaagtaataaattaaggagacgagttcaatgtcgcaacataacgaaaagaacccacatcagcaccagtcaccactacacgattccagcgaagcgaaaccggggatggactcactggcacctgaggacggctctcatcgtccagcggctgaaccaacaccgccaggtgcacaacctaccgccccagggagcctgaaagcccctgatacgcgtaacgaaaaacttaattctctggaagacgtacgcaaaggcagtgaaaattatgcgctgaccactaatcagggcgtgcgcatcgccgacgatcaaaactcactgcgtgccggtagccgtggtccaacgctgctggaagattttattctgcgcgagaaaatcacccactttgaccatgagcgcattccggaacgtattgttcatgcacgcggatcagccgctcacggttatttccagccatataaaagcttaagcgatattaccaaagcggatttcctctcagatccgaacaaaatcaccccagtatttgtacgtttctctaccgttcagggtggtgctggctctgctgataccgtgcgtgatatccgtggctttgccaccaagttctataccgaagagggtatttttgacctcgttggcaataacacgccaatcttctttatccaggatgcgcataaattccccgattttgttcatgcggtaaaaccagaaccgcactgggcaattccacaagggcaaagtgcccacgatactttctgggattatgtttctctgcaacctgaaactctgcacaacgtgatgtgggcgatgtcggatcgcggcatcccccgcagttaccgcaccatggaaggattcggtattcacaccttccgcctgattaatgccgaagggaaggcaacgtttgtacgtttccactggaaaccactggcaggtaaagcctcactcgtttgggatgaagcgcaaaaactctccggacgtgacccggacttcccccgccgcgagttgtgggaagccattgaagcaggcgattttccggaatccgacctgggcttccagttgattcctaaagaaaatgaattcaagttcgacttcgatcttctcgatccaaccaaacttatcccggaagaactggtgcccgttcagcgtgtcggcaaaatggtgctcaatcgcaacccggataacttctttgctgaaaacgaacaggcggctttccatcctgggcatatcgtgccgggactggacttcaccaacgatccgctgttgcaggacgcagaatgtacttttactaatcacgcgttcgacagcctgatcccgtccctgaaattcagaaaatatgacgccgtaatctccggtatggatatcaccccggagcgtagcaaacaggtatcgtttaccacgccctactatgaaaactcagccgtcgtgattgccaaaaaagatacctacaaaacgtttgccgatctgaaaggcaaacgtattgggatggaaaacggtactacgcaccagaaatatattcaggatcagcacccggaagtgaaaactgtctcttatgacagttatcagaatgcctttatcgatctgaaaaatggtcgtattgatggggtatttggtgacacagcggtggtaaacgaatggctgaaaaccaatccacaacttggtgttgctactgagaaagtgaccgatccgcaatattttggcaccggcctgggcatcgctgtacgtccggataacaaagccctgctggaaaaactgaataacgcgctggcagcaattaaagctgacggtacttatcaaaaaatcagtgaccagtggttcccacagaggcccacgacgggttataaacaatgtaccgaaaaaaaaataccagaaaagaaagaaagaaagaagaagaagaagaagaagaaaaaagcagaaagaacgatgaataacccacaaatatccgcgcccccgaaacctgcccatgagccgtggagcaccgcccggccatgctgcgaggaaaaagagccaatgacattacgaggaggaccaaataagcgtcatgccacctgtaaaatccccgggacactctccgggtttagaaacccagataaatatggagttaatgtgagacaaattccttacgcgtggaggtttcgaggggccaatgtggagaaaccttttacggtgcgaccagttactactatgaaagctgtctctctggaaggtcggattgttgatcccctgctaccacatcgaggtcggcagataatggttccaacgcagaacgctcagacaaaaccggaggtgcctctgtctaatgaagataggatatttgctcaccaaaggatgcgtcgatcggggaaagaactgcgtgccaatttgggagcgggcgctgaaatattgcctgttgcaaggcgctcaacgatggaccttacaatgggggtgtccacgggttttcatatagtagggggagtggtgaaagcatacgtcaccacgctgacgacttataccatgtatggcctggagttatgccccggcctgacgtcctgctcgggggacccaacgggttcccgccaccgccgagctcgcctcgcgagtcgtgtctggcatggctcggcgccggccgcgctcctatgttcgggcccggtaaatttacgctactgttgtgtgcttactatgctgtgctgtgttgatatgtacttgacagtcgtgcactgcaagatgccacagctgggggaagctattgatggtgtggcgcttgcattttgccgcacctttgccatgccgtccagaaatttacctttgagcttctcgccttcagctgatattcgcattcgacacaggtttcacgtagcatgtagggagcccgatgatgacaactttgcctaccatatgggtaatgccgaatggcacattatttatgcttcattgggcactacccgaagtgccttacgcttcttgttttccttaggtgtggctaacattacactttatagtgttatgcgccccaatgcgcttggctatgccgttttactacatgggggcacaatttacccggtggcactgcccggtcattactggctggcccgtactaactttactaaatccgtgcttaatacgccttgcacggccttgctgctaccctacggtgtagtgatgattatgcggtttttactgtgcttccacactattttcttgatcgtgccgggggtccctttagcgcctgtgcctggccttgcctacacgctaccccgcgtggccttgcgggaccgcctgcctggtttttgccacattatcggtgttgcctatggcccatgccgtatgtag

SEQ ID NO: 142747 - DNA, 1998 bp, Homo sapiens
atgattgctattcccgatatcgatacctgtaacctgacgcttttactgcgcgagaaaggcgcacagaatgcctgcattatcgcgggcgataacccggatgcggcgctggcgttagaaaaagcccgcgcgttcccaggtctgaatggcatggatctggcaaaagaagtgaccaccgcagaagcctatagctggacacaagggagctggacgttgaccggtggcctgccagaagcgaaaaaagaagacgagctgccgttccacgtcgtggcttatgattttggtgccaagcgcaacatcctgcggatgctggtggatagaggctgtcgcctgaccatcgttccggcgcaaacttctgcggaagatgtgctgaaaatgaatccagacggcatcttcctctccaacggtcctggcgacccggccccgtgcgattacgccattaccgccatccagaaattcctcgaaaccgatattccggtattcggcatctgtctcggtcatcagctgctggcgctggcgagcggtgcgaagactgtcaaaatgaaatttggtcaccacggcggcaaccatccggttaaagatgtggagaaaaacgtggtaatgatcaccgcccagaaccacggttttgcggtggacgaagcaacattacctgcaaacctgcgtgtcacgcataaatccctgttcgacgacttgcatgggtcctgtatcttttccatcttgcgtaacgctcgcgcgctgcatgtggttgaagcgccaaatatggtggtcttctgggtcggtcactcaattaacgaaaacgagtatttgtatgcccgtcgcgtcggaaaccagctgggcctgcgtgagctgaatatctgcaccggctgtggtccgggagcgatggaagcgccgatgaaaggtgctgcggtcggacacgcgcagcagcgttacaaagacagtcgttttattggtatgacagagccgtcgattatcgccgctgaaccgcctaacccgctggtcaacgaattgatcatcatgccagatatcgaaaaacgtctggaagcgtttgtccgtatcgctcacggtatcattatcttccctggcggtgtgggtacggcagaagagttgctctatttgctgggaattttaatgaacccggccaacaaagatcaggttttaccattgatcctcaccggcccgaaagagagcgccgactacttccgcgtactggacgagtttgtcgtgcatacgctgggtgaaaacgcgcgccgccattaccgcatcatcattgatgacgccgctgaagtcgctcgtcagatgaaaaaatcgatgccgctggtgaaagaaaatcgccgtgatacaggcgatgcctacagctttaactggtcaatgcgcattgcgccagatttgcaaatgccgtttgagccgtctcacgagaattcgcattcagccaggaaagttcatacagcgtccagatatccgtaccgtgaaaaggcaggttatccgctttcagacccagcgggtcgcgattcaggctgcgtggaacgccttgcagtaggctggcgtcatagagagaaattagtggacgatttgaccgcacaagccctgaaagattttactgcacgctactgcgatgcgtggcatgaagagcataaaagctggccgttaagtgaggaactgtacggtgttccttcaccgtgcattatttcaactaccgaagatgccgtatactggcaaccccagccgtttaccggggaacaaaatgtaaacgcggttgaacgcgcttttgatattgtgatacaacccacaattcataccttttatacgactcagtttgccggggatatgcacgcgcagtttggcgatatcaaactgacattgctgcaaacctggagtgaagacgacttccgtcgggtgcaggaaaatctgattggtcatctggtgactcagaaaaggctaaaactgccgcccacactatttatcgcgacgctggaagaagagttagagggtaccgacaactaa

SEQ ID NO: 142748 - DNA, 370 bp, Homo sapiens
atgtttgctgatatggaactgatcggtattccgcacactattgtgctgggcgaccgtaacctctacaacgacgtttccaatgggcttatcaaatggcacaccaggagattatatcccacacatgactcggaagttcctacgcccgtggatcctcgctcattgctagcacagcagtctgagagcaaactgcaaggcagcacgccccacaccaagaaggtaggaatccgggccccacgaagaggtcctttctggacccaggcatgttctggactcaagatcaacgctatgtttaccttcacttgtgaatcgtcttggtcaaacacaccttcaccttcttgcatgcgcacagactttactccaactcatgaca

SEQ ID NO: 142749 - DNA, 996 bp, Homo sapiens
atggataaagaacgcatcattcaggaatttgtgcccggcaaacaggtcacactggcgcatctcatcgcgcatcccggtgaggaactggcgaagaaaatcggcgttccggatgcgggcgcaattggcattatgacgctaactcccggcgaaacggcgatgatcgccggtgatttagcgctgaaagccgctgatgtgcatatcggttttctcgaccgattcagcggtgcattggtgatttatggctcggggaattataccctcgccagaaaaacacaggccgtggaatttaatgataagggcgatattgatacgccgggtgaatattttaaccatccccgctggtatcacgccttaattaccacgctacaggatgtagacatgctctcaccacttatatggggattccggaactacaaggacgtccaagtgataaaagcgacgccacataaaatagtgatactgatgggaatattattatcaccctcagtatttgcaacggatattaatgtagagtttacagccactgtcaaagcgacaacctgtaacatcacacttactggtaataacgtcacgaatgatggcaataataactacacattgagaatccctaagatgggtctggataagatcgcgaataaaacgacagaatctcaggctgattttaaactggttgccagtgggtgcagcagtggcatcagttggattgataccactctgaccggaaatgcatcatcaagctcacctaagcttattataccgcagtctggtgattcatcttcgacgacaagtaatatcggtatgggtttcaaaaaacggactactgatgatgccactttccttaaacctaacagtgcggaaaagatacgctggagcacagacgagatgcagcccgataagggtcttgaaatgaccgttgcgctacgtgaaacagatgcagggcaaggcgtaccggggaattttcgtgcactggcgacgtttaatttcatctatcaataa

SEQ ID NO: 142750 - DNA, 2023 bp, Homo sapiens
atgtcacgagtacacgaaagttgttcacgaggcggcgactcgatggataaagaacgcatcattcaggaatttgtgcccggcaaacaggtcacactggcgcatctcatcgcgcatcccggtgaggaactggcgaagaaaatcggcgttccggatgcgggcgcaattggcattatgacgctaactcccggcgaaacggcgatgatcgccggtgatttagcgctgaaagccgctgatgtgcatatcggttttctcgaccgattcagcggtgcattggtgatttatggctcggggaattataccctcgccagaaaaacacaggccgtggaatttaatgataagggcgatattgatacgccgggtgaatattttaaccatccccgctggtatcacgccttaattaccacgctacaggatgtagacatgctgatctatgtccatggcgcaaatgacccggaaagtcggttgcctgccgggttgctggatattggcgtcagcaaacggcaaatcgccgtcatcagtaaaacggacatgccagatgctgacgtcgccgcaacgcgaaagttattgcttgagacgggtttcgaagagccgatgttcgagctaaacagccacgacccgcaaagcggtgcagcaactggtggattatctggcatctctcaccaaacaggaggaagcagagaaattagtggacgatttgaccgcacaagccctgaaagattttactgcacgctactgcgatgcgtggcatgaagagcataaaagctggccgttaagtgaggaactgtacggtgttccttcaccgtgcattatttcaactaccgaagatgccgtatactggcaaccccagccgtttaccggggaacaaaatgtaaacgcggttgaacgcgcttttgatattgtgatacaacccacaattcataccttttatacgactcagtttgccggggatatgcacgcgcagtttggcgatatcaaactgacattgctgcaaacctggagtgaagacgacttccgtcgggtgcaggaaaatctgattggtcatctggtgactcagaaaaggctaaaactgccgcccacactatttatcgcgacgctggaagaagagttagaggtcatctcggtgtgtaatctctccggtgaagtgtgcaaagagacgctgggaacactgccgattgagaaaacggttaagactctgctggttaaagcggttgaaggcagcagcttcccgcaggttgcgctgctggtgcgcggtgatcacgagctgaacgaagttaaagcagaaaaactgccgcaggttgcaagcccgctgactttcgcgaccgaagaagaaattcgtgccgtggttaaagccggtccgggttcactgggtccggtaaacatgccgattccggtggtgattgaccgtaccgttgcggcgatgagtgatttcgctgctggtgctaacatcgatggtaaacactacttcggcatcaactgggatcgcgatgtcgctaccccggaagttgcagatatccgtaacgtggtggctggcgatccaagcccggatggccagctgggtaccaagtactccgaagcactgaaagcctccgtacagggtgaagatggccgtaaccaaatcctgacgatgggttgctacggtatcggggtaacgcgtgtggtagctgcggcgattgagcagaactacgacgaacgaggcatcgtatggcctgacgctatcgcgccgttccaggtggcgattctgccgatgaacatgcacaaatccttccgcgtacaagagcttgctgagaaactgtacagcgaactgcgtgcacaaggtatcgaagtgctgctggatgaccgcaaagagcgtccgggcgtgatgtttgctgatatggaactgatcggtattccgcacactattgtgctgggcgaccgtaacctcgacaacgacgatatcgaatataaatatcgtcgcaacggcgagaaacagttaattaagactggtgacatcgtcgaatatctggtgaaacagattaaaggctga

SEQ ID NO: 142751 - DNA, 2586 bp, Homo sapiens; identical to SEQ ID NO: 132487

SEQ ID NO: 142752 - DNA, 4491 bp, Homo sapiens
atgagccagacgctgcctgcgtggtgtgaaaactgggcgcaagaagtcgatgcccggttgacgaaagaagcgcagagcgcgctgcgtccggtgatcaacctgacgggaaccgtgctgcataccaaccttgggcgagctttacaggcggaagccgcggtggaagccgttgcgcaggctatgcgttcgccagtgaccctcgagtatgatctggacgacgccggacgcggacatcgcgatcgggcgctggcgcagctgctgtgccgtattacgggggcggaagatgcctgtatcgtcaataacaatgcggcggcggtgttattgatgttggcggccactgccagcggaaaagaggtggtggtatctcgcggcgaactggtggagattggcggcgcgtttcgtattcccgatgttatgcgtcaggcaggctgcaccctacacgaagtagggaccaccaaccgcacgcacgcgaatgattatcgtcaggcggtgaatgaaaataccgcactgttgatgaaagtacataccagtaactacagcattcaggggttcaccaaagcgatagatgaagcggaactggtggcgctcggcaaagagctggatgttcccgtagtgactgatttaggcagtggctcgctggtcgatcttagccagtacggtttgccgaaagagccaatgccgcaggagttgattgcggcgggcgtcagtctgtggcgagaagcacttacaacccgccaaaagctgattgcccaggattataaagtcagttattcattggccaaatcctgtaaaagtgacttgaagaaataccggtgcaatgtggataaccttccgcgatcgcgtgaagccaagtgtgagcgcaacatcatagttgacgaagctggtttcgaagctgcaatggaagagcagcgtcgtcgcgcgcgcgaagccagcggctttgctattgccgcctacgccagtaatattgaaaacctgcctgcgctgctgccagcggtagaaaaaatcgcgcagaagcacaccagcttccagatcaaaccggaacagtacaacatcgtcggtgaacacctgttggcaacgctggacgaaatgttcagcccggggcaggaagtgctggacgcgtggggtaaagcctatggtgtactggctaatgtatttatcaatcgcgaggcggaaatctataacgaaaacgccagcaaagccggtggttgggaaggtactcgcgatttccgcattgtggctaaaacaccgcgcagcgcgcttatcaccagcttcgaactggagccggtcgacggtggcgcagtggcagaataccgtccggggcaatatctcggcgtctggctgaagccggaaggtttcccacatcaggaaattcgtcagtactctttgactcgcaaaccggatggcaaaggctatcgtattgcggtgaaacgcgaagagggtgggcaggtaggtgctgtcgccaggtgggcaattgccgatcgttggtccattgttggggcctactactacgacaccaatgctaacaagcaagccgactctatgttaggtgtgcaatacagctcctgctgctatgcaattcgcgtcggttacgagcggaagctgaacggttgggataacgataaacaacatgcggtatatgacaacgcaatcggctttaacatcgaacttcgcggcctgagctccaactacggtctggtgcggttaattgaaatggaaaaagtagtcgataaagtcgcagccgtcgtcaataacggcgtcgtgctggaaagcgacgttgatggattaatgcagtcggtaaaactgaacgctgctcaggcaaggcagcaacttcctgatgacgcgacgctgcgccaccaaatcatggaacgtttgatcatggatcaaatcatcctgcagatggggcagaaaatgggagtgaaaatctccgatgagcagctggatcaggcgattgctaacatcgcgaaacagaacaacatgacgctggatcagatgcgcagccgtctggcttacgatggactgaactacaacacctatcgtaaccagatccgcaaagagatgattatctctgaagtgcgtaacaacgaggtgcgtcgtcgcatcaccatcctgccgcaggaagtcgaatccctggcgcagcaggtgggtaaccaaaacgacgccagcactgagctgaacctgagccacatcctgatcccgctgccggaaaacccgacctctgatcaggtgaacgaagcggaaagccaggcgcgcgccattgtcgatcaggcgcgtaacggcgctgatttcggtaagctggcgattgctcattctgccgaccagcaggcgctgaacggcggccagatgggctggggccgtattcacgcgagcttgcccgggatcttcgcccaggcattaagcaccgcgaagaaaggcgacattgttggcccgattagttccgggggccgtttcgacggtaccgttgaagtgaaagacggtcatctgatcgttaacggtaaaaaaatccgtgttaccgctgaacgtgatccggctaacctgaaatgggacgaagttggtgttgacgttgtcgctgaagcaactggtctgttcctgactgacgaaactgctcgtaaacacatcaccgctgatacgccagcggctctgcgctggctggaagaaaaccagcttgaagacgggcatgaatgtttgcttcgtcgcgtgatcagcagcgatggtcgctcccgtggtttcatcaacggtacagctgttcctctgtcacaactgcgcgaaacatctacgactaccggtgccaggcgagtcatacgtgcgatacgacgcataaacagcagcgatgccagcacgatccccacgctgatggcaataaccatatcaaacaacacggtcagcgacatgcacagcagcatgacgatgatgtccacgagaatcagaacgctcatcaccacgatctacaacggagatttgcggatgattcgccagaggaagttgtgcaaaacggctatcgccaggacttatggcaatgacgacacgtttcacccggggatgcgccaccagcgcatgcaccgagtgttcaagaatgcaccgcacttggaccaacctgtggtcacccttaacatctatccaaaagctgatgaaagcagcagcctgaaggcatcacgtgggacaagaggagcagcgtacaggccagcgcgccaaaatctttattctgcgtcgtctggaaagaaggatgaaaatcctgtgattgaatttaaaaacgtctccaagcactttggcccaacccaggtgctgcacaatatcgatttgaacattgcccagggcgaagtcgtggtgattatcgggccgtccggttccggtaaatcgaccctgctgcgctgcatcaacaaactggaagaaatcacctccggcgatctgattgtcgatggcctgaaggttaacgatccgaaagttgacgagcgcctgattcgccaggaagcaggtatggtgttccagcagttttacctcttcccgcatctgacagcgctggaaaacgtcatgtttggcccgctacgcgtgcgtggcgcgaacaaagaagaggcggaaaaactggcacgtgagctgctggcgaaagtcggtctggcagaacgtgcacatcactacccttccgaactttctggtggtcaacagcagcgtgtggcgattgcccgcacgctggcggtgaaacacaaaatgatgctgtttgatgaaacgactttcgattttgacccggaacttgtccatgaagtgctgaaggttatacacgaatttgctgaaaaagggattaccaatgactctctgacggaaaatcctgctaagacacaaggagaaggcggctgtttacaatctcaagaaagaggtcctcagagggaaccaaccccccggcaccttgattctggcctgtatgcttccagaactctgagaaaatacattctgttttttaacccacccagggggaggaacctcggatggcgccagatcacccagaacacagattaccgcttaaaccccatgttaagaaaagcctgtaaagctgacattcctaaattctgtcacggtatcctgactaaggccaaggatgattcagaattagaaggacaagtcatctcttgcctgaagctgagatatgctgaccagcgcctgtcttcagactgtgaagaccagatccgaatcattatccaggagtccgccctggactaccgcctggatcctcagctccagctgcactgctcagacgagaccaatgcgaatcatccacgccgggcgcagatgcggacgattgagcgccgccgcaacatgcatcaggccagaatcgttagtgacaatggctttacaggctgcaatcaggataaccgcttgatcaagctgtgtttcccccgccaggttccgacaccatgcctgctgctcggtattcaaagcggcaagaatctcattgcccgcttcatgatctttcgccgagccaaacagaaccacatcagtagtatctaa

SEQ ID NO: 142753 - DNA, 2310 bp, Homo sapiens
atggtgccacaccagcagcatcaccacatcctgatcatccaacacacacaaagcacacgcagcaacacagcaaacagcacaagcacacaagcaagagcacagtgcaagtgcaaggcacaggcacaggcacaggcacaggcacacagcagcagcagcagcagcacacagcacacaggcacagtgcacagtgcacaggcacaggcacaggcacaggcacaggcacaggcacaggcacagcatgtgttccatgttgttgcaacatgtgttcatccagcgtccaccaatatcccacgaccaaccatcacgaagcctggcaaagccatcacaagtggtcaacagcccttgggggtagccgtcacatgcagatgcagcctcaacctccacaatatcaatttgccgttagcagcatccacatgcccagcattatccaagatcggggcacaacctagtacagtgaccagcatgcgaattcaagtgcaatcagggcccaacagccgccggaggcagcagggcaggctttcaaaatccaaaagggaccgggaacaatcactgcggttaatcacaaccaggcacatcaaagcggcgcaatctaacgggccaagggcaaacaggcacaccattgttcggcaggccgacaacaaagcgcccaagcacaaacaaggggcccaggggcaaaccgggttaacaacaagggggccagcaggcatcttccgcccccgtaatacggcacagcagctgcgccagcgcccgatcgcgatgtccgcgtccggcgtcgtccagatcatactcgagggtcactggcgaacgcatagcctgcgcaacgggctttcccaccggcggacttccgcctgtaaagctcgcccaaggttgacaagcaaagctgagggattttgtggtggtaaccaggcctgccttacaagagcccctgaaggcagtgcagctgcatgctttaggtcgactctagaggacccccccacggtactgcggacatcactcggcattcagctcgctcctgcgctggtggcttgtagtgcctggctgagcgtcaacggcggcgagggtgacacgctggcgaaaatgcttttcggttatggactgctgcaactgctgtttatgctacgtctgatgccatggtatctctcccagccatttaatgcttcattctggagtttctcgttcggcgtatctgcactggcaaccaccgggaaaatagttagtcagaaccgagcgcgccgttttaatgaaagcagaggacaaagaatgatcattcgtgacgaaaactattttactgataaatatgaattaacccgcacacactctgaagtactggaagcggtgaaagtggttaaaccgggtaaaacgctggatctgggctgtggcaatggtcgtaacagtctttacctggcagccaatggttatgatgttgacgcatgggataaaaatgccatgagtatcgccaacgtcgagcgcattaaatccattgaaaatctggataatttacacacccgagtcgttgatctgaataacctcacatttgatagacagtacgattttattctttcgactgtggtgctgatgttccttgaggctaaaaccatccccgggttgattgccaatatgcaacgttgcactaaacctggtggttacaacctgattgtggcggcgatggataccgctgattatccatgtaccgtcggcttcccgtttgccttcaaagagggagaattacgtcgatattacgaaggctgggagagggtgaaatacaatgaagacgtcggcgagctgcaccgcaccgacgccaacggtaatcgtattaaactgcgtttcgccacgatgctggcacgacggtccgagcctactgtttatagttttatggcgatgactgcgggcaacgagcacgtcagggattgcaaaaagagacggagaaaagtggtgcccgctggcacaacgatctcgaacatcaggcgacctggcttgaaagtaatcaatagcggcaccgcgggcagtgggcgactgaatatcaatatccttaaccagcagcagtttgccgttgtaattcagtaccataccttttttaatttcgttcgctcttggcatcgaaaaattcctgtagtcgaaaatgtcaaaaatatcgcgacaaagtactcgcgacgggcctttcgggcaagtggtattcgcacttttgctggtgcaaaaaaggtggtactgtgcgcgctcatcaatccggtggttaaccttaagagaacaacgtatggaatgccgtccgggttgcggggcgtgttgcaaccacagacaatacgcagcgcgtga

SEQ ID NO: 142754 - DNA, 977 bp, Homo sapiens
tgaaaagcgttgaggagatcatgacgaccgttctgcgcgataaaccgttttacgatcgcagcggcggcggtttaacgctttcgggtggtgagccctttatgcagccggaaatggcgatggcgctactgcaagccagccacgaggcaggcattcatactgcggtagaaacctgtctgcatgtgccgtggaaatatatcgccccttctctgccctatatcgatctgtttcttgccgatttaaaacacgttgccgacgcgccgtttaaacagtggaccgacggtaacgccgccagagtgctggataacctgaaaaaactcgccgcagcgggcaaaaaaatcattatccgcgtgccgctgattcagggctttaatgccgacgaaacctctgtaaaagccattaccgattttgccgccgacgagctgcacgttggcgaaattcattttctgccctaccacacgctgggcatcaacaaatatcacttacttaatctgccctatgacgccccggaaaaaccgcttgatgcgccagaactgctcgactttgcccagcaggttaaccgcgaccttacgaggataacaaccatgaccacactgaaactggacacgctcagcgaccgcattaaagcgcacaaaaatgcgctggtgcatattgtgaaaccgccagtctgtaccgagcgcgcgcagcactataccgagatgtatcaacaacatctcgataagccgatcccggtacgtcgcgcgctggcactggcgcatcacctggcgaatcgcaccatctggatcaaacacgatgagttgatcattggcaaccaggcaagcgaagttcgcgccgcgccgatcttcccggaatatactgtctcgtggatcgaaaaagagattgatgatctggcagatcgtcccgggtaccgaactcgacgtgtacccgcccacatcatggtggagtattactcggctaccggtagaaccggcgcgcgataa

SEQ ID NO: 142755 - DNA, 1104 bp, Homo sapiens; identical to SEQ ID NO: 131993

SEQ ID NO: 142756 - DNA, 608 bp, Homo sapiens
atgattttcaatattcagcgctactcgacccatgatggccccggtatccgcacggtcgtatttcttaaaggctgttcgctgggctgccgctggtgtcagaacccggaaagccgcgcccgcacgcaggatctgctgtatgacgcacgactgtgtctggaaggctgcgagctgtgcgctaaggccgcgccggaagtgattgagcgcgcgctgaatggtttgcttattcatcgggaaaagttaaccccggagcatctgacggcgttaaccgactgctgtccgacacaggcattaaccgtgtgtggtgaagtgaaaagcgttgaggagatcatgacgaccgttctgcgcgataaaccgttttacgatcgcagcggcggcggtttaacgctttcgggtggtgagccctttatgcagccggaaatggcgatggcgctactgcaagccagccacgaggcaggcatagggattaatccgtttcgcctcccggaacattcggcatttgccgtatcagggtttcccgcgggaaccccgccactgcagataatctccccgcgacggcgaaatttgcccgatacgcacgtcagcagtaaaacgcacgccatggtccattg

SEQ ID NO: 142757 - DNA, 4086 bp, Homo sapiens; identical to SEQ ID NO: 123331

SEQ ID NO: 142758 - DNA, 1128 bp, Homo sapiens
atgaacggaattaaagcgccgattggcaccggaccgtggattttgcaggaatcgaaactgaatcagtacgatgtcttcgtccgtaacgaaaactactggggcgaaaagccagcgattaaaaagatcacctttaacgtcatcccggacccgactacccgcgcggtggcgtttgaaactggcgatatcgacctgctgtacggaaacgaagggttattaccgctcgataccttcgcccgctttagccagaatccggcttaccacacccaactgtcacagccgatcgaaaccgtgatgctggcgctcaataccgccaaagcccccaccaacgagctggcagtacgtgaagctcttaattacgcggtaaacaaaaaatcgctgattgataacgcgttgtatgggacccaggagaagaaaaaggaaacaacaaagaaaaaagaagaaagagaagaagagaacagaaagagaacaaagaaaaagaaacagcaaaaagaaaagacaatccaacgtatacagattacacacttcgattctcggtaccccgaaatcatcctgcctaccacacgctgggcatcaacaaatatcacttacttaatctgccctatgacgccccggaaaaaccgcttgatgcgccagaactgctcgactttgcccagcatcatggaccgcatcctcaaagatcatcaaatcgtggtcgacattccccacggagaagcgtggctgcgcgatgatgaagagcgtccgatgattttgattgcgggcggcaccgggttctcttatgcccgctcgattttgctgacagcgttggcgcgtaacccaaaccgtgatatcaccatttactggggcgggcgtgaagagcagcatctgtatgatctctgcgagcttgaggcgctttcgttgaagcatcctggtctgcaagtggtgccggtggttgaacaaccggaagcgggctggcgtgggcgtactggcaccgtgttaacggcggtattgcaggatcacggtacgctggcagagcatgatatctatattgccggacgttttgagatggcgaaaattgcccgcgatctgttttgcagtgagcgtaatgcgcgggaagatcgcctgtttggcgatgcgtttgcatttatctga

SEQ ID NO: 142759 - DNA, 1505 bp, Homo sapiens
atgggacataacggccagttcggcggttttttgaaagaagttcgcgaaaatggcggcatgcagagcgaattgatggatcaaacaaatctgccggttattttgctgggctttgatggttcgccggtttatgacgataccgctgtgcttaaccgctggctggacgttaccgaaaaagataaaaacagccgtagtgccacgttctacaacacgcttccactgcatgacggcaaccattatccgggggtcagcaaaacagcggattacaaagcgcgggcgcagaaattctttgatgaactgacgccttctatactgaagggatcctctagagtgactcaacggaaaccgcgaaataccggcgcggaaatcatcgacttacgcataggcgcaaagttaaatggcacgaggataatggccagaggcaccagtacccacgccgaccacagaccagcaacgccgagggcggctgtccaggcgagcaaaatcagactgctgataaataagctcacgcggtcaaaaagtcctggtcatagcacctgcccgtacttctcgcttttggcggtatccgcgcgcgcggtcctgttagcagacagctttaaagccggtggcaaagtgctttcctgcggcaacggcgataaaccgttttacgatcgcagcggcgccggtttaacgctttcggttggtgagccctttatgcagccggaaatggcgatggcgctactgcaagccagccacgaggcaggcattcatactgcggtagaaacctgtctgcatgtgccgtggaaatatatcgccccttctctgccctatatcgatctgtttcttgccgatttaaaacacgttgccgacgcgccgtttaaacagtggaccgacggtaacgccgccagagtgctggataacctgaaaaaactcgccgcagcgggcaaaaaaatcattatccgcgtgccgctgattcagggctttaatgccgacgaaacctctgtaaaagccattaccgattttgccgccgacgagctgcacgttggcgaaattcattttctgccctaccacacgctgggcatcaacaaatatcacttacttaatctgccctatgacgccccggaaaaaccgcttgatgcgccagaactgctcgactttgcccagcagtatgcctgccagaaagggttaaccgcgaccttacgaggataacaaccatgaccacactgaaactggacacgctcagcgaccgcattaaagcgcacaaaaatgcgctggtgcatattgtgaaaccgccagtctgtaccgagcgcgcgcagcactataccgagatgtatcaacaacatctcgataagccgatcccggtacgtcgcgcgctggcactggcgcatcacctggcgaatcgcaccatctggatcaaacacgatgagttgatcattggcaaccaggcaagcgaagttcgcgccgcgccgatcttcccggaatatactgtctcgtggatcgaaaaagagattgatgatctggcagatcgt

SEQ ID NO: 142760 - DNA, 2853 bp, Homo sapiens; identical to SEQ ID NO: 122824

SEQ ID NO: 142761 - DNA, 1073 bp, Homo sapiens
gggggggaaacatcgggcataaatgggcatgaagtaatggagtattagttgtgaatgtcaatttctttgtcacctgtattggtgacgccctgaaatcaagaatggcacgagactccgtgctgctactggaaaaactcgactgtcgcgtaaatttcccggagaaacagggatgctgcggtcagcctgcgatcaatagcggttatatcaaagaagcgattccagggatgaaaaatctgatcgccgcactggaggataacgacgatcccattatttcaccggctggctcttgcacctatgccgtaaaaagttacccgacgtatctggcggatgaacctgaatgggcatcacgtgccgcaaaggttgccgcgcgtatgcaggatctcacctcttttattgttaataaattaggggtagtcgatgtaggtgccagtttgcaagggagagcggtgtatcacccatcttgtagcctggcccgtaagctgggagtgaaggacgagccacttacgctgctgaaaaatgtgcgtggactggagctgttgacctttgctgaacaggatacctgctgcggatttggcggcacgttctcggtcaaaatggccgaaatatccggcgagatggtgaaagaaaaggttgcgcacctgatggaagtccgccctgagtatttaattggtgctgacttaatgaaatgtgagaatgatgaactgatcagccccgatagcttcttgccggtcgcgcacgaatttggtttatcgtcgagtatcgacatgtgggtcattgagcatacgctgcaatttatggctgaaaacagagcgaagatgcccgctcaccgttttgctattaatctgtctccaacctcggtatgtcaggctcgttttcctgttgaagtcagtcagttgctggctaaatatcagattgaagcgtggcaacttatttttgaagtcaccgaaagtaatgctctgaccaatgttaagcaggcgcaaatcaccttgcagcatcttcaggaattaggctgccagattgcgattgatgatttcggcaaccgtacgccagctatgcgcggcttaaaaatgtga

SEQ ID NO: 142762 - DNA, 516 bp, Homo sapiens
  misc_feature (1)...(516): n = a,t,c or g
agggccgnnnnccttttgatttcgcaccacantccgtgtggtggaattcgcggatgaaggccagggacccgcggcgctctccctgtggtcaggaagcagcccggagaccctaaaactccattggcctcatgtccagaactgaatcaggttcagctcgtggaagacattcaggatccggtctcgagacttctgggccgaccgtctcatgaggaccctgctgaggaacttcctgtcgaagtgggaccacctgtagggacagaccttgggtgtgagcctcaggcgcgtttaaaatgagggaagcagcccctgccacacgcccaggccgtccgccgttctcccgcctgtcctgttggatggaggccgttagacgcatatgaaactgcatgccgcctcctccagagggtggctcaggacacgcctaacggaattagagtattcgctggttatccggatcagaagggacggtggcctggccggacttagaggaaactctggggcacaaggaggtgatgcctg

SEQ ID NO: 142763 - DNA, 780 bp, Homo sapiens
atgacgctacgcgatgcgctctctctgtttgttgcgcggggatgcgaggtgctgccggtggtgaacatgctgggccagccttgcggctcgctgtattttcaggatctgctggtggaggcgttggcccgctgtttgctgccttgttcccgcgattgccacgacccgtttatcagccagaaagttttgcagctctggtactggctcatttctggctggctggcaatttcgagtttgtttgcggtgctcattggcactggtgccggaattgctgtcactcgcccgtggggcgcggaatatcgcccactggtggaaactattgccgccgttggacagacttttccgcccgtcgcagtgctggcgatcgccgttccggtgatcggctttggtctgcaaccagcgattatcgccttgatcctttacggtgtgctgcccgtcctgcaggcgacacttgccgggctgggagcgattgatgccagcgtgacagaagttgcgaaaggtatgggaatgagtcgtggtcagcgagtgcgtaaggtcgagctaccgctggcggctccggtgattctggcgggcgtgcgaacttcggtgattatcaacattggtacggcgacgatcgcctcaacggtaggggccagcacgctgggtacgcccatcatcatcgggcttagcggatttaataccgcgtatgtgatccagggggcgttactggtggcactggcggcgatcatcgcagaccgcctgtttgaaaggctggtgcaggcgcttagccagcacgcaaaataa

SEQ ID NO: 142764 - DNA, 1014 bp, Homo sapiens
atgaagccatttgagtcggaccgcaccaccgatcatgaatttccgccacctgctggagcagcatcaaatggcccgccaattgttcaagaccatcaatcgctaggctggccgaagcgaggcgctcatgatgacgtcaaggcagccttggatgtccaaagaagtggccctgacctcactagcactgggtcactcaaccgacggcccaaacgagacactgacccctcaacgtcacgtctaggagtacattgctcgctcgtcatgagacgaaggcagcaatctgtgtcctctagccgaatgctcgtgctaaccaagcgcgaggagctggccgaggtggatgtggactggctgatcgccgagcgccccggcaaggtaagaaccttgaaacagcatccacgcaagaacaaaacggccatcaacatcgaatacatgaaagccagcatccgggccagggtggagcacccatttcgcatcatcaagcgacagttcggcttcgtgaaagccagatacaaggggttgctgaaaaacgataaccaactggcgatgttattcacgctggccaacctgtttcgggcggaccaaatgatactgctggcgatcgccgttccggtgatcggcttcggtctgcaaccagcgattatcgccttgatcctttacggtgttgctgccgtcctgcaggcgacacttgccgggctgggagcgattgatgccagcgtgacagaagttgcgaaaggtatgggaatgagtcgtggtcagcgagtgcgtaaggtcgagctaccgctggcggctccggtgattctggcgggcgtgcgaacttcggtgattatcaacattggtacggcgacgatcgcctcaacggtaggggccagcacgctgggtacgcccatcatcatcgggcttagcggatttaataccgcgtatgtgatccagggggcgttactggtggcactggcggcgatcatcgcagaccgcctgtttgaaaggctggtgcaggcgcttagccagcacgcaaaataa

SEQ ID NO: 142765 - DNA, 1278 bp, Homo sapiens
ttaacccgcaaaaaggtaacgaataccatggagatacgcgtatttcgccaggaagatttcgaagaggtcatcaccctttgggagcgttgcgacttgctgcgtccgtggaacgatccggaaatggacatcgagcgtaagatgaaccatgacgtcagtttgtttttggtcgctgaggtaaacggtgacgtggtcggaacggtgatgggcggttatgacgggcatcgcgggtctgcttattatcttggcgtgcatccagagtttcgtgggcgtgggattgccaatgcgttgcttaatcggctggagaaaaagctgattgctcgtggctgcccgaaaatgcaggcaatccgctgacgatgctgactcgtccggcgaatgattttgtccgccagttttttggacgtagtgaactgggtgtgcgcctgctttcgttacgtagtgtggcggattacgtgcgtcgcgaagaacgagcagatggtgaggcactggcagaagagatgacgctacgcgatgcgctctctctgtttgttgcgcggggatgcgaggtgctgccggtggtgaacatgcagggccagccttgcggcacgctgcattttcaggatctgctggtggaggcgtaagcgtatgaagatgttgcgcgatccgctgttctggctcattgctctgtttgtggcgctgattttctggctgccttacagccagccgctgtttgctgccttgattcttggctgagaccccctgtttcttgtccctgaaggctggtgcttgcatcttgacttcctggtgcttgtagatttcctccacttccatggtccccagcccgcaaatttgtccatacacgtccccgcccaccggaaggtgtgggcagatgaggaaatcaacgggaatatccatcatactggtgggggtaaattccatccagtactgttcccacactaaaccttcacagtgataagagtgaatatccattggctttaagaatataatacagttgccatgcagtgttatttgttcgccattctttaaaagaattttcccacatccttgtacggtatacaccgcaacccatgagttggcgataagcggtttcttcttgtcccgcggccagatcacccggtaatgctcgtcggcgtaggtatgccagagcgagatcagagaaattccgctggagatcacatttgcgttaatcaaagaaaacaatccgttcaaggatcgacgcccgaatttaagaatctgatggcggaccgagcttttactttcccatattttgggtccggacat

SEQ ID NO: 142766 - DNA, 2584 bp, Homo sapiens
gcggcggcggcggtgggcggaccgtggcgcggggacgagcggccggttagcggcgtgtcggagccggtgtcacatgtgtgtggactcggggagggcggcggggggccgctcctcggggccgtctgcctgcaggaaggagtccacggacttgctgctgaggcggaagggcatcaggcggcggaaggtgccgggagagtagggaatctgcgtgcgggccctctgcgaggggaccaccgtctccccgggagacagccagggcggcagcctggccaggaggctgcggtccagggcctcgtccggagaaaacacagggttgtcaattcctgcaggggagtcggacgctgtgtccttggtgacactagccaggaactcgatccccccactcatctcctcatcatagttggggggctcctcggtgtctgaaagttccaagtctttctccttgatggtgaaattctgcgcagggctctccatgggcagcttcccattggggatgctgctgtttctccgcttctgggcacgctcccgcttgtacagcttggctgccttcttgttctggttgagccccagcttggtcgacttgaaggactccaggcgcttccgcatggtcctgtggaagatttcccggtcctgtttctcgtcctccgtgggcgtgagctcgtgtcggctgtacagatgcttgtactcctgccgcggcttgtacaggtactgctgtagcgtgtggtgcgtgaccatgtcctccgcgtcccggatgctccgccgtcgctgctccagagactgcatgtccaggcagacagcgctgacattttctctcaggaggtaggagacagaggcctccacggtggacgatcgtggcgtgaagtccacgttgaccacgttgtcggtgctgggggagcggatgaaggccagggacccgcggcgctctccctcagccacgtagctgatggcatccttcaggttcagctcgtggaagacattcaggatccggtctcgagacttctgggccgaccgtctcatgaggaccctgctgaggaacttcctgtcgaagtgggaccacttgtctctgagataattgtgcccgatctgtccggatatgtcctcgatggccgagaggatgtggtcgaaagcgcggccgtgcagcttctcgttgagccgaggttcccggtgctcgctcctcttcaccttcagccactgcaccagaggcttgatggtcaggccctggaagatgacggtgaagaacactacgatgatggtggtgctgacgaacaggttcttctccttgaccttgtctccatccagaagcaccaccagggcaaaggccacggccccgcgcaggcccccgtaggacaggaccacctggtcaatgggctccagctgcaccatgcggtagcggttcagaagccaggtctgcaggaccacaccgatggcccggtacacggagatgaagaccagcgtcaggagcacgaaggccgtgttccaggtccagatgaacgggttcacggccgagatacccaggaacatgaagatgatggtctcggcgctgctggccagcatcttcatggtgtagcgcacggtggtggccgactgctccgagatgttggccttcacatacttctgacagcagatgccacagaaggtgatggcgaggatggccgacagcgacagcatctcggacgtcaggtaggacaggtaggagatgatgaacacgaagccgggctcgatgatacgcacatgcttggtgaagcgcgtcaccagcgacagcaggaaggcgaagaccacccccaccagcgtgccccccaggctcaccacgaagaaggacactatgcccttcacgcagtccacgccagtcacgttgtcacctcccagcgccacgaaagattcaaacacattgtacagaaccacggtgactgcgtcgttcagcagcgactccccgaagacgatgatgaacaggacctcgttgacatggacctcctcaaacacggccaggacggccaccgggtccacagccgccatgaggctgccaaacaggaggaagtccagcagcccaatctgcaggtcgcccatgagcccactgaggaagacgccgtagagggacagcccggtggtggccgcgttccacacggtacccacgacggcgtacaacaggatggtccccaggttgccgaagaagaggcggttgggcatgaagtagccggcgtccagcacgatggggggcagcaggtagaagaagaagacggtgggcgtcagtgtgaaggacgcgatgtggtcggccgcccagacgatgccgcccagcaccaggcccagcacgatgagcagggcgctctcgggaaccacgctggtgaccttgtgggacaggtggaacccgatcttggccaagctggccacgaggatccagagcgcgatgacgtagggatcctgcacgtgggcccactcgaaggtgaccacctggaagcccccgctctcgccgtgcgcgccgccgggctccacctcgacgcccccggcccgcgccagcccgcccagcgccagcgccagcagcagcccccggtcggggccccgggccccgagtccccacattgccgcctgc

SEQ ID NO: 142767 - DNA, 793 bp, Homo sapiens
attggcctcatgtccagaactgaatcagccaggagccaccacagccctgtctgtgactctcagctcccgaggctgggctcttccccagggaagctgcatgaccatggccacatacaggaggtaggagacagaggcctccacggtggacgatcgtggcgtgaagtccacgttgaccacgttgtcggtgctgggggagcggatgaaggccagggacccgcggcgctctccctgtggtcaggaagcagcccggagaccctaaaactccattggcctcatgtccagaactgaatcagccagtgcccgagcctgctgcagccccgacccggcagagcaagcggctctgctacctcagccacgtagctgatggcatccttcaggttcaagctcgtggaagacattcaggatccggtctccgaagacttctgggccgaccgtctcatgaaggaccctggctgaagggaacttcctgtcgaagtgggaccacctgtagggacagaccttgggtgtgagcctcagtgaccctgtaggcgcgtttaaaatgagggaagcagcccctgccacacgcccaggccgtccgccgatctcccgactgtcctgtttgaaggaggccgttaaacgcatataaaactgcatgccgcctcctccagagggtggctcaggacacgcctaacggaattagagtattcgctggttatccggatcagaagggacggtggcctggccggacttacaggaaactctggggcacaaggaggtgatgcctgtcacttggacatgggtgcagcccgcacag

SEQ ID NO: 142768 - DNA, 2281 bp, Homo sapiens
gtggtcccacttcgacaggaagttcctcagcagggtcctcatgagacggtcggcccagaagtctcgagaccggatcctgaatgtcttccacgagctgaacctgaaggatgccatcagctacgtggctgagcaaactaatgcaggaacagaaaaccaaacattgcatgttctcacttatcagtgggagctgacaatgcaaaccatggaccccggaggggaccacacaattgtggcctgtaatggagtgtggtggacagcgcaggcatccgaaactcccagaagggccacacccactagagcttccaacccagtggccctacttctgcctgagctctgccggaagttagtagcagaccagactgtttcccgccttcatgaacctccctctctggcgccagaaacacccagtaagcccccacacaacatagctcagcaaagtaccaggacaggtgggcacaaggatgtcaatggcgtaatagtacacacacataaaggggtggagttaccgctggcgttaccggtatttctgcgcagcctgcgggtggtgatggtgcaaactgtaggtatggcggtgattgcggcgttaatcggcgcaggcggttttggtgcgctggttttccaggggctgctaagcagcgccattgatttagtgttgctgggggtgatcccggtaattgttctggcggtgcttaccgacgcgctgttcgatttgcttatcgcactgctgaaggaagggagtttttcggtgctgattggcacatctggctccggcaaatccaccaccctgaaaatgattaaccgcctggtggagcatgacagcggagagatccgctttgccggagaagaaattcgctcgctgccagtactggagttgcgccgccggatgggctatgccattcaatctattggcctgttcccccactggagcgtggcgcaaaacatcgctaccgtgccgcaattacaaaaatggtcgcgggcgcggattgacgatcgtatcgacgaattaatggcgctactggggctggagtcaaatttgcgtgagcgttatccgcatcagctttccggtggtcagcagcaacgtgtgggagtggcgcgtgcactggctgccgatccgcaagtcttactaatggatgaaccttttggcgcactggacccggtaacgcgcggcgcgttgcaacaagagatgacgcgcattcaccgtttgctggggcgtaccattgtgctggtcactcatgatattgatgaggcgctacggctggcagaacatctggtattgatggatcacggtgaagtagtgcagcagggcaatccgctgacgatgctgactcgtccggcgaatgattttgtccgccagttttttggacgtagtgaactgggtgtgcgcctgctttcgttacgtagtgtggcggattacgtgcgtcgcgaagaacgagcagatggtgaggcactggcagaagagatgacgctacgcgatgcgctctctctgtttgttgcgcggggatgcgaggtgctgccggtggtgaacatgcagggccagccttgcggcacgctgcattttcaggatctgctggtggaggcgtaagcgtatgaagatgttgcgcgatccgctggactggcatcattgctgtggttgcggcgctgattttctgggtgccttacagccagccgctgtttgctgccttgttcccacaactgccacgacccgtttatcagcaagaaagttttgcagctctggcactggctcatttctggctggtgggaatttcgagtttgtttgcggtgatcattggcactggtgccggaattgctgtcactcgcccgtggggcgcggaatttccgccccttggtgaaacttattgccggcggtggacagacttttccgcccgtcgcagtgctggcgatcgccgttccggtgatcggctttggtctgcaaccagcgattatcgccttgatcctttacggtgtgctgcccgtcctgcaggcgacacttgccgggctgggagcgattgatgccagcgtgacagaagttgcgaaaggtatgggaatgagtcgtggtcagcgagtgcgtaaggtcgagctaccgctggcggctccggtgattctggcgggcgtgcgaacttcggtgattatcaacattggtacggcgacgatcgcctcaacggtaggggccagcacgctgggtacgcccatcatcatcgggcttagcggatttaataccgcgtatgtgatccagggggcgttactggtggcactggcgcgatcatccagaccgcctgtttaa

SEQ ID NO: 142769 - DNA, 352 bp, Homo sapiens
cgttgacgcctggctgcaggattatatcagcggtatgaccgaactctatgcgtgggatgaataccgacgtctgatggccgtagacaattaccaagattttgtaaagacgaacactaattttttccctttggcgaaacttattttggaaatcaggggataacagcatctgcaaaaccggattcgggtaactgtgacccactgtggagaggccgtgaaactccgccatttgttggcgcagcatgattgggtaacgccaaatcaccacattcaaaaaactgccgatgatcaatcctccgacggttgccaggacgggcatcgccgtggggtattgctgaaaaacatcaaaaagcat

SEQ ID NO: 142770 - DNA, 534 bp, Homo sapiens
atgatccaacgcgcgaattgtcgaacagtacaacaggcattcagcgcccactggaaacagcaaactggtgataacgtggtgatcgtcagtcacacggtggctcaggtgaaggtggtcagctttcctctggggccaagccctggactggtttccccatcccttgtcagttccctgccctgtccacaagcccttaagctctcttctcagttataccacaggagccgctgtttattgatagttcatggatcccgctgtcgcgttgatcctgactttgatgagatttacgtcgaaggaagctccacctatcagttatttcaggagcgttttgacacgcgagtggtcagcgacaaaaagaccatcgatatctttgccgccacccgcccgcaggcaaaatggctgaaatgcgaactgggcgaaccgttgtttcgcatcagcaaaatcgcctttgatcagaatgacaaaccggtgcacgtctccgaactcttctgccgcgccaatcgcatcaccttaactattgataataaaagacattaa

SEQ ID NO: 142771 - DNA, 1440 bp, Homo sapiens
atgtctggcaggtgtaatcgatgccggcatgatgtgcactacaatggcatcgtttctgcgccgccgagcgtaatgacagttgtgggtcatgtagatttagccgggtcgtttaacctcgggctggcaggggtgattttctctttcatgttggtcaacttgtttgactcctccggtacgctgattggcgtgaccgataaagcaggtctggcggatgagaaggggaaattcccgcgcatgaagcaggcgctgtatgtcgacagtatctcttccgtgaccggttcgtttatcggtacttcttccgttacggcttatattgagtcctcttccggcgtatcggttggcggtcgtaccggtctgacggcagtggttgttggtctgctgttcctgctggttatctttctgtcgccgctggcggggatggtgccaggctacgctgcagctggtgcgctgatttacgttggcgtgctgatgacttccagtctggcacgcgtgaactggcaggatcttactgaatctggttcggcgtttattaccgccgtgatgatgccggtcgccttctcgattaccgaaggtatcgcgctgggctttatctactactgcgtgatgagtatactcatccggttccggggatctctagagtcgtggtatcccggtcggcggctattggcattgggtttgatcacaatattcggtttggtaaatggcatgacgttattgccggaagaaaaggtgctcgacgtcccgaccgatccaacttatggcgtgctgtcgcgtcaggatctcgaccagctgcaggcaggcgcgcgcgttgacgtggtcgacgacaaacgcaacccaatggacttcgttctgtggaagatgtcgaaagagggcgaaccgagctggccgtctccccggacgctcgataacgatacgagatacggacgctttagccagttccttagtcaggtactgacctgtacgtccgcaagacagattctacaacgtgtcgacactcttcctctttatttacatgcttatgcctttcatttaaatatgcggctggaaagagtgttgcctgctgatttacttgatatcgcaagtgaaaataatctacgtggcgtcaaaatccatgttctcgatggcgagcgtttttctcttggtaatatggacgataaagaactctctgcctttggggataaagcccgccgtctgaaccttgatattcatattgaaaccagcgcctcagataaggcatctattgacgaagccgtcgccatcgcgttgaaaactggggcatcgtccgtacgtttttatccacgttatgaaggtaatttgcgcgacgtattatcgattatcgctaacgacattgcctatgtacgggaaacgtatcaggacagcggcctgacttttacgatcgagcagcatgaagatttaaaaagtcatgagctggtgtcgctg

SEQ ID NO: 142772 - DNA, 648 bp, Homo sapiens
cctggagcaggccatccgctcactgatgcgggaaatggagctggaagggcgcggtattgtcagccatctcgaatggcgaatcgatgaatcagcgttaagcgaaaagtcgtagagcatcggtgcttcgtcgatttcaccttcaccaatgacgatggtgccgtcaatgttgaccgccgcgccgtccgcggtgtttttatcgccgcgtcctaaccatttgtagccagccagcgccgctgattcggtgacgcgggaaaattcgatggcaagttctcgtctcatagcaaactgctcagtggtttcgatgcctggacggaactcgcgctcaatcaccgctttctcttgcagctcgtcgaggttctgccagaagccaaccgccagcttcgccagtcgggcgcaggcgatggtggtcagcaggccgttttctgatttcaccgctttctcgccagtgttcatcagcataaagcagccagtgcttctccgccgtacctgttccgcataaaatgcccagtcccacggctgcgcgctaaacccgccctgctgcttatcgataaccgcctgtatggaggctaattcatcgctcgcacgttgacgcgccgctggaacaatttcccgcataaagttaagtgctgcttcaggtgtttttgccat

SEQ ID NO: 142773 - DNA, 3537 bp, Homo sapiens
atgtctcattgcatcggcggccccattatgagctccggcaacaatagcatccatatcataaccgaactgacggtacggctggtgcaggtgatgcgggttctcctcattaagctggttgccccattcatcatactccccgcgccaagccgtatagccgtcttcgctgatgagcgccagcggcaggccccggtggtcgcagtggtaaaaatgaacttttcgcgccgttgctccaacacgctggcggcaaaagatctaaaagtggtcgggcagaaagcgacgggcataaacgtttctggcgatgcgaatacagtgaatatcactggtaacgttctggttgataaggataaaaccgcagacaatgcggcggaatatttcttcgatccatccgtgggtatcaacgtttacggcagtgataataacgtgacgctggatggaaagttaactgttgtatcagacagtgaggttacttctcgtcagagtaatttatttgatggcagcgcagagaaaacgtcaggtctggttgtgattggcgatggcaataccgttaatatgaatggtggacttgaactgattggagagaaaaacgcgcttgcagatgggtcgcaggttacttccttgcgcacaggatatagttataccagcgttattgtcgttagtggtgagtcgtcggtatatctgaatggagatacgacaatcagcggagaattccctctggggtttgccggggttattcgggtacaggataaagctttgctggaaattggcagtggcgctacgctaacaatgcaggatattgacagttttgaacatcatgggacaagaaccctggatttgcccctatatttccagacatctgttatgtggcggtttacgaagcggtcccaaggatattgtctggcgatagcgggtttttaccgtgcaacgcatagtgccggtgaatggttcgcgatcgacccagtgcaactgctgggcaatcaacccgacagacatcagccgcgggtgttcatggccctgagcgacaaccagaatgttgttttcgacgtctttgtccaccacataccacggttcttcggtaccttctttggtgccaccgatacccagacctttacgctgaccgagagtgtgatacatcagcccctggtgctcaccaatttcatcgccatcgacggtaatgattttgcccggttgcgccgggagataacggcccaggaactcgcggaatttacgttcgccaatgaagcaaatgccggtagagtcttttttcttcgcggtgaccagaccaagatcttcagcaatcttacgcacctgcggtttttccagttcgccgaccgggaacaggctttgcgcaatctgctcatggctgagcgtataaaggaagtagctctggtctttattgctgtccagaccacgcagcaggcggctcttgccatcgacatcggcccgacgtacgtaatgaccgaatatccggattcggcgtgcgaccggctttatattcgggaaggaacagttcgtccagcagcggggactcaggatgaaaaagagaagatgcctcacctggatgaggacccagctcctccattctggcgtttggggcatttgatggcgtgccgctggagctgtaggacagagagagagacacagtcagatttcgggcagttccctaacgtccaattccctgaatccccacaaattcagctccacgttcccgtggccctttcgattcgaagtggccacaggaacctcggagctcatgcagatgagagttggaaaactctccttgggtgtgaggagctggagaaagatgttgagatcccggatcgagcggggcacacaatagtggtaccgtcctgctggtttgcggtggaacgccgcttcggccacgatcttccgtcgtctccagtggagtggctgacggataatggttcatgctaccgggctaatgaaacacgccagttcgcccggatgttgggacttgaaccgaagaacacggcggtgcggagtccggagagtaacggaatagcagagagcttcgtgaaaacgataaagcgtgactacatcagtatcatgcccaaaccagacgggttaacggcagcaaagaaccttgcagaggcgttcgagcattataacgaatggcatccgcatagggcaaatccagttatcatcattggttgtgcgtcagcttatgccgttgaattcaacaaagatttaatcgaagccgaagatcgtgaaaacgttaacctttcccaatttgaaactgatggccaattacccgtcggcaaatattcactaagcactctgattaataataagaggacgccaatccaccttgacctccaatggatgcttcatcccatagctttgcaggtcagcaatgacaagtttggcggcaagaattactgtgctgaatccaacggtaacgcagcggacacgctgatgctgtgtgcctcctgggtcgcccagacggatctttcggagttctttaagaaatggaatccgggcgcgaatgcttaccagctgccgggggcgagcgagatgagcttcgagggcggtgtgagccagtcggcttacaacacgctcgcgtcactcgatctgccgaaaccggaacagggaccggaaaccattaatcagcaataccccacggcgatgcccgtcctggcaaccgtcggaggattgatcatcggcagttttttgaatgtggtgatttggcgttacccaatcatgctgcgccaacaaatggcggagtttcacggtgaaatgtcgagtgcgcagtcaaaaataagccttgcgctaccgcgttcgcactggccacattgtcagcagagcatccggatacgtgaacatattccggctgggcatgagcgcaacggcggcaacctgacgctacgcctggatgacgccgatatcgcaccatatcacgacaatttccaccaacaaccgcgctatatcccgctcagccagcccatgcctttactggcaaatacaccgtttattgtcaccggctcgggcaaattcttccgtaacgtccagcttgatcctgcggctaacttaggcatcgtaaaagtcgacagcgacggcgcgggctaccacattctttgggggttaaccaacgaagccgtccccacttccgaacttccggctcacttcctttcccactgcgagcgcattaaagccaccaacggcaaagatcgggtgatcatgcactgccacgccaccaacctgatcgccctcacctatgtacttgaaaacgacaccgcggtcttcactcgccaactgtgggaaggcagcaccgagtgtctggtgagcatcccagaactggaaaaacagttcgaaggcaagatgtatggtcatctgaaaggtgaagtggctgatgccgtttccggtatgctgactgaattgcaggaacgctatcaccgtttccgcaacgatgaagccttcctgcaacaggtgatgaaagatggcgcggaaaaagccagcgcgcacgcttcccgtacgctaaaagcggtgtacgaagcgattggttttgtggcgaagccgtaa

SEQ ID NO: 142774 - DNA, 2442 bp, Homo sapiens
ctacttaggaatccacttgaagccatccgaaagcgtcagcagcagctgcgaggagccaaaatagataaacagcaccaccagaatttctggcaggccacgcagaatggttaccagcgctgaacctgcccacgcgacaggacgccattttgccgactcccataccgcaaagaacatcgccagcgccagcccgacaatcaatgcacaaacggcaaggccgacggtcatcccggcggcgcttgcccgtctctccctctcccgcagcagaagcagccaatgggtcacacttgagatgtctccttcaccctggggttctgagcaggtcccaggggccaaagtggggagggggaccgggaaggagaaacgggctacaatcttgcccatcgcacgaacaaagccgtagccctgcttcagcaaaagtgtcgtttgtttgcccgcgccaattgcgggatggcgggcgcggaactggctgattttctgccagtgcgcgacgctggcggcagatttaccgctaacatcctgccagttcatatccgaacgtgtaccttgcacagctgtggttttctcctccgaattcagagcatcaggtatcacgggaatccagctatgagtcgacctcgtaaaacgcctatgatcaaaagcgggtaatagtgctgcagcttccacaattgtgtcgcagtcagaaacattgtggacgatgaccagggcatttttgtcatgtgctattacaaacgccccgatctgtctgcgcagcaagcagatatcactgtggctgatggaagccacgtcattaatttttgtgccaacaactatctcgggctggcgaatcatcctgatctgattgcggcggcaaaggcgggaatggattctcacggtttcggcatggcttcggtgcgttttatttgcggcactcaggacagccataaagagcttgaacaaaaactggcggccttcctggggatggaagatgcgattctctactcttcctgctttgatgccaacggtggcctgtttgaaacgcttctgggtgcggaagacgccattatctccgacgcactgaaccacgcgtctattattgatggtgtgcgtctgtgcaaagctacacgctatcgctatgccaacaacggtgacgggcttagcggcccgacgtcgcggccgtgcagcctcggccgactccctgcgccccccggggttacgggtcggccgtgggaggatcatggcagacttcagcgccgtaggcggtttattgctgctggcaaccggattacgcatctgtggcattaaaatgttcggggtggtcaacatgcttccaggactccttctggcaatgcacaacttgattttccccatcgcagccggagatgtgtgcgtggctgcttgagctagcttctgatcaacctgcgcagtactcgagtcgccgacaaaactgacgattaacgtttgtttcacgccattttcaagggtgacttcaaccgtgttgtcttcctgcttactacttttcagatcaaaagtcgccagaccattaacatccgtttttgcggtgttttgattgttgaaggaagttgccgatccgcttaataccgcaaacgtgacggtatgatcattgaattggttgctggtacctccagcgtcaaacatggtggcatcggtcgccatgtcatcaataacttgtttaatattttcgaaagccattggcgtactttcgttattcaggtctttaccttcgccctgacgaacgactttgataaccggtttattagtcgctgcatcaatcagctcaccttcaaaatagaggcgagtatccatggtacggtggcctgtagccatttgcgtccccgcaaccactaatgcaacaggaaccacttcatagaattgcagcccttctttgctggtatctacaccggtaatggccccacggaaaatcagactacgcggcccagcggtggtaaccagtggtttacgctgcgctatcgcttctttcatttcggtgttggtatagttcaaaattttatccagaactttctgccctacctgggtcgacggtttcggtaccggataataagtgattgggttccagacgatgctgtcatatttgctttgatcaaaactcgggtctacccaacgtaaaacaggtttacgtgccagcatcgtggcgaaacgcagtttaatacgattaccgttggcgtcggtgcggtgcagctcgccgacgtcttcattgtatttcaccctctcccagccttcgtaatatagacgtaccttttgtgaccccgctgttgtcgtcctcatgtgcgctttatctcgtgttccacgtctcgaggtttttgccctaggtgagttttcgttttgttctgtctgtgggtgccgggcttctcgtgagcttttggcgttatccttggtccaatgttcgtgctcgtccggtggtccgtgcgagtgcttgcctaacat

SEQ ID NO: 142775 - DNA, 3363 bp, Homo sapiens
ctaaacgccatagtccatcaagcgttgatccagttttcccatatatttcggcgtaatgtcggcaatggcatgttgttcgccgccgcgcaccgcatgaacgtcatctttgctgaccggtaattgcttgatgtattcagaacggtccggactcagggccacttccggattgacgtgaacgtcgcgccattcggtgtacatatcagacaccgagttaaagccacggaaatcatcaaagccaacgttctgcggctgcgactctttgttttcccccatatgccattttccgatggcctgagtgacgtagccctgatcgtgcagcaactgcggcagcgtggttaacccttgcagcccgcccggttgcccgtacattggcggcatcagaatgccgtggtggatggagtattgtccggtgagaatggtggcgcgggttggggaagagcttggttgagaatacgccgaagttaaaatcagcccctggctggcaacggcgtcgatatctggtgtagggttacccaccgccacgccgccaccgttaaaaccgacgtccatccagcccacatcgtccagcaagaaaacaaccacattcggtttcttaccggtttttttctcaagttctgccagcttctgctgggtttctttatcctgcgccggatgctgcattactggcatcatattgtcggcaatagtggtcgccggtttaaccagatactggtttgggtgatcgtatccggcaaagcctttgcgtgcggtggcagttgacggggtatctgctgcgttggccccagcggcgcgggtaaaagctcgctgctgcgtgtactcaatctgcttgagatgccgcgctccggtacgctcaacattgcaagcaaccatttcgatttcaccaaaacaccctctgacaaagcgattcgcgatttgcgtcgtaacgttggcatggtgtttcagcaatacaacccgctgcatctttctggtgtcaagcagcagcgtgttgctattgcccgtgcgttgatgatgaacccgcaggtactgctgttcgatgaaccgaccgccgcactgaccccggaaattacggcacaaatcgtcagcatcattcgtgagctggcagaaacgaatattacccaggtgatcgtcacccacgaagttgaagtggcgcgtaaaaccgccagccgagtggtgtatatggaaaatggtcatatcgtagaacaaggcgacgcgagctgctttaccgagccgcaaaccgaagcatttaaaaactatctctctcacgccaaggcgtagaccttcgacgcgattacgcagtgctgtatcgagttgttcttcagtgatgacctgattttccagcagaatttgacctaacgggcgcaacgagcgggtatcgccagtcacgctggggaagtcatgcgttgttttatcccacgccacgcgacgtggatcgccgtgttgaagtacctgttttagcgcgcgccagttggccatgaagttaatcaggttgccccagaaaagacgcaggacggaaagcagcccctgcgtcaggccgtagtagccagtaacgaaaatcacccgctgcacgatgcggttaaccatcaaaccaaagtttagccacagcagggtcattaaccatgcgctgccgctgaaaatagaaaggaaatgccaggcatcgggccacaaactttcatacgccagcaacagcaaaagctggatcatcaccagcatcgcgaggaagctgacaaagttactgattgcccctttgcggtcgcgccagagaaagtagttcagcgtcaggctggaggtccatttatgggttttaaagccttggaaaacaatgccgatgatccagcgggatttttgtcgaaccgcagtcgaaaaggtatcggggaaatattcgcgcacgcagatcatgtttgatgtccgcgcgtgctgtaaaaatttacgctgctcgcgttctttggcttcgtccaccaccggaaaacggacaaaaatttccgtcatacctttttctttcaggcggaagccaatgtcgtaatcttcagtaatactctgcacggtgcaagcaatacggccttcacacagtggatcatcagcattaaagacacctcgctgtttattgtgatcggcgtggcggaactgacccgtcaggggcaagaaattattgccggtaacttccgcgcccttgagatctggagcgccgtggcggtgttctatctgattattaccctggtgctgagctttattctgcgtcgttttggcccaacccaggtgctgcacaatatcgatttgaacattgcccagggcgaagtcgtggtgattatcgggccgtccggttccggtaaatcgaccctgctgcgctgcatcaacaaactggaagaaatcacctccggcgatctgattgtcgatggcctgaaggttaacgatccgaaagttgacgagcgcctgattcgccaggaagcaggtatggtgttccagcagttttacctcttcccgcatctgacagcgctggaaaacgtcatgtttggcccgcaaattgctccaccgatgtggtggttttcgtgatcgattatcccgtgcgaaatattgcgcgatacatatatcgaccgccgtgtgacgtgctcgtgcatggatcagctcgataccggaacgaataggggcatagtagtcagctaccgccgccgtacgcgtaaagcgaggatcgatcacaatcagcttcgcgccgttgtgaattttggcttccatcgcccagcggaacccgaccgggtgagcttcagcggcgttaccgcccatcaccacgacgaggttggcgttcttgatgtcgacccagtggttggtcatcgcaccgcgaccaaatgttggagcaagacttgccagcgcgcgggagaatttttgcgttaaatagccggtttcgttactcgacgcggaagcacacagcatcccggtggagagccagcggttaacagtcacgccttcggcgttttgcgcaatgtagttagcatcgcggtcttctttcatcagtttggcgatgcgatcaaacgcctcttcccaactgatttgctgccatttatcagaacctggcgcacggtattccggaaacttcagacggctttcggagtggatgaaatccaccaggccagcgcctttcggacaaagtgcaccgcggttgaccgggtgatccggatcgccttcgatatggaagatagatgctttggcgttttttgctccgtcaccgaggctgtacatcaacagcccacagcctacggaacaataggtgcaggtattacgggtttcgcgggtgcgcagcagtttatactgccgggtttccgcgagtgctacgctgggtgcaaaacccagtgccgctgccgtggtgcctgccat

SEQ ID NO: 142776 - DNA, 4381 bp, Homo sapiens
tgattgcggcggcaaaggcgggaatggattctcacggtttcggcatggcttcggtgcgttttatttgcggcactcaggacagccataaagagcttgaacaaaaactggcggccttcctggggatggaagatgcgattctctactcttcctgctttgatgctaacggtggcctcgtttgaaacgcttcttgggtgcggaagacgccattatctccgacgcactgaaccacgcgtctattattgatggtgtgcgtctgtgcaagagctaaacgctatcgctatgccagcaacgatatgcaggagctggaagcacgtctgaaagaagcgcgtgaagccggtgcgcgtcatgtgctgatcgccaccgatggtgtgttctcaatggacggcgtgattgccaacctgaagggcgtttgcgatctggcagataaatatgatgccctggtgatggtagacgactcccacgcggtcggttttgtcggtgaaaatggtcgtggttcccatgaatactgcgatgtgatgggccgggtcgatattatcaccggcctggcggttggcttctggcagaacctcgacgagctgcaagagaaagcggtgattgagcgcgagttccgtccaggcatcgaaaccactgagcagtttgctatgagacgagaacttgccatcgaattttcccgcgtcaccgaatcagcggcgctggctggctacaaatggttaggacgcggcgatgaaaacaccgcggacggcgcggcggtaaacgccatgcgtattatgctcaaccaggtcaacattgacggcaccatcgtcattggtgaaggtgaaatcgacgaagcaccgatgctctacattggtgaaaaagtcggtactggtcgcggcgacgcggtagatattgctgttgatccgattgaaggcacgcgcatgacggcgatgggccaggctaacgcgctgtcggtgctggcagtaggcgataaaggctgcttcctcaatgcgccggatatgtatatggagaagctgattgtcggtccgggagccaaaggcaccattgatctgaacctgccgctggcggataacctgcgcaatgtagcggcggcgctcggcaaaccgttgagcgaactgacggtaacgattctggctaaaccacgccacgatgccgttatcgctgaaatgcagcaactcggcgtacgcgtatttgctattccggacggcgacgttgcggcctcaattctcacctgtatgccagacagcgaagttgacgtgctgtacggtattggtggcgcgccggaaggcgtagtttctgcggcggtgatccagcgcattagatggcgacatgaacggtcgtctgctggcgcagtcatgacgtcaaagtgcgacaacgaagagaatcgtcgcattggcgtagcaggtagctggcacgctgcaaagcgatgggcatcgaagccggtaagtattgcgcctgaagcatatggcgccagcgatacgtctcggtaccaatattccctgatacttttcgactgcggttcgacaaaaatcccgctggatcatcggcatgttttccaaggctttaaaacccataaatggacctccagcctgacgctgaactactttctctggcgcgaccgcaaaggggcaatcagtaactttgtcagcttcctcgcgatgctggtgatgatccagcttttgctgttgctggcgtatgaaagtttgtggcccgatgcctggcatttcctttctattttcagcggcagcgcatggttaatgaccctgctgtggctaaactttggtttgatggttaaccgcatcgtgcagcgggtgattttcgttactggctactacggcctgacgcaggggctgctttccgtcctgcgtcttttctggggcaacctgattaacttcatggccaactggcgcgcgctaaaacaggtacttcaacacggcgatccacgtcgcgtggcgtgggataaaacaacgcatgacttccccagcgtgactggcgatacccgctcgttgcgcccgttaggtcaaattctgctggaaaatcaggtcatcactgaagaacaactcgatacagcactgcgtaatcgcgtcgaaggtctacgcctgggcggttcaatgctgatgcaggggctgattagcgccgagcagctggcacaggcgctggcagagcaaaacggccatgattgggtaacgccaaatcaccacattcaaaaaactgccgatgatcaatcctccgacggttgccacgacgggcatccgccgtgggtattgctgagctatacatatcgaatcgagctcggtacccaacgcgccaatgaaaatggcgaaagctttgtggcgatggtggatcgcatgatcgccgaaatgcacaaagattttgatgctttgaacattctgcgcccggatatggagccgcgcgcgacgcaccatatcgcagaaattattgaactcactgaacaactgatcgccaaaggtcacgcttatgtggcggacaacggcgacgtgatgttcgacgtcccgaccgatccaacttatggcgtgctgtcgcgtcaggatctcgaccagctgcaggcaggcgcgcgcgttgacgtggtcgacgacaaacgcaacccaatggacttcgttctgtggaagatgtcgaaagagggcgaaccgagctggccgtctccgtggggcgcgggtcgtcctggctggcacattgaatgttcggcaatgaactgcaagcagctgggtaaccactttgatatccacggcggcggttcagacctgatgttcccgcaccacgaaaacgaaatcgcgcagtccacctgtgcccatgatggtcagtatgtgaactactggatgcactcggggatggtgatggttgaccgcgagaagatgtccaaatcgctgggtaacttctttaccgtgcgcgatgtgctgaaatactacgacgcggaaaccgtgcgttacttcctgatgtcgggccactatcgcagccagttgaactacagcgaagagaacctgaagcaggcgcctggtacccatcagcactactgccagattctccagcatcgaaaacgccactgcgccgggcaaggtttccggtttacccgcaatcgccagatccgcttcaccagtgaccaccttttccatcgcatctgccgcatcaccagtagtaagtttaatctccaccgacgggtgttccgcgcggaagcgatccagaatcggcggcagatggctcacatcgcgcccattttttccctcaacatcctgttcctgttcgtctttaataccaccacgccgctgcagtggctgatggcttctgacgtggtggactacgaggagagccgcagcggtcgccgcctcgacgggctggtgttctccacctacctgttcagcctgaagattggcctggcgattggcggggcggctagtgggctggatcctggcgtacgtcaactattccgccagcagcagcgtgcagccggttgaggtgctcaccaccatcaaaattctgttctgcgtggtgccggtggtgctctacgcggcgcatgttcatcatgctgtcgctctacaagcctcaccgcatgcccgcgctggcaggcgcatcacggaccgcaggcacctcacctcaccacttcgccccacacatcgcacccgtatccgcacgctcgcgctctcacaccgctgccgcccgccgacatataaggaagataagaaagttctttttcgttcccgcctgacaactgccagcggcgggtattatcagaacttcgctaacaatctcaaccgcttctttctcaatctgcttgcgatgttcttcaccgaggaagctttcgcagtagatcttatatgcgtcttccgtgcctgacggacgcgcggcgaaccagccgttgtcagtcatcactttcagaccgccaatagaagcaccgttgcccggagcagcagtcaggcgcgcggtgatcgggtcacctgcacagctgaacatccccggaaacagcgaagtgttccatctctgccgggtgatgtatctcgataaagagccgctgtttattgatagttcatggatcccgctgtcgcgttatcctgactttgatgagatttacgtcgaaggaagctccacctatcagttatttcaggagcgttttgacacgcgagtggtcagcgacaaaaagaccatcgatatctttgccgccacccgcccgcaggcaaaatggctgaaatgcgaactgggcgaaccgttgtttcgcatcagcaaaatcgcctttgatcagaatgacaaccggtgcacgtctccgaactcttctgccgcgccaatcgcgccgtccttctattccacccgccttggcctcccaaaatgctgcgatcacagacgtgaaccaccgcgcttgccctgtactgcagattaa

SEQ ID NO: 142777 - DNA, 2916 bp, Homo sapiens
  misc_feature (1)...(2916): n = a,t,c or g
atgatgttacggatgtattgcgcgttaaccggaagcggtcgatattcgagcgcactttctgccgcacgaacggaagacagcgcatacgttgcacaatcatccatgcatcgcgcggatcgcggtttttcacgatctcttccagtgccgcggcccacagtggggttacccccgcgggaaaaagggcccacaaagtggccttttcccgaaacgacgccattttcgatttcgcaatcgatgcgtaaatgcccctcaatacgggttaccggatcaatagtatctctggctcatgcttgctcgcctcatgacgattatgatcgttgttttaaaggaccatctgcggtcgcgataattgcctgtcctttgctgcctgcgatatcaatccccttgttgcccccctcagaagcgccaaaggtttcgatcactttgccctcagtcggccagcgccaggtggagataggcgtactggttgatgtactgctgacagtcggctcggttgtgcttgctgttggtaccgttacaggcgctgtgaccgtggtcgcagttggcttgttgttcggcaacattttgttagcactctgttcacccgaagactcagaatacgtaattgtcggttgcgacgcaacagcaacggtggaattttgtgcaggcttgatcacaactccttgctctgctgcgtcggcctggcgcatccagtatctcttgcgcccggtcatcgtgacaggagaggaaatagccttagctacgcaaaccacgtccacgttggatcagcgaccaacagatcaaataaaacgccacaataaagaccaccagtacgccaaaggtagtgaccagcggaacatcattgataccgaggaagccgtagcggaaaccactgatcatataaacgattgggttcaggtgcgacaggccctgccagaaacggggcaacaaaannggatccccaacggcgcgaaaaaattcgcccactccaatggtcaactgaacgacaccctgaccgaagtcgcggatggcacactgcgcgaccttgggcatgatgtccgcatcgttcgcgccgacagcgactacgatgtcaaagcggaagtacaaaactttctctgggctgatgtggtgatctggcagatgccaggctggtggatgggcgcgccgtggacagtgaaaaaatacattgatgatgtattcaccgaaggtcacgggacgctgtatgccagcgatggtcgtacccgcaaagatccgtcgaaaaaatacggttccggcggcctggtacagggcaaaaaatatatgctttctctgacctggaacgcaccaatggaagccttcaccgaaaaagatcagttcttccacggcgttggcgttgacggtgtgtatctgccgttccataaagcaaaccaattcctcggtatggaaccgctgccgacatttatcgctaatgacgtgataaaaatgcctgatgttccccgctatactgaagaatatcgcaagcatcttgtggaaatttttgaaatccgtactcgtcctggtcaacatcaccgtcaggcggtattggatcagtttgctaaaatcgttccaaccgtactgaaagaagaaggttgccacggctatgcgccaatggtggattgcgcagctggcgtgagtttccagtctatggcaccggattctatcgtgatgattgagcagtgggaaagcatcgcgcatcttgaagcgcatctgcaaaccccgcacatgaaggcgtatagcgaagccgtaaaaggtgacgtgctggagatgaatatcnctgcgggatctccgagcgttcttgttgtcctgcccccggcgaaacgtacaccggggtgttttcagacccgtacgtctattttgtgttccctatggtttaagtacgcccgagggaaatttacccaccggggagcgggtgctggcgcggcttttcaaccgaccggattcgtggtcgatgacgccatcgtggtgatcgaaaacatttcccgctatatcgaaaaaggcgaaaaaccgttggcggcggcgctcaagggcgcaggagggatgatgcgccatttacgcaatatttttaatctgggtatcaaagagttgcgcagtctgctcggtgataaagcgatgctgacgctgattgtcttctcgtttacggtgtcggtgtattcgtcagcgaccgttacgccaggatcgttgaacctcgcgccgatcgccattgccgatatggatcaatcgcagttatcgaaccggatcgttaacagcttctatcgtccgtggtttttgccaccggagatgatcaccgccgatgagatggatgccggactggacgccggacgctataccttcgcgataaatattccgcctaattttcagcgtgatgtcctcgccggacgccagccggatattcaggtgaacgtcgatgccacgcgcatgagccaggcatttaccggcaatgggagcatgaggctgctcgtccgtcgccgcaacaccagtaccaaccgccttatgcgtctgcgcagccgcgtcaaccggtccagcagccgcctgaagcgcaggtaccgccgcaacatgctccgcatccagcgcagccgcattcaacaagcgggcttcatttttggcgatatgaatatttaccatcgtcatcttagcccggatggcagcggcccggcgttattcagcctggcgaatatggtgaaaccgggaacctttgatcctgaaatgaaggatttcactactccgggtgtcactatctttatgcaggtaccgtcttacggtgacgagctgcagaacttcaagctgatgctgcaatctgcgcagcatattgccgatgaagtgggcggtgtcgtgcttgacgatcagcgccgtatgatgactccgcagaaattgcgcgagtaccaggacatcatccgcgaagtcaaagacgccaacgcctga

SEQ ID NO: 142778 - DNA, 484 bp, Homo sapiens
  misc_feature (1)...(484): n = a,t,c or g
atgaccgagattacgacggtgatcatcaaagccaatccagaccgaggtcacaacgcccggaccgtaacccgagaaccacgcatctttcgaactgttagtggtcccggttttcccgccgatatcgcgacgctgcaannnnctaattatacgccagccagtaccctgccagcctggctcaccaaagatattggtgttcaaagcactcttaatcaggaatgccagcggagtgtagatgacgtgcggtgtcatacggttctggaacctgttaaaaccagctgtgcttttccaaagcaccccattaggcttaaaaaggttcgggactttccccaaggcggtggtcccaggccggcaaaggaagtttggcccaaagcgggtttccggccccaggttacgggcccatccttttcaaaatcccacagccaccaatttcccccccgaggagtttcccggcctggaggtctggcaaggttggcttttgccaaag

SEQ ID NO: 142779 - DNA, 1524 bp, Homo sapiens
atgatcccaatcacctggccgaaatttgccgaactgcacccgttctgcccgccggagcaggctgaaggttatcagcagatgattgcgcagctggctgactggctggtgaaactgaccggttacgacgccgtttgtatgcagccgaactctggcgcacagggcgaatacgcgggcctgctggcgattcgtcattatcatgaaagccgcaacgaagggcatcgcgatatctgcctgatcccggcttctgcgcacggaactaaccccgcttctgcacatatggcaggaatgcaggtggtggttgtggcgtgtgataaaaacggcaacatcgatctgactgatctgcgcgcgaaagcggaacaggcgggcgataacctctcctgtatcatggtgacttatccttctacccacggcgtgtatgaagaaacgatccgtgaagtgtgtgaagtcgtgcatcagttcggcggtcaggtttaccttgatggcgcgaacatgaacgcccagcgtcgcgatatcggcgggaaaaccgggaccactaacagttcgaaagatgcgtggttctcgggttacggtccgggcgttgtgacctcggtctggattggctttgatgatcaccgtcgtaatctcggtcatacaacggcttccggagcgattaaagatcagatctcaggttacgaaggcggtgccaagagtgcccagcctgcatgggacgcttatatgaaagccgttcttgaaggtgtgccggagcagccgctgacgccgccaccgggtattgtgacggtgaatatcgatcgcagcaccgggcagttagctaatggtggcaacagccgcgaagagtatttcatcgaagtcaacgaaattgtggtgaacccgaatgcgaccctcgattggcaactggcattacgccaggcagcaggaaaaaccgatttagcgcgcgatatgctgcaaatgttactcgatttcctgcctgaagttcgcaacaaagttgaggaacagctggttggagaaaacccggaaggcctggttgatttgattcataaactgcatggcagttgcggctatagcggtgtgccacgtatgaagaatctctgccaactgatcgaacaacagctacgtagcggtactaaagaagaagatttggaaccggagctgctggaactgttggacgagatggataatgtcgcgcgcgaagccagcaaaattctcgggggccatgataacgggggaaatgctcttttgcacaaggctctccccccgggaaatgttggaaaatgggccatggccccaattccccccccttttccccaaccaggaaagtctgtaaccatctgttggaaacccgcgtcgtcagaaaaccggtcaaatctgcttgaaatcttcctgcgtgagcttatctctaacgcctccgatgcggcggacaagctgcgtttccgtgcgctctctaacccggacctgtacgaaggtgatggcgaactacgcgttcgtgttgatgaagtactgagcccagcttccgttccctatagttaa

SEQ ID NO: 142780 - DNA, 1279 bp, Homo sapiens
atgagtgaattacagcgactggaaaaaccgtataagcggatcatgctggttggtggcggtaatatcggtgcagggctggcgcgtcgtctggaaaaagattacagcgttaaactcatcgaacgtaatcagcagcgcgctgccgaactggcggaaaagttacagaatacgatcgtcttttttggtgatgcgtcggatcaagaactactggccgaagaacatatcgatcaagttgatctgtttattgccgtcaccaacgatgacgaggccaatatcatgtccgccatgcttgccaaacgtatgggtgcgaaaaaggtgatggtattgatccagcgtcgcgcttatgtggatctggttcaggggagcgttatcgatattgcgatttcaccacaacaagcaactatttctgcgttgcttagccatgcacaacaagcatcaacaataaggattaaagctatgggttttctttccggtaagcgcattctggtaaccggtgttgccagcaaactatccatcgcctacggtatcgctcaggcgatgcaccgcgaaggagctgaactggcattcacctaccagaacgacaaactgaaaggccgcgtagaagaatttgccgctcaattgggttctgacatcgttctgcgtgtaaaaaaagcccagcgtgaatatgccagtttcactcaagagcaagtagacaaaatcttccgcgccgccgctctggctgctgcagatgctcgaatcccactcgcgaaaatggccgttgccgaatccggcatgggtatcgtcgaagataaagtgatcaaaaaccactttgcttctgaatatatctacaacgcctataaagatgaaaaaacctgtggtgttctgtctgaagacgacacttttggtaccatcactatcgctgaaccaatcggtattatttgcggtatcgttccgaccactaacccgacttcaactgctatcttcaaatcgctgatcagtctgaagacccgtaacgccattatcttctccccgcacccgcgtgcaaaagatgccaccaacaaagcggctgatatcgttctgcaggctgctatcgctgccggtgctccgaaagatctgatcggctggatcgatcaaccttctgttgaactgtctaacgcactgatgcaccacccagacatcaacctgatcctcgcgactggtggtccgggcatggttaaagccgcatacagctccggtaaaccagctatcggtgtaggcgcgggcaacactccagttgttatcgatgaaactgctgatatcaaac

SEQ ID NO: 142781 - DNA, 1093 bp, Homo sapiens
atgtcatcacgggcttgtcgctgttgttattattcgtcgcgcttgctcatgccattggctggcctgcggaccgcggtatgctcaccatctggctggcgcatgtcactttttgtacggcttatgtggcggtcgttatttcttcaagattgcgggaactggatcgctcgatcgaagaagcagcgatggatctcggtgcgacgccgctgaaagtgtttttcgtcattacgctaccgatgatcatgcccgcgatcatttctggctggttactggcttttactttgtcgcttgatgatctggtgatcgccagctttgtttccgggccgggagccaccacgttaccgatgctggtcttttccagcgtgcggatgggggtgaatccggaaatcaacgccctggcatcattgatcctgggcccgcattcggtctggattggctttgatgatcaccgtcgtaatctcggtcatacaacggcttccggagcgattaaagatcagatctcaggttacgaaggcggtgccaagagtgcccagcctgcatgggacgcttatatgaaagccgttcttgaaggtgtgccggagcagccgctgacgccgccaccgggtattgtgacggtgaatatcgatcgcagcaccgggcagttagctaatggtggcaacagccgcgaagagtatttcatcgaaggtacgcagccgacacaacaggcagtgcacgaggtgggaacgaccattatcgataatggcgaggcacaggaattgttctgattaaaaaggcgcttcggcgccttttcagtttgctgacaaagtgcacttgtttatgccggatacggcgtgaacgcgttatccggctaacaaaatcgtgaaaactcaataaattgcagaaaccccataagcctgataaacattgtgcatcaggcaaacttcacgcatttacactcgcccctgccctttcaaccattcgcgcacgaggaacagcgcactgacattgcgcgcttcattgaagtcagggtcttccagcaaatccatcatatgcgccagcggccagcgcacctgtggtagcggctctggctcatcgccttccagtgattccgggtaga

SEQ ID NO: 142782 - DNA, 1472 bp, Homo sapiens
atgacgcaggatgaattgaaaaaagcagtaggatgggcggcacttcagtatgttcagcccggcaccattgttggtgtaggtacaggttccaccgccgcacactttattgacgcgctcggtacaatgaaaggccagattgaaggggccgtttccagttcagatgcttccactgaaaaactgaaaagcctcggcattcacgtttttgatctcaacgaagtcgacagccttggcatctacgttgatggcgcagatgaaatctggcaaacttgtaaggcccagaggtgccaaagcccctgttcaaagaccttaggtgcacagcctgagaacccagatctatcacagataagcagatttccacaggacgagagaaggatatccaattgctcatcagggaaggccgcaaaccctgtgctgtactggtcaaaaattgaagagaaaattgccagtgagccagcctcgatttattctcccatgactctgaaggatttcagtaaatttgtgaaagatgaaattggctttagttacaccggctattcccgttctggtggggggaccgcctctcatggttcacctaaatcatgggcgattggttctctgggccgctttggtaacgaatactccggctggtttgatttgcagttaaaacaacgtgtctacaacgaaaacggcaaacgggttgatgccgttgtgatgatggatggtaacgttggtcagcagtactctaccggctggtttggcgataacgccggtggcgagaactatatgcagttctccgatatgtacgttaccaccaaaggtttcctgccctttgcgccagaggctgatttctgggtgggtaaacacggtgcgccgaaaattgaaatccagatgcttgactggaaaacgcagcgtactgatgccgcagcgggtgtaggtctggaaaactggaaagtcggtccgggtaaaattgatatcgcgctggttcgcgaagatgtcgatgattacgatcgcagcctgcaaaacaaacagcagattaataccaataccattgatttacgctataaagatatcccgttatgggataaagccaccttaatgccgcgtatcccgactcaacggtatggtctggcaaaagcgttcttgaagcggacgtcgctatatgccaacgcgatgggtccggaaggtgtgcgtgttaacgccatctctgctggtcaaacacgtactctggcggctcccggtatcaaaagactcccgcaaaaatgctggctcattgcgagcccgttaccccgattcgccgtaccgttactattgaagatgtgggtaactctgcggcattcctgtgctccgatctctctgccggtatctccggtgaagtggtccacgttgacggcggtttcagcattgctgcaatgaacgaacgtgacccgttcacagaccttcaccggtaccggatgaatctgaacatgatgaattatggtgctcaaaggaacatg

SEQ ID NO: 142783 - DNA, 419 bp, Homo sapiens
gcggccgcggccgcgcccgcgtcacatgctccaggggactcaccgccagcgccacctccatgccgggccgggtgtcgcgcgccggcgctggggcggaatggctcggagagccgcgcgcggacggccccgcctgcggctctgcatcttctcccggagccgccagctcgggctccggctccgcttcctcagcagcactgtgaatgaaggggaccaggtgaagaccgtggctgaggtcaggccatttctgtggaggactgtcatccttctccttctcctcttccttctcctcggggaagaaaagaccttccaattccccaggctcaatgaggctgggctcacctccatccggtgctggtagggcagggggcattgtcactgttgcctgctgagccagactctccacctgcaataccaagcag

SEQ ID NO: 142784 - DNA, 2806 bp, Homo sapiens
  misc_feature (1)...(2806): n = a,t,c or g
cccagcggttggaaaacctcggggcccaaattgaagggtagtgaaaagcaggtgtgggacagtgaagaacccatctttctccctctactcacggaatttctgtctattaaggtgacagaactgaagggcctggccaaccatgtggttgtgggcagtgtctcctgtgagaccaaggacctgtttgccgccctgccccaggttgtggctgtggatatcaatgaccttggtaccatcaagctcagcctggaagtcacatggagccccttcgacaaggatgaccagccctcagctgcttcttctgtcaacaaggcctccacagtccccaagcgcttctccacctatagccagagcccaccggacacaccctcacttcgggaacaggctttcttattaacatgctgcgacggcaggagggagctgggagaatggggacagcatggtccctgttcatctggatttttcagacggattcttccagcccacagctctcaggcactgcccgccactcaccagcccctaggcccctggtgcagcagcccgagccccttcccatccaagttgccttccgcaggcctgagacccccagctctgggcccttggaatgaaggaaggggcccgtggcccaagtccctggcaaaatgggcatgcaccctacagtcggactctgagccacatcaagtgaggctagtgtagatgctgccttggctgaggcttcaagttgngaagcgttggcccagaaagcctagcctggggacctagcccacctacacacccagctcccacccatggagagcaccccagtcctgttcctcctgccctggaccctggccactctgccacaagctctaccctcggtacaacaggctctgtccccacatctacagaccctgccccatctgcacacctagactcagttcataagtccacagactctggcccttcagaactgccaggccccactcacaccagggactgtcggaaaggccttaagtcagccacaagtggcttccaccaaggaactccccaagccattcagaagtcccagtcctattcgtatgcacagcagcagaatgtttctgtaccaatgccgcagctggagcaggcaaatcaggcgttagtggcgaagactggcgcgcaggagtacgcaccgcacgtcatcaacactccgctggcattcctgattaagagtgctttgaacaccaatatctttggtgagccaggctggcagggtactggctggcgtgcaggtcgtgatttgcagcgtcgcgatatcggcgggaaaaccgggaccactaacagttcgaaagatgcgtggttctcgggttacggtccgggcgttgtgacctcggtctggattggctttgatgatcaccgtcgtaatctcggtcatacaacggcttccggagcgattaaagatcagatctcaggttacgaaggcggtgccaagagtgcccagcctgcatgggacgcttatatgaaagccgttcttgaaggtgtgccggagcagccgctgacgccgccaccgggtattgtgacggtgaatatcgatcgcagcaccgggcagttagctaatggtggcaacagccgcgaagagtatttcatcgaaggtacgcagccgacacaacaagcagtgcacgatgtgggaacgaccattatcgataatggcgaagccctgactatcaatcgcagagaccttggcagagagcattgtggctcaagctttggcaggcctgagtgcagcccgggatcagctgcccagggctatttcagggtccccttagttagcatcaatgggatcatggctgaggccctacctgccatctttggctgcttggtattgcaggtggagagtctggctcagcaggcaacagtgacaatgccccctgccctaccagcaccggatggaggtgagcccagcctccttgagcctggggaattggaaggtcttttcttccccgaggagaaggaagaggagaaggagaaggcacaacaagcatcaacaataaggattaaagctatgggttttctttccggtaagcgcattctggtaaccggtgttgccagcaaactatccatcgcctacggtatcgctcaagcgatgcaccgcgaaggagctgaactggcattcacctaccagaacgacaaactgaaaggccgcgtagaagaatttgccgctcaattgggttctgacatcgttctgcagtgcgatgttgcagaagatgccagcatcgacaccatgttcgctgaactggggaaagtttggccgaaatttgacggtttcgtacactctattggttttgcacctggcgatcagctggatggtgactatgttaacgccgttacccgtgaaggcttcaaaattgcccacgacatcagctcctacagcttcgttgcaatggcaaaagcttgccgctccatgctgaatccgggttctgccctgctgaccctttcctaccttggcgctgagcgcgctatcccgaactacaacgttatgggtctggcaaaagcgtctctggaagcgaacgtgcgctatatggcgaacgcgatgggtccggaaggtgtgcgtgttaacgccatctctgctggtccgatccgtactctggcggcctccggtatcaaagacttccgcaaaatgctggctcattgcgaagccgttaccccgattcgccgtaccgttactattgaagatgtgggtaactctgcggcattcctgtgctccgatctctctgccggtatctccggtgaagtggtccacgttgacggcggtttcagcattgctgcaatgaacgaactcgaactgaaataa

SEQ ID NO: 142785 - DNA, 1353 bp, Homo sapiens
tcaccggacgcaggcgctctgcgctctttcgtcaaccgggcatgacttcttgcgcccagttttcacaccacgcggcagcgtctggctgccacgaatcacttctcgcgcttcgtcgagcatctggcgcaacgcggcggaaattgagatatccgacggccaggcaatggcgatagtcgccagattgaccgtatcggttttgagtgtgcatcgaccagatatccttccagcacatccagactgcggttgattttctccgctggcgtaacaattcatcttcagactgctgcgccgctggacgcgcccgcaacgactccagcggatcgcgcggcaacatcgccgagcgacattcattaattcaatatattcagcgatgatcggcgaatcaaacagcattcgccctcttcggtcaccagcaccggcacttttcctaacgggtaaattgcgccacgccgttgtccgcgttatagggcagttcattaataaatcgaaagttatgcccttttctgggctcttcgacttacaagtgatgacaactaagacccagaagggcaggtcactcgctagagttgagtccaggttctctggttctccccagcagtttgtcctctggttgctgtggcttaagaacctggtagtcaggcctttggaactgtgaagtaagacgtgagagagggagacagagacccttttatgattaaggtacatagttgtgtgttcgttgatttcgcaaaaaccatgcacgatggcgcttggtttcactacgcggtaatttgatttctcacaaaggagaggaccgttactttttcgcgataagagcggtgaaattaatgtcgttattcctgcggccgttttgatggacgagaagttcagccggaccagatgatcaacattagtggcatcgccgataaactgccggtcatcgcaccaacgaacgcaaccagcaaactcaaactcgccagccaaccagaagacgactctgaaatttatgatgggtgcaacggtgcgcagcctggcgattattggttcgcagcgtttgtttccggtatgttttcccgctggctggcgaaaaccatactctctcgccacatactcagcgtaactatccggagctgcaaaaacggtgaatggctggctgtcggcggcgctgaaaacggcgcgtattctgacagtcgcgtggcggtaatgttgctgttgagcgcatggggattgttcgatttctgaactggctgcaaaacggcgcggggcagaaaaccgtagatatcctgatcctatcgcactcattcttttcttctcggcggttggctggacggtgctcgccgtttgatcgaaaaccggctggcttcggatattcat

SEQ ID NO: 142786 - DNA, 627 bp, Homo sapiens
atgcaaataaaatcggcgctatacgatggcttcagtcagttagtatcgataaagcgagcggccctcccgctgcgttggtctaacaatacgcgcccagacatcaaaccacgagaggtgtggcgcacctactacagacaccgctacgtactgcagcggacggcaacaccttgggtgtaccagcacggcacacaaaaggcgagcgcacgaaatcggcgctatacgatggcagtagtcagtagcacttttagttttcgtttcttcttcgatccaaccccgaattggatcatcacagatgaccaggtcggtttaatacaggatgcagcgccaccgccgcctcatgcaatagaagatggctatcgcggaaccgatgatgcaaaaaaaatgaccgttgatttcgcaaaaaccatgcacgatggcgcttcggtttcactacgcggtaatttgatttctcacaaaggagaggaccgttacgtttttcgcgataagagcggtgaaattaatgtcgttattcctgcggccgtctttgatggacgagaagttcagccggaccagatgatcaacattagtggcagtctggataagaaaagcgcgccggccgtcgttcgggtcactcatttgcagaaataa

SEQ ID NO: 142787 - DNA, 1284 bp, Homo sapiens
atgaatatattcgatcactatcgccagcgatatgaagctgccaaggacgaagagttcacactgcaggagtttcttaccacttgtcggcaagatcgcagtgcttatgccaacgcggctgagcggctattgatggctatcggtgagcctgtcatggtcgatacagcccaggaacccagactttctcgactcttttctaaccgggtcattgcacgttatccggcgtttgaagagttttacggcatggaagacgcgattgaacagattgtctcttatctgaaacacgcggctcaggggctggaagagaagaaacaaatcctgtatctgctggggcctgtgggtgggggtaaatcatcgcttgctgagcgactgaaatcattaatgcagctcgtaccgatttatgtattgagcgcgaacgccctgcacacctttggatcagaacacactcaacgatgcagacacctgctggttcttcccgaggcagctcagcggttctgggattccgtggtcggcaatgaactctcaagcagcaaaggcaaagtacagaagataaataagagcaagctggccggtgcgtgcgactggatggacaacatctttacccacatgtctgcatcagctctgcgttgttcaccgacaaatcccgtgtctggaagagtcctggcaggctgcacgggctggagagagagcgagctggaaggtgcattagtaaactggaaaaataatcccgacggtacacgcagtccgtatgaaataaatgtgacctatatggatgcgttaagccgccgtgagagtagcgatgaagaacgttgcgccaggtttatccttgcccatgcgattttgttaagtttccccggtgtgccagcgatatatattcaaagtattcttggctcgcgtaatgattacgcaggtgtcgaaaaactcggatataaccgtgcgattaaccgtaaaaaatatcacagtaaagagataacccgagaactgaacgatgaagctacattaaggcatgcggtatatcatgagttgtcgcgtttaattacacttcgtcgcagccataacgagtttcatccggataataattttaccattgatacgattaattcatccgtaatgcgtattccaagaagtaacgctgatggtaattgtctgactggattgtttaatgtcagtaaaaatattcagcatgtaaatattactaatctgcatggtcgggatctgattagtgaagttgatatattgggtaatgaaataacgctgcgcccctggcaggttatgtggattaaataa

SEQ ID NO: 142788 - DNA, 1590 bp, Homo sapiens
atgctacgcattcactgcatgcagcattggtacaacctgagcgatggcgcgatggaagatgctctgtacgaaatcgcctccatgcgtctgtttgcccggttatccctggatagcgccttgccggaccgcaccaccatcatgaatttccgccacctgctggagcagcatcaactggcccgtcaattgttcaagaccatcaatcgctggctggccgaagcaggcgtcatgatgacccaaggcactttggtcgatgccaccatcattgaggcacccagctctaccaagaacaaagagcagcaacgcgatccggagatgcatcagaccaagaaaggcaatcagtggcactttggcatgaaggcccacattggtgtcgatgccaagagtggcctgacccacagcctggtcaccaccgcggccaacgagcatgacctcaatcagctgggtaatctgctgcatggagaggagcaatttgtctcagccgatgccggctaccaaggggcgccacagcgcgaggagctggccgaggtggatgtggactggctgatcgccgagcgccccggcaagaacaaaacggccatcaacatcgaatacatgaaagccagcatccgtgccagggtggagcacccgtttcgcatcatcaagcggcagttcggcttcgtgaaagccagatacaaggggctgctgaaaaacgataaccaactggcgatgttattcaccctggccaacctgtttcggagtgccaacgcccgttcgggcccgaacaaacgcccgctgtcgtcgatgtcgccgaccattgtggtgaaagacggtaaaacctggctggttaccggtagcccaggcggtagccggatcatcactacagtgctgcaaatggtggtgaatagcatcgattatggcttgaacgtcgccgaagcgaccaatgcgccgcgtttccaccatcagtggttgccggacgagctgcgtgtcgaaaaagggtttagcccggatacgctcaagctgctggaagcaaaaggtcagaaagtggcgctgaaagaggcgatgggcagtacacaaagcattatggttgggccggacgcgcgcgtcggcggcgaagagtttggcgtcttgctgacggacatcgatactgaacgtgcgaaagctttagcggaaaggattcgggaaaatgttgagcgtttaactggcgataatcctgaatacgctataccactaaaagtgacgattagtattggcgctgttgtgactcaggaaaatgcgttaaacccaaatgagatctatcgactggctgataacgcactttacgaggcgaaagagaccgggcgtaataaggtggttgtgagggatgtggtgaatttttgcattatcgtagcagcacctttgagctatgctggcaggctaacggggtttataccggttctcgccctgacggtaacgggcgccctgcgttttaatcgttcggtcctccgggaacatcaaggatggcggttccacccattcggctacgcgcttaacgctttggcgcgcaaagcattgaagcaaacagcgtgctgtcgtttcccatttttagcaaatgcggttaaccgtcaggcatga

SEQ ID NO: 142789 - DNA, 2130 bp, Homo sapiens
tcagagaaaatatgtctgaatttgcacgttgccattatgggtatatacaacatccgatgcgatagcatccggtgcgccgttattatcaatgacgtcatctgccacggcaaggcgggcttcgcgcgttgcctgagcagcaaggatttgttcgacatgctcgcgagttacatcatcgcgctgcatggtgcgcttaagttgcgtttctgggcgtgagcatttaggcttgtgccaggcgtccgcggttgtcatgacccaggacgatcttcctttgggcggtgcgcgatgcgttagtcgcagctcgccatcttcggtcatgcgcgctgcgagtttcggcgccagtgccgtggtatccatcgcgccgatatgaccgtaggacagatcatatttatcagtactttgacgacgtactttggcatcgaagttcagaccaccggtggtgaaaccgcctgctttgagaatttcatacatcaccagcgcattctcttccacactgttcgggaactggtcggtgtcccagcccagttgcgcatcgccacggttggcgtcgacagaaccgaacaggccaagcgcaatggcggtggctatttcatgatggaaagagtgacctgccagcgtcgcgtggttagcttcaatgttcagtttaatctctttttccagaccaaactgtttcaggaagccatagaccgtcgcggcatcgtaatcatattgatgtttggtcggttcttgcggtttcggttcgataagcaacgtgccctggaaaccgattttatgtttatgctcaaccaccatctgcataaagcggcccagttgttcacgctcctgacgcaagtcggtatttaacagcgtttcgtaaccttcacgaccgccccacaggacatagttttcaccgcccaatttatgggttgcttccatcgctgtaacaacttgcgttgccgcccagctgaagacttcaggatctgggttcgtcgccgggatcctgtcagcggcgttgatgatgccggaaatgccattgatgttcgcgatccgcttagcgataaaattcgcgaacttgttgcgggcagcagcagtgaacaacgcgtaaccgccctgctttccctgcgtgaagttttcggtgatgatctgccagataacccgcattttgtgcaggccatcgaacaagcctttacgtaccgctttcagctccagaacttccgcctgcagcaggatagcgtccagcagttcatcgataccggtacccgctttcgcagatacgtgtacgaactggctttcaccgccccactcgccacctggtacgaaaaagacgatatgaacacctcggatatgcatccgtttattcatccgctttgcgcggtcgatccggcgtggaatcacgcagcgactgcttgtgtatccaccaccggttgatacgccacgtaaaattggttcgcgcttgatggcggtcatgatttctctgccggggcgcatacgtacgctcatcaggtaatagcagagcaggccaacgacagttccactcatgccgcccagtaaaaatgcgtaccacacatcgttccatgtccagtcatctgcataaagccgaacggtcagaggaatgcccgcaattttaggttgtgcacgtgagctgggggccagttgttcctggttagatgtcgcggtcgcagatgaacagaatgtttttttatctttcaccagcacaacgttcggacattcatgctcaacgctgcgcgggcggtcagttcgggttagcttgctggcagtatctaagtcagcggtccctggtaaaagatcagcgtgataatcgccggcaggatagcggaacggaacaggcccgtcagctatcccgtccagaaactgacgtacgcgcggatcaggattcgcctgcaacgcctgggcactgccatgagcgacaatttttttgtccgccaggatccaggcgtgatccgcaatacttaacacttccggcacatcgtgagaaaccaccacacaagtcacgcccagcgcgctgttcagctcagaaatcagcttcaccagtacgcccatggtgatgggatcttgcccaacaaaaggttcatcaaacatgatgagatccggctccagcgcaatcgcacgcgccagcgctgcacgccgcgccat

SEQ ID NO: 142790 - DNA, 3405 bp, Homo sapiens
atgggaacagtaatcttttttactggttctgcgtcttctctgttagcgaacacgaggcaagaaaaggaagttcggtatgccatgattcatgacgagtcacggtgcaatggctgtaatatttgcgcccgcgcatgccgtagaactaaccacgtccccgctcaggtaagccgtttatcgatagcacacattccagtcaccgataacgacaacgaaacgcagtatcacttttttcgccagtcatgtcagcactgcgaagatgctccgtgcatcgacgtttgcccgacgggggcgtcgtggcgtgatgagcaggggatcgtgcgggtagaaaaatcgcagtgcatcggctgcagttattgcattggcgcttgtccgtaccaggttcgctaccttaaccctgtcactaaagtggcagataaatgtgatttctgcgctgagtcccgactggcaaaaggctttccgcccatttgcgtcagcgcctgcccggaacacgcattgatctttggtcgcgaagatagcccagaaattcaggcgtggttgcagcaaaataaatactatcaatatcagctacctggtgccgggaaaccgcatctgtatcgccggttcggtcaacatttgattaaaaaggaaaatccatcaccgcaacaccgcgaaggggtgaaagatgtgatgcgctttaacgagccgatgtacaaggttggagagcagaacagcgtctgtatgtcctgtcatctgccggaacagttgcaaaaagcgttctggccgcacgatgtccactttctcaccggcgtcggcgtgctggcagccgtcagcggcaccgcagggcgcgtggtggcgaaaacgttgaatatcaatggggtgcgttacggcatggtgcatgacgagtcgttatgcatcggctgtaccgcctgtatggatgcttgtcgggaagtgaacaaggtgccggaaggcgtctcgcgcctgacgattattcgtagcgagccgcagggcgaatttcctgatgtgaaatatcgcttcttccgtaagtcttgccagcactgcgatcatgcgccgtgcgttgacgtctgcccgaccggtgcgtcttttcgcgatgctgccagtgggattgtcgatgttaatccggatctctgcgtcggttgtcagtactgcatcgccgcctgtccgtaccgcgtgcgctttatccatccggtcacgaagacggcggacaaatgcgatttctgccgtaagaccaatttgcaggccggtaagttgcccgcgtgcgttgaagcttgcccgaccaaggcgctgacgtttggcaatctggacgatcccaacagtgagatttcgcaactgctgcgccagaagcccacttaccgctacaagctggcgctgggaaccaaaccgaagctgtaccgcgtaccgtttaaatacggggaggtcattacccctgtaggattcattggttatggtcaagtcaaatggaatatctcagaatttggatataatatagtatcagtgctggaacgttcagacaggaaagttgtcatattaatggataagctagatgaggcaaggcgatattttagacttgtgaaggcgttacagcaggaaggtgcattagtaaactggaaaaataatcccgacggtacacgcagtccgtatgaaataaatgtgacctatatggatgcgttaagccgccgtgagagtagcgatgaagaacgttgcgccaggtttatccttgcccatgcgattttgttaagtttccccggtgtgccagcgatatatattcaaagtattcttggctcgcgtaatgattacgcaggtgtcgaaaaactcggatataaccgtgcgattaaccgtaaaaaatatcacagtaaagagataacccgagaactgaacgatgaagctacattaaggcatgcggtatatcatgagttgtcgcgtttaattacacttcgtcgcagccataacgagtttcatccggataataattttaccattgatacgattaattcatccgtaatgcgtattccaagaagtaacgctgatggtaattgtctgactggattgtttaatgtcagtaaaaatattcagcatgtaaatagtactaatctgcatggtcgggatctgattagtgaagttgatatattgggtaatgaaataacgctgcgcccctggcagaaaaccctggcatgcaccgttaagcaagtgcccgtggaagaagatgcctataacactaaagtgcattactctttcaccggttcgctgccggaagtgatcgaaaccagccatgactacgccaaatggatggacaaagagcagcttatcgatcgcaaagcggttgccacagtcatcagcaacgttgctgaaggcgcgttttacgatggcgtactgcgtattgtgcgtaccgaagatggtagcgcatggaccggtgttcctgtcagcgcctggattgccgcaccccgccctgccatgctctacacttcccaaacaacaccagagaaggaccaaaaaatgtcgatgataaaaagctatgccgcaaaagaagcgggcggcgaactggaagtttatgagtacgatcccggtgagctgaggccacaagatgttgaagtgcaggtggattactgcgggatctgccattccgatctgtcgatgatcgataacgaatggggattttcacaatatccgctggttgccgggcatgaggtgattgggcgcgtggtggcactcgggagcgccgcgcaggataaaggtttgcaggtcggtcagcgtgtcgggattggctggacggcgcgtagctgtggtcactgcgacgcctgtattagcggtaatcagatcaactgcgagcaaggtgcggtgccgacgattatgaatcgcggtggctttgccgagaagttgcgtgcggactggcaatgggtgattccactgccagaaaatattgatatcgagtccgccgggccgctgttgtgcggcggtatcacggtctttaaaccactgttgatgcaccatatcactgctaccagccgcgttggggtaattggtattggcgggctggggcatatcgctataaaacttctgcacgcaatgggatgcgaggtgacagcctttagttctaatccggcgaaagagcaggaagtgctggcgatgggtgccgataaagtggtgaatagccgcgatccgcaggcactgaaagcactggcggggcagtttgatctcattatcaacaccgtcaacgtcagcctcgactggcagccctattttgaggcgctgacctatggcggtaatttccatacggtcggtgcggttctcacgccgctgtctgttccggcctttacgttaattgcgggcgatcgcagcgtctctggttctgctaccggcacgccttatgagctgcgtaagctgatgcgttttggccgccgcagcaagtaa

SEQ ID NO: 142791 - DNA, 2469 bp, Homo sapiens
atggtcggttgctatagcggtaaaccgctgaatacgcaaaatattgatagtctggcggcggaaggtattcgctttaattccgcctacacctgttcaccggtttgtacgcctgcacgggccggactatttaccggtatctacgctaaccagtccggcccgtggaccaacaacgtcgcgccaggcaaaaacatctccactatggggcgctactttaaggatgccggctatcacacctgttacatcggcaaatggcatctcgacggtcatgactatttcggcactggcgagtgtccgccggagtgggacgctgattactggttcgatggggcgaactatcttagcgaactgacggaaaaagagattagcctgtggcgcaatggcctaaacagcgtcgaagatttacaggcgaaccatatcgacgaaaccttcacctgggcgcatcgtatcagcaatcgggcggtggattttctgcaacagcctgcgcgcgcagacgagcctttcctgatggtggtttcgtatgatgagccgcatcacccgttcacctgtccggtggagtatttagagaaatacgctgatttttactacgagctgggcgagaaagcacaggatgacctggctaacaaaccggaacatcaccgcttatgggcgcaggcgatgccatcgccagtcggtgatgacgggctttatcaccatccgctctattttgcctgtaatgactttgttgatgaccaaatcggacgggtcatcaatgccttaacgccagagcaacgtgaaaatacgtgggttatttatacctccgatcacggcgaaatgatgggcgcacataagctgatcagtaaaggggcggcgatgtatgacgacatcacccgcattccgctgatcatccgttcgccgcaaggggagcggcgacaggtcgatacgccagtcagtcatatcgatttactgccgacaatgatggcgctggcagatattgaaaaaccagagattctgccgggggaaaatatccttgccgtgaaagagccacgcggcgtgatggtggaatttaaccgctacgagattgagcatgacagctttggcggttttattccgcgtcgtttcgtggcccaacggctctccggcgagatgatttttcaggctggcgacatcggtttccgtcgtcacctgcggcatgttaaggcgattttccgtaatgcggatcgttttgatcccatccggcagatcgttcatcacgatccgattcgcacggatgatcccttcgcgcgaatcacgatatttcacctgctcgccggtgctgagtatgtccgcctggatgccgttggctttatgtggaaagagccgggaacaagctgcatccatctggaaaaaacacatctgattatcaaactgttacggtcgattattgataacgttgcgccaggtacagtgatcattaccgagaccaatgttccgcataaagacaacattgcttactttggcgcaggcgatgacgaagcacatatggtgtaccagttctcgctgccgccactggtgctgcatgcggtgcaaaaacagaacgttgaggcgctttgtgcgtgggcgcaaaacctgacactaccttccagcaacaccacctggtttaacttcctcgcctctcacgatggcatcgggctaaacccgctacggggcttgttgcctgaaagcgaaatattagagctggtcgaggcgttacagcaggaaggtgcattagtaaactggaaaaataatcccgacggtacacgcagtccgtatgaaataaatgtgacctatatggatgcgttaagccgccgtgagagtagcgatgaagaacgttgcgccaggtttatccttgcccatgcgattttgttaagtttccccgaaaaagacaaccctggcatcaccgttaagcaagtgcccgtggaagaagatgcctataacactaaagtcattactctttcacgtagcggttcgctgacggaagtgatcgaaacaagacatgactacgccaaagtgatggacaaagagcacccacagaaggacactagcctgtgcacgcgcgcaacaaaaatacaacaaaggggcccgctagtgaagagcacaaccaccagcctaactaacccccgcaaccacaaacaccaagagaaccgaactagagagcccatagaacaaactcagccgcgaacacacccccagaatcggcggaacatccatagccaagcagaacaacgcacaaccctgaagaaaccactagacacgccaaaaacccagacgaccacaaatcacgcaaacgacgcaacaaacaccacagaacacacaacccacaaccacaactacaacaagcaccccagacaacaaaccaacacaaccacaaacaagaccacaaagacaccgaaccaccaaaacgacaaccatacaatctatgctcggtaccctgttgaacagtcatttacggcaataacttcaatgttctcataa

SEQ ID NO: 142792 - DNA, 921 bp, Homo sapiens
ttaagcccacagggaatcgtcgccatgcgcgaacgggtagcgcaaattattgcagaacgcgaatacctgattgccgcactgaaagagatcccatgcgtagagcaggttttcgactctgaaaccaactacattctggcgcgctttaaagcctccagtgcggtgtttaaatctttgtgggatcagggcattatgtgcggagcaagtttgatgagtcagaagtatctttttatcgatcgcgatggaaccctgattagcgaaccgccgagtgattttcaggtggaccgttttgataaactcgcctttgaaccgggcgtgatcccggaactgctgaagctgcaaaaagcgggctacaagctggtgatgatcactaatcaggatggtcttggaacacaaagtttcccacaggcggatttcgatggcccgcacaacctggtaccgagctagaatcgtctcaaccgaggtgactcgtaatgccagcaacgaccagtccgtttcgcgcccttgatgtatgcgaatacctgccagcatgcgttgcggtaatttctggctgccatccatcgcgatttgccaggtcttatgtttcagcgccggattagcaaaacgtgcaattaacttatccgcatattgtgttaaatcgacatctttaatttgcagtgtcggcgcttgctcatccagcattaatgttctggcggcatggcgaaatgcgcgatcctgcatgcaatcactgatatgggcgaatcctgagaggtaacccagataagcgagaaaagagtggctgccattaagcatccgcagtttcatctcttcccatggcaggacatcattcaccatttgtacacctgcgacttcccaggcaggacgcccagcgacgaagttatcttccaccacccactggataaacggttcgcagctaatcgcgca

SEQ ID NO: 142793 - DNA, 2238 bp, Homo sapiens
atggtgaatgatgtcctgccatgggaagagatgaaactgcggatgcttaatggcagccactcttttctcgcttatctgggttacctctcaggattcgcccatatcagtgattgcatgcaggatcgcgcatttcgccatgccgccagaacattaatgctggatgagcaagcgccgacactgcaaattaaagatgtcgatttaacacaatatgcggataagttaattgcacgttttgctaatccggcgctgaaacataagacctggcaaatcgcgatggatggcagccagaaattaccgcaacgcatgctggcaggtattcgcatacatcaggggcgcgaaacggactggtcgttgctggcattaggcgttgcaggctggatgcgttacgtcagcggcgttgatgatgccggaaatgccattgatgttcgcgatccgcttagcgataaaattcgcgaacttgttgcgggcagcagcagtgaacaacgcgtaaccgccctgctttccctgcgtgaagttttcggtgatgatctgccagataacccgcattttgtgcaggccatcgaacaagcctggcaacaaatcgcgaagatgagtttttccgttgatgtgctggcgaatatcgccatcgaattgcagcgtgggattggtcaccaggatcgttttcagcgcctgatcaccacgctacgtcagtcgctactggtacgtctcgcgctcgtcgcgcagatgccggtcattcactgctccagctctaatatggccagccctgaagtgttgctggcgatggtggatgttttactctgttaccttgcgaaaggtgctgagtatgtccgcctggatgccgttggctttatgtggaaagagccgggaacaagctgcatccatctggaaaaaacacatctgattatcaaactgttacggtcgattattgataacgttgcgccaggtacagtgatcattaccgagaccaatgttccgcataaagacaacattgcttactttggcgcaggcgatgacgaagcacatatggtgtaccagttctcgctgccgccactggtgctgcatgcggtgcaaaaacagaacgttgaggcgctttgtgcgtgggcgcaaaacctgacactaccttccagcaacaccacctggtttaacttcctcgcctctcacgatggcatcgggctaaacccgctacggggcttgttgcctgaaagcgaaatattagagctggtcgaggcgttacagcaggaaggtgcattagtaaactggaaaaataatcccgacggtacacgcagtccgtatgaaataaatgtgacctatatggatgcgttaagccgccgtgagagtagcgatgaagaacgttgcgccaggtttatccttgcccatgcgattttgttaagtttccccggtgtgccagcgatatatattcaaagtattcttggctcgcgtaatgattacgcaggtgtcgaaaaactcggatataaccgtgcgattaaccgtaaaaaatatcacagtaaagagataacccgagaactgaacgatgaagctacattaaggcatgcggtatatcatgagttgtcgcgtttaattacacttcgtcgcagccataacgagtttcatccggataataattttaccattgatacgattaattcatccgtaatgcgtattccaagaagtaacgctgatggtaattgtctgactggattgtttaatgtcagtaaaaatattcagcatgtaaatattactaatctgcatggtcgggatctgattagtgaagttgatatattggttcaatcagcatcagcccaaaaaacgccttattgcgtcatgattatggatatcgaccacttcaaaaaagtcaacgacacctgggggcatccggttggcgatcaggtgataaaaacagtggtgaatatcattgggaaaagcatacgaccagatgaccttttagcgcgcgtcggcggcgaagagtttggcgtcttgctgacggacatcgatactgaacgtgcgaaagctttagcggaaaggattcgggaaaatgttgagcgtttaactggcgataatcctgaatacgctataccacaaaaagtgacgattagtattggcgctgttgtgactcaggaaaatgcgttaaacccaaatgagatctatcgactggctgataacgcactttacgaggcgaaagagaccgggcgtaataaggtggttgtgagggatgtggtgaatttttgtgagtcaccataa

SEQ ID NO: 142794 - DNA, 378 bp, Homo sapiens
agcggatagtcagtatccacaccgtgggtacgcacgcgaacaatcggctcgaacaggttttgctcagcattggtgtgaacatcaaacttccactggctgccgtgctgttctttgtcgttcagttcgctgaccagcgcgttcacccagcgggtaacggtctgctcatcagaaaggtcagcttccgtcaacgtcggctgatagataagctctttcagcattgctttcggataacgacgctccatacgattgatcattttctgcgtcgcgttgtactcagataccagtttctctaacgcttcgccagccaatcccggtgcattggcgttggtgcgcatcattgcgctgtccagagcgatatacctgtggtactgatctcga

SEQ ID NO: 142795 - DNA, 963 bp, Homo sapiens
ggttctttctgcgtgacgctggttgcgattctgctgatgccgaaactgggtctgaccgatgcgccaaatgcacagttccttggtgtctacctgggtctgtggggcgtatttacgctgtttatgttcttcggcacgctgaaaggcgcacgcgttctgcaattcgttttctttagcctgaccgtgctgtttgccctgctggcgatcggtaacattgccggtaacgccgcaatcatccactttgccggctggattgggctgatctgcggtgccagcgcaatctatctggcgatgggtgaagtactgaacgagcagtttggtcgcaccgttctgccgattggtgaatcccactaattgttttgagatcccccgcagtttaccgctggtcatctcgacctgtggctgtaaccaaatagcaaactgatgattttccagtgcattaaggatatcgctctcttccgtcaaccgcttctgggcggcttccatctgctgcggatcaaagaactgaatctgattcttgcctttatggcgagcggtaaatgccgcagaaatagcgcgactgtaaagctgttcggcggtgagatcgccgtagaacatcgccacgccaatgctacagtgcggacggagttgaatacgttcaatcggcaggcgctcgctcatgatagtgagcacttgctgacctaaggtgattgcgtgccacggttcctgtacaccgttggcaatgacagcaaagtcataaccgctaatctgcgcgaggatcatacgtggcgacagtaccgatttgagtttttccaccagcgtcagcagcagaatttctcgttgcgcctctttcagcacgcccgcagtatcacgcagggtttcacaggtgatgatcatcagcgcggtggtttgtttacgcgcgacaacctgctccagcatctccatcagcaaggctttgttcggcaaatccgacaccgggaagcgcat

SEQ ID NO: 142796 - DNA, 943 bp, Homo sapiens
tcaggcgattgcgcgcatcaggatgtatcgataaattaccgtctggttagtgatatgcacgccctgcacggtgagatccagcaccaggattccgataatcaacgccagtacggaagtgtgaccaaaccagatcgccagccatgaaagtaatagcagcagcagaccgaaagttgtggtgtggtgcgatttgccccttatcggcaaaaccgcccgccggacgagcgcccaacgctccggcagctcccgcaagtccaaacagaccaatgacaccatcgctgtagttaaaaggtggagcggcaagcaaaaaggccattgaggtccagagaatgctgaaattggcaaaggtcaggcagcccagcaacgcgcgggtacgcagaattttatcgctgataaacatactgaaaacggaacccaacaactgtgggtagttgaggtgggtttctgatttcatttgtggcagaccacgccataatgccagcgccatcagtgccattaacaccgaagcaacccaaaagacggtgcgccagccgccgagattcgccagcaatccggcaactgtccgtgccagcaagatccccaacagcagaccgctcataatagtgccaaccactttgccgcgtttatccggtgaagccagcgtcgctgccagcggaaccagaatttgtgccacgactgagaataaaccggttaatgccgtaccgaggatcatcatcgccagcgactgactgctggcggtaatcaacatgccgccagtaaggtcttcgagatagcgatcggcaggcgtcagcgcatcagaggcaggcagcccttcaatcatctcgggttccggttctgcctcgatcatctcatccagttttaattcatacgggtccagctcatagcagagatcgacttcgatcatcagttcgtctggattagggttttgaattttctgattgagcat

SEQ ID NO: 142797 - DNA, 525 bp, Homo sapiens
gggtgcggcctgttctgagcagtttaatattttagggagttttttcactacggatattttgagtgattatagccatctggatataggtaatggtctgctattgaagatatttcataacgatggaacagcaacggaatttaaccgcttctcacaatttgcttctttttcatcgtctagtgcgccttcggtcaccgcaccattcagggcagaactgagtgcgaacccggcagaaacggttgttgagggaccgtttagtaaagacgtaatcctgaaaatcacctataactagtatctaatacaaacactaaaacgggccatcaggcccgttatatcagtgctctaactccagctctcttgcctgcatcatctgttgacaataccaggcataacgtgcgcaaaaccaggttctatgttcttcatccatgttaccagtaacggccagaatatcgaccgggcgaccttctgcgtgcattctggcaaaactacccgccaggaaatcgaaattatttaaagaattaagactat

SEQ ID NO: 142798 - DNA, 1665 bp, Homo sapiens
atgcaagctttggcgcagacccagcccttgtttgtcctgaacgggcagatcaacatccctgaagggcgcttccatgcctatggtcaggatctgatctatgacgactatcgtttcctggaaaaactctctcgcgaagtcggttctcatttccacgccctggaccgcaccacgctgtacaccgccaaccgtgatatcagctactacacggtgcatgaatccttcgttgccaccattccgctggtgttctgcgaagcggagaaaatggaccccaatacccagttcctgaaagtgatgatgattgatgaacccgccatcctcgaccaggctatcgcgcgtattccgcaggaagtgaaagagaaatataccgtgctgaaaagtgcgccgtacttcctcgaaatcctcgataaacgcgttaacaaaggtacgggggtgaaatcactggccgacgtgttaggtattaaaccggaagaaatcatggcgattggcgatcaggaaaacgatatcgcaatgattgaatatgcaggcgtcggtgtggcgatggataacgctattccttcagtgaaagaagtggcgaactttgtcaccaaatctaaccttgaagatggcgtggcgtttgctattgagaagcctgataagcgtagcgcatcaggcacgctcgcatggttagcgccattaaatatcgatattcgccgctttcagggcgttctcttcaataaacgcacggcgcggttcaacggcgtcgcccatcagcgtggtgaacaactggtcggcagcaatcgcatctttaacgttaaaaatgtgaactccgtcattacacaaaaagtgtcatctggcgttacactttatgcggatactaaaacaggaggttttatgaacagaacgattcttgtccctatcgatatttccgattcagaattaactcaacgcgtgattagccacgttgaggaagaggcaaagattgatgatgcagaggttcatttcctgacggatattaaagcctttgttgaactgcatattgaacagggctgtgtgctggaaagtaatgggcaatcaattggcgtggtgaatgcaattgtcgggcagcgtcgttatacggtaacgctgaacggcgaatcaaaccatgcaggcaccacgccgatgggttatcgtcgtgatacagtttacgctttcagtcgcatttgccatcagtcggtcgaaaaagcgaaaaggatgggcgatccgctggttctgacctttggcaaagtagagccgcgcccgaatacggtaaatgtggtgccgggtaaaaccacgttcaccattgattgtcgtcataccgacgctgccgtgctgcgcgatttcacccaacagttagaaaacgacatgcgggcgatttgcgatgaaatggacattggtattgatatcgatttatggatggacgaagaacccgtgccgatgaataaggagctggtcgccaccctgacagaattgtgtgaaagagaaaaactgaattaccgggtgatgcacagtggtgccgggcacgacgcgcaaattttcgcgcctcgcgtaccaacctgcatgatttttatccccagcatcaacgggatcagccataacccggcggaacgcaccaatattaccgacttgggtaccgagatcgagtgtgtatcaaatgacttcaggagttaa

SEQ ID NO: 142799 - DNA, 2637 bp, Homo sapiens
tccgcccttttcttatacctttttgccggatgcggcgtgaacgccttatgcggcctacaaaatcatgaaaattcaatacattggaagaatttcgcaggcctgataagcgtagcgcatgacgcacgctcgcatggttagcgccattaaatatcgatattcgccgctttcagggcgttatcttcaataaacgcacggcgcggttcaacggcgtggcccataaacgtggggaacaactgggcggcagcaatcgcatctttaacggggacgcgcagcatacgacgactttccgggtccatagaggtttcccacagatgttccggggtcatctcgcccagacctttataacgctggatggagaggccgcgacgggactctttcaccaaccagtccatcgcctgctcgaagctggctaccggctgacgacgctcgccacgttcgataaacgcatcttctttcagcaagccacgcaggtactcacccagggggcagatacgacgatattcgccaccgggggataaactcgtgatccagcggatagtcagtatccacaccgtgggtacgcacgcgaacaatcggctcgaacaggttttgctcagcattggtgtgaacatcaaacttccactggctgccgtgctgttctttgtcgttcagttcgctgaccagcgcgttcacccagcgggtaaccgtccttctctcgccagcgcaaatcctctgcactatggacgtgagctgacggcattggacaatctggattttgggagcctgcatctggatattgaggacagcagcttcattaacaacattacgtttgggatgaaaacggtgcaggccgtcgccagacagacgcctcatcccttgtcctttcatttcatgcttgcccggccacagcgctggtttaacgcgctggctgaaatcagacccgcgtggatcttcgttcatgcagaaacgctggactatccttcggaaacgttaactgagatccgccataccggcgcacgagccggactggtatttaatccggcaaccccgatcgacgcctggcgatatctggcgtctgagctggacggagtgatggtgatgaccagtgagcccgatgggcagggtcaacggtttattccctccatgtgcgagaacatccaaaaagtacgcccggcttttccgcagaaaccggtagatgaaaaccgctggtgcattaaccgcctgattttgcatccgttacgcaatattgctcgcgaacttaacgccatcccagccaaggagcttgttggtcaccaactggcattaccgcgtctgcatcaggacgatgaaatcggtatgttggtgcgcagttacaacctcaaccagcaattgctgcagcgccattatgaagaacagaacgaaaatgcgatgcgcttcccggtgtcggatttgccgaacaaagccttgctgatggagatgctggagcagattggctacaaaaagcccgcagtctgtagtggcggtcctgaaccgcaattatcagtaacttttccagtacgagtgcagctatatattaagctagctaaaaatgccaataaagtaaataaaaaacttgtattacctgacgaatatatagcacttgaatttaaaggtatgagcggagcaggtgctatagaagtagataaaaatctgaccttcaggattcgcggattaaataacattcatgtccttgactgctttgttaatgttgatctggaaccagctgatggcgttgtcgactttggtaaaataaattcccgaacaattaaaaataccagcgtgagtgagacgtttagcgtagtcatgaccaaagatccgggtgcggcctgtactgagcagtttaatattttagggagttttttcactacggatattttgagtgattatagccatctggatataggtaatggtctgctattgaagatatttcataacgatggaacagcaacggaatttaaccgcttctcacaatttgcttctttttcatcgtctagtgcgccttcggtctccgcaccattcagggcagaactgagtgcgaacccggcagaaacggttgttgagggaccgtttagtaaagacttaaaaggtggagcggcaagcaaaaaggccattgaggtccagagaatgctgaaattggcaaaggtcaggcagcccagcaacgcgcggttgaggtgggtttctgatttcatttgtggcagaccacgccataatgccagcgccatcagtgccattatttcctatgcgatgaacttctccgctgatgcgtttatgcgccagatcagccgtgcgcgtacgttcggtttcatgcgtgatatcgaatatctgcagtcccgtggtttgtgcctgggcggcagcttcgattgtgccatcgttgttgacgattatcgcgtactgaacgaagacggcctgcgttttgaagacgaatttgtgcgtcacaaaatgctcgatgcgatcggtgacttgttcatgtgtggtcacaatattattggtgcatttaccgcttataaatccggtcatgcactgaataacaaactgctgcaggctgtcctggcgaaacaggaagcctgggaatatgtgaccttccaggacgacgcagaactgccgttggccttcaaagcgccttcagctgtactggcataa

SEQ ID NO: 142800 - DNA, 1052 bp, Homo sapiens
ctttaccgccatcaggcgatggttgcggggcagaactgcaaagctggtttgaacctccaaaaccgggaacaacaaagcctgagaagaagacaccgcctccgttgccgccttcctgccaggcgctactggatgagcacgtgatctaatggaaacgtttaatagcctgtttatggtttccccgctgttgctgggagttctcttttttgtcgccatgctggcgggatttatcgactcgattgccggtggcggtgggttactcaccattccggcattgatggcagcggggatgtctcccgctaatgcgctggcaaccaataaactgcaagcctgcggcggctctatttccgctactatctactttattcgccgcaaagtggttagtttaagcgatcagaaactcaatatcgccatgacctttgtcggctcaatgagcggcgcactgctggtgcaatacgttcaggctgatgtcttacggcagattttgcccattctggtaatttgtatcggcctctatttcttgctgatgccaaagctaggtgaagaagaccgccagcgccggatgtacggtttacccttcgcgttaatagccggtggctgcgtcggtttttatgatggattctttggcccggctgccgggtcgttttacgcgctggccttcgttacgctgtgcggatttaacctcgccaaagccacggctcacgccaaattactcaacgcaacgtcaaacatcggcggtttactgctgtttattctcggcggcaaagtgatttgggcgacgggctttgtcatgctggtggggcagttcctcggcgcgcgcatgggttcacgactggtgttgagcaaaggacaaaagctgatccgcccgatgattgttatcgtctcggcggtgatgagtgccaaattactttacgacagccacggacaggagatcctccactggttggggatgaactaatgaacagtacacaccactacgagcagttgattgaaatttttaatagctgctttgccgatgattttaatacccgtcagattaaaggcgacgacgaacc

SEQ ID NO: 142801 - DNA, 1611 bp, Homo sapiens
ctagaggatcccctcttcagcacgtcgcaatcgcgtaccaaacacatcacgcatatgattaatttgttcaattgtataaccaacacgttgctcaacccgtcctcgaatttccatatccgggtgcggtagtcgccctgctttctcggcatctctgatagcctgagaagaaaccccaactaaatccgctgcttcacctattctccagcgccgggttattttcctcgcttccgggctgtcatcattaaactggagagaaagtgtatgacgacaaaggaagactgaaggaactaggccccaaacagaaagcttagcatcccgaggatctagaggatcccttcttttatttctcaacaagatggtgaattgactagtgggtagatccacaggacgggtgtggtcgccatgatcgcgtagtcgatagtggctccaagtagcgaagggacaggactgggcggcggcaaagctgtcggacagtgctccgagaacgggtgcgcatagaaattgcatcaacgcatatagcgctacatgcacgccatagtgactggcgatgctgtcggaatggacgatatcccgcaagaggcccggcagtaccggcataaccaagcctatgcctacagcatccagggtgacggtgccgaggatgacgatgagcgcattgttagatttcatacacggtgcctgacgtcgacagcgacacacttgcatcggatgcagcccggttaacgtgccggcacgggctgggtaaccaggtattttgtccacataaccgtgcgcaaaatgttgtggataagcaggacacagcagcaatccacagcaggcatacaaccgcacaccgaggttactccgttgctggatagtctgatcgacaatacaagtgggaccgtggtccagaccgataatcagaccgacaacacgagtgggatcgtggtccagactaataatcagaccgacgatacgagtgggaccgtggtcagaactaataatcagaccgacgatacgagtggggacgttggttcccctgcaggtcgactctagaggatcccctttgatgaaggtaaactgcccaccgatccacacctgatgctccgactggccattgaaactgatgctcatgactatgatgtcatagttattgacagcgcgcctaacctgggtatcggcacgattaatgtcgtatgtgctgctgatgtgctgattgttcccacgcctgctgagttgtttgactacacctccgcactgcagtttttcgatatgcttcgtgatctgctcaagaacgttgatcttaaagggttcgagcctgatgtacgtattttgcttaccaaatacagcaatagtaatggctctcagtccccgtggatggaggagcaaattcgggatgccggttgaagatacttcgttatcgacaccagctgccccgatggtggattcgttaattgcgcgcgtaggagtaatggctcgcggtaatgccattactttgcctgtatgtggtcgggatgtgaagtctactcttgaagtgctccggggtgatagtgttgagaagacctctcgggtatggtcaggtaatgaacgtgaccaggagctgcttactgaggacgcactggatgatctcat

SEQ ID NO: 142802 - DNA, 589 bp, Homo sapiens
  misc_feature (1)...(589): n = a,t,c or g
cggccgcccgcccggtcgggcgatgaagtgtcactatgaggcgctgggggtgcggcgcgacgccagcgaggaggagctcaagaaggcctatcggaagctggccctgaaatggcacccggataaaaatctggataatgccgcagaagcagctgaacaatttaaattaatccaagcagcatatgatgtgttgagtgaccctcaggaaagagcatggtatgataatcatagagaggccctacttaaaggtgggtttgatggcgaatatcaagatgacagcttagatttgctacgctatttcaccgttacctgttattctggttatggagacgatgaaaagggattttacacggtgtatcgtaatgtttttgaaatgattgccaaggaagaactanaatctgtgttanangaagaggttgatgatttcccaacttttggagactcccagagtgactatgatacggtagtccatcctttctacggttattggcagagtttctacactcaaaagaattttgcatggaaggaagaatatgatacacgacaggcttcaaaccgctgggaaaaacgagccatggaaaaaaaaaaaaaa

SEQ ID NO: 142803 - DNA, 804 bp, Homo sapiens
atgccccttctgacccaacagatccaagacgaggatgatcagtacagccttgtggccagccttgacaacgttaggaatctctccactatcttgaaagctattcatttccgagaacatgccacgtgtttcgcaactaaaaatggtatcaaagtaacagtggaaaatgcaaagtgtgtgcaagcaaatgcttttattcaggctggaatatttcaggagtttaaagttcaggaagagtctgttacttttcgaattaatttaactgtccttttagactgtttatctatttttggatcaagtcctatgccagggactttaactgcacttcgaatgtgttaccaaggttatggttaccctttgatgctgttcctggaagaaggaggagtggtgacagtctgcaaaatcaatacacaggaacctgaggagaccctggactttgatttctgcagcaccaatgttattaataaaattattctgcagtcagaggggctccgtgaagcattttctgaattggatatgacgagtgaagtcctacaaattaccatgtctcctgacaagccttatttcagtgttcctaaacccaaaggaaagaaaaccaaagatatgaaaaaacctgtcagagtacctgctgaaccacaaacaatgagtgttcttatcagctgtacaacctgccatagtgaatttccatctcggaataaactttttgaccatctaaaggccacaggtcatgcaagagcaccttcatcatcgtctttaaacagcgcaacaagtagtcaaagcaagaaagagaaacgtaaaaacagatag

SEQ ID NO: 142804 - DNA, 499 bp, Homo sapiens
atccaagacgaggatgatcagtacagcctgtggccagcctgacaacgttaggaatctctccactatcttgaaagctattcatttccgagaacatgccacgtgtttcgcaactaaaaatggtatcaaagtaacagtggaaaatgcaaagtgtgtgcaagcaaatgcttttattcagatcatagaagaagatgctgctcttgtagaaataggacctcgttttgtcttaaatctcataaagattttccagggaagttttggaggactagctttatatgaaaatcctcactaccagtccccaaacatggtagtccatcctttctacgcttattggcagagtttctgcactcaaaagaattttgcatggaaggaagaatatgatacacgacaggcttcaaaccgctgggaaaaacgagccatggaaaaagaaaacaaaagattcgggacaaagcaaggaaagagaagaatgagcttgtccgtcagctgtagctttcattcgtaa

SEQ ID NO: 142805 - DNA, 917 bp, Homo sapiens
cttttttgcagaggcttcaaaagccaagaattcgggctcctagcaatgaaagtccagtgagtgtagtcaacgagtttccggaagaggtgagcatgaagaatcacgagaagtcaaagaagcatcgggaaatggtggccttgctaaaacaacagctggaggaggaagaagaaaatttttcaagacctcaaattgatgaaaatccattagatgacaattctgaggaagaaatggaagatgcaccaaaacaaaaagtcaagtatttgacatttcgatttatatttgctcttaggctttctaaaaaacagaagaaaaagaaacagaaaccagcacagaattatgatgacaatttcaatgtaaatggacctggagaaggagtaaaggttgatccagaagatactaacttaaatcaagacagtgccaaagaattggaagatagtccccaggaaaatgtcagtgtcacagagatcattaaaccatgtgatgatccaaaaagtgaagctaaaagggatgctattcagtcatgtgacaccaagaatgccatgcatgctgaccacttccaactctctttttttgtcccaggcccaccttctgtgagtacctttctccagatccacacacacagggctgcctactgcatatgtgcaaaagacactgacgtggaccctgcagattcccttttaagaaaggacttgttgccccagcagcaggcggtagacaatctactggccacagcagctgctgtcacattcttctacagtgtttgtaacaaggggactggccagtctctgactgtacactcgctggtacagggagctaaccacatcctgataccgattccattgttggatggaacggttgggaattctgcttcacaatatgctgagataactgtaacctttggactcacaaaagtatga

SEQ ID NO: 142806 - DNA, 590 bp, Homo sapiens
ggactttaactgcacttcgaatgtgttaccaaggttatggttaccctttgatgctgttcctggaagaaggaggagtggtgacagtctgcaaaatcaatacacaggaacctgaggagaccctggactttgatttctgcagcaccaatgttattaataaaattattctgcagtcagaggggctccgtgaagcattttctgaattggatatgacgagtgaagtcctacaaattaccatgtctcctgacaagccttatttcaggtatgataatcatagagaggccctacttaaaggtgggtttgatggcgaatatcaagatgacagcttagatttgctacgctatttcaccgttacctgttattctggttatggagatgatgaaaaggtagacaatctactgcccacagcagctgctgtcacattcttctacagtgtttgtaacaaggggactggccagtctctgactgtacactcgctggtacagggagctaaccacatcctgataccgattccattgttggatggaacggttgggaattctgcttcacaatatgctgagataactgtaacctttggactcacaaaagtatga

SEQ ID NO: 142807 - DNA, 1930 bp, Homo sapiens
atgaagtgtcactatgaggcgctgggggtgcggcgcgacgccagcgaggaggagctcaagaaggcctatcggaagctggccctgaaatggcacccggaggagtttggactggatcgtagaggaatgcaatttggaaaagtgaactcaacagtatggaggatagcatggtggaggacaaaagatgttccgggggacagtttgactgaaggtgataaaaatctggataatgccgcagaagcagctgaacaatttaaattaatccaagcagcatatgatgtgttgagtgaccctcaggaaagagcatggtatgataatcatagagaggccctacttaaaggtgggtttgatggcgaatatcaagatgacagcttagatttgctacgctatttcaccgttacctgttattctggttatggagatgatgaaaagggattttacacggtgtatcgtaatgtttttgaaatgattgccaaggaagaactagaatctgtgttagaggaagaggttgatgatttcccaacttttggagactcccagagtgactatgatacggtagtccatcctttctacgcttattggcagagtttctgcactcaaaagaattttgcatggaaggaagaatatgatacacgacaggcttcaaaccgctgggaaaaacgagccatggaaaaagaaaacaaaaagattcgggacaaagcaaggaaagagaagaatgagcttgtccgtcagctggtagctttcattcgtaaaagagataaaagagtgcaggcgcatcgaaaacttgtggaagaacagaatgcagagaaggcgaggaaagccgaagatatgaggcggcagcagaagctaaagcaggccaaactggtggagcagtacagagaacagagctggatgactatggccaatttggagaaagagctccaggagatggaggcacggtacgagaaggagtttggagatggatcggatgaaaatgaaatggaagaacatgaactcaaagatgaggaggatggtaaagacagtgatgaggccgaggacgctgagctctatgatgacctttactgcccagcatgtgacaaatcgttcaagacagaaaaggccatgaagaatcacgagaagtcaaagaagcatcgggaaatggtggccttgctaaaacaacagctggaggaggaagaagaaaatttttcaagacctcaaattgatgaaaatccattagatgacaattctgaggaagaaatggaagatgcaccaaaacaaaagctttctaaaaaacagaagaaaaagaaacagaaaccagcacagaattatgatgacaatttcaatgtaaatggacctggagaaggagtaaaggttgatccagaagatactaacttaaatcaagacagtgccaaagaattggaagatagtccccaggaaaatgtcagtgtcacagagatcattaaaccatgtgatgatccaaaaagtgaagctaaaagtgttcctaaacccaaaggaaagaaaaccaaagatatgaaaaaacctgtcagagtacctgctgaaccacaaacaatgagtgttcttatcagctgtacaaccttgcatagtgaatttccatctcggaataaactttttgaccatctaaaggccacaggtcatgcaagagcaccttcatccatcgtctttaaacagcgcaacaagtagtcaaagcaagaaagagaaacgtaaaaacagatagagattctgcctgtgcttttgtttgactgtctctagattttgaaaccaaaaaactgaactgaaatcatctaaagagttaaaatttcagtgatctgcaattaattacattgtggaagattattttttatcttgtaaaaacacttttttggtttaatatatatttttaaaacatttcactagtgattgaattctacttttgccatctgaattgacttgaatg

SEQ ID NO: 142808 - DNA, 525 bp, Homo sapiens
atgcctctggatacggggatctctgattatgagtccgaacttagtgacgagcaggtcgcgatttgccgcccgtatcacagcgatcaggtgtttgcgatcagcaacatcgacccgttcttcgagtccagcgtgctgtcacgcggactgattgcggaacaccagggcgagctgtgggtcgccagcccgctgaaaaaacagcgttttcgcttaagcgacggcttgtgcatggaagacgaacagttttccgtcaaacattacgaagcgcgagtgaaagacggcgtggataatcaaatgtttacagacactattaataagtgtgcggctaacgctgcgcgcattgcacgcctgtcggcaaataacccgctcggcttttgggtcagctccgccatggcgggcgcgtatgtgggtcttgggatcatcctgattttcacgctcggtaatttgctcgatccatccgtacgccctcttggtgatgggcgcgacctttggtatcgccttaacgctggtgattatcgccggttctga

SEQ ID NO: 142809 - DNA, 3114 bp, Homo sapiens
ttatggataattggttggttggttggttggtttgaagtcaggatctagctctggcccccaagttgtgttggtagacatcatcagcgcacgcgcttccagctgggcttccagcgtcagcggtacgtgaacagccatctggtcaccatcgaagtcggcgttatatgccgcacaaaccagcgggtgcagctggatagctttaccttcgatcattaccggttcaaatgccattttcttcgcagctttaatggtggtagcaagaccacgcagttccagcttgccgtagatgaacggtttgaacagctccagtgccattttcttcggcagaccgcactgatgcagacgcaggtatggaccgagcaggttctgacggaaacgaccctgtttacctttgatcatgtcggccaaagatttcagaggacgcttgttagaaccggtgatcgcacgaccgcgacgaccgttatccagcagggcgtctaccgcttcctgcagcatacgtttttcgttacgtacgatgatgtccggcgcagccagatccagcagacgtttcagacggttgttacggttaatgacgcgacgatacagatcgttcaggtcagaagtcgcgaaacgaccaccatccagcggaaccagcggacgcagatctggcggcagtaccggcagaacggtcaggatcatccactctggtttgttaccagactgaacgaacgcttccagcagtttgatacgcttggtcagctttttacgcttggtttcggagttggtttcgttcagctcttcacgcagctgttcgcactcttgctccagatccatgctcttcagcagagcctggattgttccgcccccatcgaactcttccagcgcgtccagatactgctcttcagtcaggatctgctgacgttccaggttggtcataccgccttcgataaccacataggattcaaagtacagtacgcgttcgatatcgcgcagcggcatatcgagcagcagaccgatacgggacggcagcgatttcaggaaccagatgtgcgcagtcggggaagccagttcgatgtggcccatacgctcacggcgtactttagtctgggtcacttcaacgccgcacttctcacagatgacgccacggtgtttcaggcgcttgtacttaccgcacaggcactcgtaatcttttaccggcccaaagatacgggcgcagaaaaggccgtcacgttctggtttgaacgtacggtagttgatggtttccggctttttaacttcaccgaaagaccatgaacggatcatagttgcgaagccagagcaattttggaagctacggcaagttatgtttatggcgatcgtaatcagtttaccgacgattggcgaacgtttttccccatttctcttgaagagtcccttgattaggcccagcaggtgcggtacaacagattttatctccggattaaccgcgcgaccggaattttcgcagtcgagaatggtactgatagcagcttcgacgataacatcgttgatgtgcgccggatcgtttttgccaatccgcccattggcatcgatttgcagcttaaacgccaccacatcctgatagctgccgttttccagcggtagagattcatcgaggaaacgccgaacccaggcgataacctgctcaccgcgttgcggatcgtagccgctgaccatcgccccttcctgcgggatgatgtcgctgccgtataacgcatcgtacagtgagccccagcgagcgttcgccgcgttcagcgcgtagcgggcgttcattgccggaaccaccagctgcggccccgcctggctggtgatttcgctgtcaatgcccgtggtttccaccgtcacgcgctccggttgcggcaccaggtagcccagttcacgcaggaaagatttataggccgctttatcttttaccggccccggattgctgcgatgccactcatcaagcgctgcctgaatgcgatcgcgttctgccagcaactgacgattttctggtgccagatcatgaacgatctcatcaaaattgcgccagaacgccgcagcgtccagccctgttcccggtaaaacttcttcatccacaaaacgtttaaaattggcgtcaatgcgtaaacggctctgcgcatcctgtgctccggttaaaccagaaacgcccacggcaccaataatttgcccatccacaacaaccggtacgccgccttccagcgacgttaataacggcgcagtcacgaacgcggtacgtccgttgttcaccatctcttcatagcccttagtttcacgacgctccagcgcggcggtaccgcttttctcctggctgtcgagcagttttgctgcccgtccagagcgatatcgtcgagcaggatttggcggcgccaatcgccacggtgggataatccgccagtcgctcaacatgccgtgccagctgttccagccctgcggtgcagaaggcatctgtttggtttgcgtcgggaacacatgtcccagcgcgatataagaggggcgtgctgccagcgcgacgtcgatttccatatcgtcatgtgtcgaaacgcccagccgcaggcctgccgcgcggatggcattgagatcggtggcttgcaaatcttcctgccccaaatggacgccatacgcctgatgcttgatcgccagccgccagtaatcgttgataaacaatcgcgcgttatagcggcggcccagcgcaattgccgccacgacatcggcttccacctcttcatcgcgccgatctttgatgcgtagctggagagtacgtacgcctgcatccaacagacgttcgatccactgtacgctgtccaccaccgggtacagtcgcaggtagatttctccgcctctggcacggaagttctccgacatatccgccattcccatttcaatagtttgcgtggcggcgtaatcacgcacttcctggctgattttcatcgagcagaatttcggcccacacatggagcaaaaatggcgactttcatcggttcgttccccatccccgggcaataagggcgcgtgcgctatccacttttttgcccgtccatattcaacggcttctttgaggagttcattttccatcgttttcttgccgagcaggcgctggagttctttaatctgcttcat

SEQ ID NO: 142810 - DNA, 230 bp, Homo sapiens; identical to SEQ ID NO: 132801

SEQ ID NO: 142811 - DNA, 1086 bp, Homo sapiens
atgccggtgatgtttctggcgagtctaagcggaaaacatcagggtcatcactttccgaaaggagaaaggggaaaatttaagataaaggagaggggtaccgtggctacagaagaccgacggtcaggtgatagtacattctacgccatacagcctacgcggcggcagaagcgagtatacggccttgcgctgctgctgcaacttcaccgtcgtcgccagaacctgaacatcgattcagtaagctctgtgggcctggcggcgctggtaaccgcctttatcggcgttgatttcttcgctaacggcgagcagacatacagccagccgctgtggacgtggatgtcggtaggcgactttaacatcggttttaacctggtgctggacggcctgtcgctgaccatgctctcggtggtcactgagggctactctcgcttcttcgcttacaccaacctgttcatcgccagcatggtggttctggtgcttgccgacaacctgctgctgatgtacctcggctgggaaggcgtgggcctgtgctcctatctgctgatcgggttctattacaccgatccgaagaatggcgcagcggcaatgaaagcgttcgtcgtgacccgtgtgggtgacgtgttcctcgctttcgcactgttcattctttacaacgaactgggcaccctgaacttccgcgaaatggtggaactggcaccagcgcactttgctgacggcaataacatgctgatgtgggcgacgctgatgctgctgggcggtgcggtcggtaaatctgcgcagttgccgttgcagacatggcttgccgacgcgatggcgggcccgacgcctgtctccgcgctgatccacgccgcaaccatggtaaccgcgggtgtctacctgatcgcccgtacccacggcctgttcctgatgacgccggaagttctgcatctggtgggtattgtcggggcggttacgctgctgctggccggttttgccgcgctggtacagaccgacatcaaacgtgttctcgcttactctaccatgagccagattggctacatgttcctcgcgcttggcgtgcaggcatgggatgcggcgatttccacttga

SEQ ID NO: 142812 - DNA, 1574 bp, Homo sapiens
gcttctctccatcttgtgattcctttttcctcctgaaccctccagtgggggtgcgagtttgtctttatcaccccccatcccaccgccttcttttcttctcgctctcctacccctccccagcttggtgggcgcctctttcctttctcgccccctttcatttttatttattcatatttatttggcgcccgctctctctctgtccctttgcctgcctccctccctccggatccccgctctctccccggagtggcgcgtcgggggctccgccgctggccaggcgtgatgttgcacgtggagatgttgacgctggtgtttctggtgctctggatgtgtgtgttcagccaggacccgggctccaaggccgtcgccgaccgctacgctgtctactggaacagcagcaaccccagattccagaggggtgactaccatattgatgtctgtatcaatgactacctggatgttttctgccctcactatgaggactccgtcccagaagataagactgagcgctatgtcctctacatggtgaactttgatggctacagtgcctgcgaccacacttccaaagggttcaagagatgggaatgtaaccggcctcactctccaaatggaccgctgaagttctctgaaaaattccagctcttcactcccttttctctaggatttgaattcaggccaggccgagaatatttctacatctcctctgcaatcccagataatggaagaaggtcctgtctaaagctcaaagtctttgtgagaccaacaaatagctgtatgaaaactataggtgttcatgatcgtgttttcgatgttaacgacaaagtagaaaattcattagaaccagcagatgacaccgtacatgagtcagccgagccatcccgcggcgagaacgcggcacaaacaccaaggatacccagccgccttttggcaatcctactgttcctcctggcgatgcttttgacattatagcacagtctcctcccatcacttgtcacagaaaacatcagggtcttggaacaccagagatccacctaactgctcatcctaagaagggacttgttattgggttttggcagatgtcagatttttgttttctttctttcagcctgaattctaagcaacaacttcaggttgggggcctaaacttgttcctgcctccctcaccccaccccgccccacccccagccctggcccttggcttctctcacccctcccaaattaaatggactccagatgaaaatgccaaattgtcatagtgacaccagtggttcgtcagctcctgtgcattctcctctaagaactcacctccgttagcgcactgtgtcagcgggctatggacaaggaagaatagtggcagatgcagccagcgctggctagggctgggagggttttgctctcctatgcaatatttatgccttctcattcagaactgtaagatgatcgcgcagggcatcatgtcaccatgtcaggtccggaggggaggtattaagaatagatacgatattacaccatttcctataggagtatgtaaatgaacaggcttctaaaaggttgagacactggttttttttttt

SEQ ID NO: 142813 - DNA, 969 bp, Homo sapiens
atgcggacgacctgtttgacggcagcggttacgctgacgagacgggctggaatcacgcggcagagtctgcagcttgagaacagcgttccaacgatcttcgtcggaagcgttcacatcagacctgcaggcagcagagttgcaaaatcgagcttcgaatcgcccggccagaataggacacgctcatttggtcattttcccggtccagagttcttggatgtagagaaaactagcttctcccaggaacaatcttgtgattccgcaggagaaggctctgaaagaatacatcaagattgggaatctggtgatgagcttagcagcagctccactgaacagataaggtctcttaaagagtggaatgacaacgatggcggctgtaaaggtgcctgcgaccgcgtgcctcaccagaacgtcaccgcgctgaatctacgtgatcagtgcatcaacggcgaatgctatgacgaagtgctgttccacgggcttgaagagtacatcaataacctgcaaggtgatggcgtgattgtcttacacaccatcggcagccacggtccgacctattacaaccgctatccgcctcagttcaggaaatttaccccaacctgcgacaccaatgagatccagacctgtaccaaagagcaactggtgaacacttacgacaacacgctggtttacgtcgactatattgttgataaagcgattaatctgctgaaagaacatcaggataaatttaccaccagcctggtttatctttctgaccacggtgaatcgttaggtgaaaatggcatctatctgcacggtctgccttatgccatcgccccggatagccaaaaacaggtgccgatgctgctgtggctgtcggaggattatcaaaaacggtatcaggttgaccagaactgcctgcaaaaacaggcgcaaacgcaaaaagattgtgtcttattgatctttgccaaacaaccctttgacaacagataa

SEQ ID NO: 142814 - DNA, 2874 bp, Homo sapiens; identical to SEQ ID NO: 132255

SEQ ID NO: 142815 - DNA, 1245 bp, Homo sapiens
ttacgccccgccctgccactcatcgcagtactgttgtaattcattaagcattctgccgacatggaagccatcacaaacggcatgatgaacctgaatcgccagcggcatcagcaccttgtcgccttgcgtataatatttgcccatggtgaaaacgggggcgaagaagttgtccatattggccacgtttaaatcaaaactggtgaaactcacccagggattggctgagacgaaaaacatattctcaataaaccctttagggaaataggccaggttttcaccgtaacacgccacatcttgcgaatatatgtgtagaaactgccggaaatcgtcgtggtattcactccagagcgatgaaaacgtttcagtttgctcatggaaaacggtgtaacaagggtgaacactatcccatatcaccagctcaccgtctttcattgccatacggaactccggatgagcattcatcaggcgggccagaatgtgaataaaggccggataaaacttgtgcttatttttctttacggtctttaaaaaggccgtaatatccagctgaacggtcagatgcagaacttccggcgtcatcaggaacaggccgtgggtacgagcgatcaggtagacacccgcggttaccatggttgcggcgtggatcagcgcggagacaggcgtcgggcccgccatcgcgtcggcaagccatgtctgcaacggcaactgcgcagatttaccgaccgcaccgcccagcagcatcagcgtcgcccacatcagcatgttattgccgtcagcaaagtgcgctggtgccagttccaccatttcgcggaagttcagggtgcccagttcgttgtaaagaatgaacagtgcgaaagcgaggaacacgtcacccacacgggtcacgacgaacgctttcattgccgctgcgccattcttcggatcggtgtaatagaacccgatcagcagataggagcacaggcccacgccttcccagccgaggtacatcagcagcaggttgtcggcaagcaccagaaccaccatgccagtgaccaccgagagcatggtcagcgacaggccgtccagcaccaggttaaaaccgatgttaaagtcgcctaccgacatccacgtccacagcggctggctgtatgtctgctcgccggtagcgaaaaaatcaacgccgatgaaggcgggtaccaccgccggcaggcccacagagcctacgccgacgatcgcgacttcaggcttgaatgcccttttgggcga

SEQ ID NO: 142816 - DNA, 1179 bp, Homo sapiens
ttaggctcttacaaggcactcagcttccacagccaccctggaacctgcgtaacaccagccactgccaccagtgatgcagggtaatctggcagctgcagctagcagctggacgtcacatgtggtaccccgggtaggtaattcacatccacaggccagggcagcacagacctccaccttcagtgagtgccccttcaaaccaacgagaccaacagttgtaggcagagcgagaggttctggtgccctgctacttgtgcagtctggtaagcactggaggagctggcctgctgtccctgttgcatgtctagggctagggccacgcgcggcaaaaccggccagcagcagcgtaaccgccccgacaatacccaccagatgcagaacttccggcgtcatcaggaacaggccgtgggtacgggcgatcaggtagacacccgcggttaccatggttgcggcgtggatcagcgcggagacaggcgtcgggcccgccatcgcgtcggcaagccatgtctgcaacggcaactgcgcagatttaccgaccgcaccgcccagcagcatcagcgtcgcccacatcagcatgttattgccgtcagcaaagtgcgctggtgccagttccaccatttcgcggaagttcagggtgcccagttcgttgtaaagaatgaacagtgcgaaagcgaggaacacgtcacccacacgggtcacgacgaacgctttcattgccgctgcgccattcttcggatcggtgtaatagaacccgatcagcagataggagcacaggcccacgccttcccagccgaggtacatcagcagcaggttgtcggcaagcaccagaaccaccatgctggcgatgaacaggttggtgtaagcgaagaagcgagagtagccctcttcaccgcgcatataccaggaggcgtacatgtgaataaggaaacccacaccagtgaccaccgagagcatggtcagcgacaggccgtccagcaccaggttaaaaccgatgttaaagtcgcctaccgacatccacgtccacagcggctggctgtatgtctgctcgccgttagcgaagaaatcaacgccgataaggggggtaacagcgccgcagggccacagagcagggctgtccacccaagcgttactcaggcagctgcacaggcatggttcttgaccagcccttggggcagtcaacat

SEQ ID NO: 142817 - DNA, 921 bp, Homo sapiens
tggcgggtcgggggctccggcgctgggccaggcgtgatgttgcacgtggagatgttcacgctggtgtttctggtgctctggatgtgtgtgttcagccaggacccgggctccaaggccgtcgccgaccgttacgctgtctactggaacagcagcaaccccagtgggttcaaggtgccagaaagtttgatctaatgccgggttacgtcatgtgtgcagaacaagctgccagagttggccgagccaggaggtgggagcccttcgcccgcggcctggcgatgtgctgccggaggaacgcgcgcgattacctggaaccgatttgtaggcgtcccgaagcccgccgggtatgcgggagactagaggtgggcgccgggggcggtcatagtgcgcgtgctggacaccggccagtcgcagacgtcccgtgttttcggaccctggaagtggagtggggaggttatccagagtgcccggcggggtcctccgggtctggagcagttccgaacctttattgcttcccggcctgtgcacagaagtcggccccgctaggcccataccgcactgctttctctgggacagaggctagcttccagctgtgtgccggtctcggtgccctcctagcctcccctcagcatgcaggcaagagagggattccctgcttgaataatgtcagcgcagatgaagatgggaagatttccccacaagcagtccgccggttacagaaccaggagggagttccccctatcccgctagtccaagatagtcttactcaggtagccgcccaagtcctaaatgaaccgctgaacaggagtggagatattcctgaaagtttggttcaaaaaacaagagtctcctggagctgtcatgtcggattacacactctcttgggtctcctaagtgccttggcatccctggggcatcagatgg

SEQ ID NO: 142818 - DNA, 3117 bp, Homo sapiens; identical to SEQ ID NO: 137315

SEQ ID NO: 142819 - DNA, 3222 bp, Homo sapiens
atgagtcatgatccacaaccgctgggcggcaaaatcatcagtaaaccggtcatgatttttggaccgttaatcgtcatctgtatgctcctgattgtgaagcgtctggtgttcggtctgggctctgtctctgacctgaacggcggcttcccgtggggcgtgtggatcgcgtttgacctgctgattggcaccggctttgcctgtggcggctgggcgctggcgtgggcggtatacgtctttaaccgtgggcaataccatccgctggtgcgtccggcgctgttggcgagtctgtttggttactcactgggtggcttgtcgatcactatcgacgtgggtcgctactggaacctgccgtacttctacattccgggtcacttcaacgtgaactcggtactgttcgagacggcggtctgtatgaccatctatatcggcgtgatggcactggagtttgctccggcactgtttgaacgtctggggtggaaggtgtcgctacagcgactaaacaaggtgatgttcttcatcatcgcgctcggtgcgctgctgccgaccatgcaccagtcttcaatggggtcgctgatgatctcggcgggctacaaggtgcatccgttgtggcagagctatgaaatgttgccgctgttctcgctgctgacggcgttcatcatgggcttctcgattgtcatctttgaagggtcgctggtgcaggcgggtctgcgtggcaacggtccggatgaaaagagtctgcaccggctgggctgcaggctgttcaccggtcagatcgctaaccgaggcttgtgccgggctggcaacgccatccacggtttgcggctgaggttgttcagctacgtctgcggcaggtgcggcagctacctgagctgccactggctgagtgccgatatttttcgccgcttcaaagccttgctgaatagtgcgaccaaataccgctgcctggccattcagtggcaacagcagggcgattttgttggtcgaggctggtttaaacgcttttacgttaaccaactgcgttggcagcattttcgcgcccggattgttcggataacgtttctgccagtcggcgatcccggctttcatcatgtcgggatcgttacggttatcaaaccagacgcgctgcagatccagccagccttgcagaatattttcgtcggcgttgatcaccagcgtattcgcctgttcctgagtcatggaggagagcgcctgccagcggttcctgagcaattaacgcgcgcagtaaatcaatggaaggacgccctggctggcatcgatttctcgcctgccagtaacgcgcttgctgtttttgttctaaatcggacaggtcgtattttctgccagcacgtttgctgcgccagctatatctttctgcgccagttaatcttagccggtaccgactggaacgatctgtatcgtcgcgtcattaaccgtaacaaccgtctgaaacgtctgctggatctggctgcgccggacatcatcgtacgtaacgaaaaacgtatgctgcaggaagcgcgtcctctgaaatctttggccgacatgatcaaaggtaaacagggtcgtttccgtcagaacctgctcggtaagcgtgttgactactccggtcgttctgtaatcaccgtaggtccatacctgcgtctgcatcagtgcggtctgccgaagaaaatggcactggagctgttcaaaccgttcatctacggcaagctggaactgcgtggtcttgctaccaccattaaagctgcgaagaaaatggttgagcgcgaagaagctgtcgtttgggatatcctggacgaagttatccgcgaacacccggtactgctgaaccgtgcaccgactctgcaccgtctgggtatccaggcatttgaaccggtactgatcgaaggtaaagctatccagctgcacccgctggtttgtgcggcatataacgccgacttcgatggtgaccagatggctgttcacgtaccgctgacgctggaagcccagctggaagcgcgtgcgctgatgatgtctaccaacaacatcctgtccccggcgaacggcgaaccaatcatcgttccgtctcaggacgttgtactgggtctgtactacatgacccgtgactgtgttaacgccaaaggcgaaggcatggtgctgactggcccgaaagaagcagaacgtctgtatcgctctggtctggcttctctgcatgcgcgcgttaaagtgcgtatcaccgagtatgaaaaagatgctaacggtgaattagtagcgaaaaccagcctgaaagacacgactgttggccgtgccattctgtggatgattgtaccgaaaggtctgccttactccatcgtcaaccaggcgctgggtaaaaaagcaatctccaaaatgctgaacacctgctaccgcattctcggtctgaaaccgaccgttatttttgcggaccagatcatgtacaccggcttcgcctatgcagcgcgttctggtgcatctgttggtatcgatgacatggtcatcccggagaagaaacacgaaatcatctccgaggcagaagcagaagttgctgaaattcaggagcagttccagtctgaaagctcgccagagaaagcagggtttaacgtcgaacggcttaaccagatggatcgctggattagccagcaagttgatgtcggttatcccagcgtaaacctgctgatcattaaagataatcagattgtgtatcgcaaagcctggggagcggcgaaaaagtacgatggcagcgtgttgatggaacagcctgtcaaagccaccaccgggacgctgtatgacctggcctcaaacaccaaaatgtacgccacgaacttcgccctgcaaaagctgatgagcgaaggcaaactgcatcctgacgatcggattgcgaaatatattccggggtttgccgatagtccaaatgacaccattaaaggcaaaaacaccctgcggatttctgacctgctgcatcacagcggcggtttcccggcagatccgcaatacccgaataaagcggtcgcgggcgcgttatattcccaggataaaggccagacgctggagatgatcaagcgcacgccgctggaatatcagcccggcagcaaacatatctacagcgatgtcgattatatgctgcttggatttatcgtcgagtcggttaccggtcagccgcttgaccgctatgttgacgagtcgatttatcggccgctcggactgacacatacagtattatacccgtgctga

SEQ ID NO: 142820 - DNA, 1605 bp, Homo sapiens
atgggtcaggcaaccccatgggtgctgaaggatctggacagcataggaggcctgggaaggtggctgctcattcctcatggccagagccagaactcagggcagcaatgcctgatcccaggacaaggcccaggccactgccaggactctcacagggacatccctacgcagaggcatcctacatcagaggactggcccttctcccttccctcttaccactgtggaagcctgggacccaacaggcttgaaatgagagctgaagagattgaatttgatgactgtgagatagagaaagatgtgggtgctcgctgtcatgtcggattacacactctcttgggtctcctaagtgccttggcatccctggggcatcagatggcctggcagcaccaggaacctgtgttcccaagaaatggaagaggccagcagggaagcacccatgggtctgctccaagcccttcctgggcagggcttcccggcagagttacacaacagctgatacatctgtgcacactcccggagcctccactccgacaggagctaaattcatccatcagtgagaaaacaaaacagatatatatgaaagagtcaaatgatggtttaagaagaagagtcacaacgaatgatcagaaaataaagccccagacagcagaagttaccatgaagaagggttttggaggcaatgggacccagcagggctgcaaaggtgctgagtgtctgtgtaagaagccggattggcccattaatttgttctcaacgccatccagcaacgagcaagacaaaaccacagggacgcccccccggcgaacaggggacgcccagggacaacccaaggagaaacaaccggccggccagaagcgcaacaccgcgaggggcacgcaaggagcacccccacgacccggggaggagccaaacgccccacagaccatcgacaagggcccccccagccccccgagccgcgggcacacgagacggctagcgagaagcgggaaccaaccgccagaaagacacacaccagccgcaggcggaaagacacgatatgttagacaaagtgtcctgcatagagcaagaggtggggaacccgtgagaatgcccaggttaccgagaattgctgaggcacagctccagatcgagttgaatgtttctgagttgttcagagcccagctagagaaatgcacagctgccaggcagacagcatgtgtcctgtttggtagggaagaatatggagatcggcagggagttgctaaagtagatcagaaaaaattcttgtatggatccctcaatctggactccaggcacatgcgtgcccctctgaagcgcataaaatgccggggaatcccagagatgggggggcggggatttgcaaatcttcgccgggcggaaagggtgagcggcgaaaagtggagggggggtccaccacccgcgcggggaccagcagagacagcgtgtcaaagaggcacgcaaacacgatgggagaacaggcacaaggtgagaaacacccgagagggacggtgtagaaaacaaaacgacggggaccaaagggccaaacccgaggcacaaaagcgccggaagaagaaacgagccgagaaccaccatgcacgggacccataa

SEQ ID NO: 142821 - DNA, 1714 bp, Homo sapiens
ctgcgccaatcagctcagggattgtttggtaataccgactatcacggggctggtgcgtttagtggtcgctggtgcaaatggggatcgcctggggcaacctgttactggcgctgatgtaaggctttcgcgatgccgcaaggtaatgccgtcacgttcagtagagatggggttggtaccgagctcgagtgtaatagtaactgttttgccattgattggcttcgtcctgctggcattctcccgtgggcgctggtctgaaaacgtctcggcgatcgtcggcgtaggctctgtgggcctggcggcgctggtaaccgcctttatcggcgttgatttcttcgctaacggcgagcagacatacagccagccgctgtggacgtggatgtcggtaggcgactttaacatcggttttaacctggtgctggacggcctgtcgctgaccatgctctcggtggtcactggtgtgggtttccttattcacatgtacgcctcctggtatatgcgcggtgaagagggctactctcgcttcttcgcttacaccaacctgttcatcgccagcatggtggttctggtgcttgccgacaacctgctgctgatgtacctcggctgggaaggcgtgggcctgtgctcctatctgctgatcgggttctattacaccgatccgaagaatggcgcagcggcaatgaaagcgttcgtcgtgacccgtgtgggtgacgtgttcctcgctttcgcactgttcattctttacaacgaactgggcaccctgaacttccgcgaaatggtggaactggcaccagcgcactttgctgacggcaataacatgctgatgtgggcgacgctgatgctgctgggcggtgcggtcggtaaatctgcgcagttgccgttgcagacatggcttgccgacgcgatggcgggcccgacgcctgtctccgcgctgatccacgccgcaaccatggtaaccgcgggtgtctacctgatcgcccgtacccacggcctgttcctgatgacgccggaagttctgcatctggtgggtattgtcggggcggttacgctgctgctggccggttttgccgcgctgtaacaataaaaatgacatcctcgccaccccaagcatcgtaacgctggataataaactcgcgtccttcaacgtggggcaggatgtgccggtgctatccgggtcacagaccacttcaggggataacgtctttaataccgtcgaacgcaaaacggtggggacaaaactcaaagttactccgcaggtcaatgaaggcgacgcggtgttgctcgaaatagagcaggaagtctccagcgttgactcttcctctaactcgacgctcggcccgacgtttaatacccgtactattcaaaacgccgtgctggtcaaaaccggtgaaacggtggtcctgggcggattgctggatgatttttctaaagagcaagtgtcaaaggttcctctgcttggcgatattcctttagtggggcaactcttccgctatacctccaccgagcgcgctaaacgcaacctgatggtatttatccgtccgacgattatccgtgacgatgatgtttatcgctcactgtcaaaagagaaatacacccgttaccgtcaggagcaacaacagcggatcgacgggaaatcaaaagcgctggttggctcggaagatttgccggtgctggatgaaaacacgttcaacagtcacgcccctgcgccatcgtcacg

SEQ ID NO: 142822 - DNA, 2192 bp, Homo sapiens
cttgccgtagcttccaaaattgctctggcttcgcaactatgatccgttcatggtctttcggtgaagttaaaaagccggaaaccatcaactaccgtacgttcaaaccagaacgtgacggccttttctgcgcccgtatctttgggccggtaaaagattacgagtgcctgtgcggtaagtacaagcgcctgaaacaccgtggcgtcatctgtgagaagtgcggcgttgaagtgacccagactaaagtacgccgtgagcgtatgggccacatcgaactggcttccccgactgcgcacatctggttcctgaaatcgctgccgtcccgtatcggtctgctgctcgatatgccgctgcgcgatatcgaacgcgtactgtactttgaatcctatgtggttatcgaaggcggtatgaccaacctggaacgtcagcagatcctgactgaagagcagtatctggacgcgctggaagagttcgatgggggcggaacaatccaggctctgctgaagagcatggatctggagcaagagtgcgaacagctgcgtgaagagctgaacgaaaccaactccgaaaccaagcgtaaaaagctgaccaagcgtatcaaactgctggaagcgttcgttcagtctggtaacaaaccagagtggatgatcctgaccgttctgccggtactgccgccagatctgcgtccgctggttccgctggatggtggtcgtttcgcgacttctgacctgaacgatctgtatcgtcgcgtcattaaccgtaacaaccgtctgaaacgtctgctggatctggctgcgccggacatcatcgtacgtaacgaaaaacgtatgctgcaggaagcggtagacgccctgctggataacggtcgtcgcggtcgtgcgatcaccggttctaacaagcgtcctctgaaatctttggccgacatgatcaaaggtaaacagggtcgtttccgtcagaacctgctcggtccatacctgcgtctgcatcagtgcggtctgccgaagaaaatggcactggagctgttcaaaccgttcatctacggcaagctggaactgcgtggtcttgctaccaccattaaagctgcgaagaaaatggttgagcgcgaagaagctgtcgtttgggatatcctggacgaagttatccgcgaacacccggtactgctgaaccgtgcaccgactctgcaccgtctgggtatccaggcatttgaaccggtactgatcgaaggtaaagctatccagctgcacccgctggtttgtgcggcatataacgccgacttcgatggtgaccagatggctgttcacgtaccgctgacgctggaagcccagctggaagcgcgtgcgctgatgatgtctaccaacaacatcctgtccccggcgaacggcgaaccaatcatcgttccgtctcaggacgttgtactgggtctgtactacatgacccgtgactgtgttaacgccaaaggcgaaggcatggtgctgactggcccgaaagaagcagaacgtctgtatcgctctggtctggcttctctgcatgcgcgcgttaaagtgcgtatcaccgagtatgaaaaagatgctaacggtgaattagtagcgaaaaccagcctgaaagacacgactgttggccgtgccattctgtggatgattgtaccgaaaggtctgccttactccatcgtcaaccaggcgctgggtaaaaaagcaatctcccaaatgctgaacacctgctaccgcattctcggtctgaaaccgaccgttatttttgcggaccagatcatgtacaccggcttcgcctatgcagcgcgttctggtgcatctgttggtatcgatgacatggtcatcccggagaagaaacacgaaatcatctccgaggcagaagcagaagttgctgaaattcaggagcagttccagtctggtctggtaactgcgggcgaacgctacaacaaagttatcgatatctgggctgcggcgaacgatcgtgtatccaaagcgatgatggataacctgcaaactgaaaccgtgattaaccgtgacggtcaggaagagaagcaggtttccttcaacagcatctacatgatggccgactccggtgcgcgtggttctgcggcacagattcgtcagcttgctggtatgcgtggtctgatggcgaagccggatggctccatcatcgaaacgccaatcaccgcgaacttccgtgaagtctga

SEQ ID NO: 142823 - DNA, 2345 bp, Homo sapiens
atgctgccagagcagtgcttccgtctgcgggtgatgcaccgtctgacgctcaccgccagccacgttcgtcatactgccaccgctctgtcgccccgggatatcgtctgggacttccgcctgccgcgtgtgaaatcgatcaataggcaggcagctgtcatccgtagagtgactctagaggatcccatgcaattctgcccggatgcggtgttccgcaagtgtgttatcgaactggacattgccaaaggcaaatttgtcgctaaagcgcgttttcttgctgaagcaggctggcgcacgctgttaggcagcaaagagcgcgatgaagaaaacgacggcacgccactgcctgtggtggcgaaaggcgatgagttgctgtgtgaaaaaggtgaagtggtagagcggcaaacccagccgccgcgccattttaccgatgcaacactgctttcggcgatgaccgggatcgcgcgctttgtgcaggataaagatctgaaaaagatcctccgtgcgaccgatggtctggggacagaggcaacgcgtgccgggattattgaactgttgttcaagcgtggtttcctgaccaaaaaagggcgctatatccactccaccgacgccggaaaagcgctattccattcgctgccggagatggcgacgcgaccggacatgaccgcgcactgggaatcggtgctgacgcaaatcagcgaaaagcagtgtcgctatcaggactttatgcagccgctggtggggacgctatatcagcttattgatcaagccaaacgtacgccggtgcggcagtttcgcggcattgtggctccgggcagtggtggcagtgctgataagaaaaaggctgcaccgcgtaaacgtagtgcgaaaaaaagtccgccagcagatgaagtcggaagcggggcgatagcacaggatgtttctatgactcaaaatatcaggccgttaccccaattcaaatatcatcccaagccactggaaacaggcgcatttgaacaggataaaaccgtagagtgcgattgctgtgaacaacagacgtcagtttattactcgggtcccttttattgcgttgatgaagttgaacatctctgtccgtggtgtattgcggacggttctgctgctgaaaagtttgcaggtagttttcaggatgatgccagcatagaaggtgttgaatttgagtatgatgaagaggacgaatttgccggtattaagaacacatatcctgatgaaatgctgaaagagttggttgaacgcacgccaggttatcatggatggcagcaggaattctggctcgcgcatttggcgaagggtcgcgcttggtgcccatttgactcccccgcagttagccgtgaccggaagttacaagcaggattaccgcgttttcgtgcgtttgcctttgacattgttgccagctgttcatggtactcccatcagcgactggcaaatctgccgctggtgcgaattggtgaagacgcgcaccgcaacccgttaatgcagaacgaaaaacgtaaaaatttgaccatcctgattgtcggcgaaacctcgcgggcggagaacttctccctcaacggctacccgcgtgaaactaacccgcggctggcgaaagataacgtggtctatttccctaataccgcatcttgcggcacggcaacggcagtttcagtaccgtgcatgttctcggatatgccgcgtgagcactacaaagaagagctggcacagcaccaggaaggcgtgctggatatcattcagcgagcgggcatcaacgtgctgtggaatgacaacgatggcggctgtaaaggtgcctgcgaccgcgtgcctcaccagaacgtcaccgcgctgaatctacctgatcagtgcatcaacggcgaatgctatgacgaagtgctgttccacgggcttgaagagtacatcaataacctgcaaggtgatggcgtgattgtcttacacaccatcggcagccacggtccgacctattacaaccgctatccgcctcagttcaggaaatttaccccaacctgcgacaccaatgagatccagacctgtaccaaagagcaactggtgaacacttacgacaacacgctggtttacgtcgactatattgttgataaagcgattaatctgctgaaagaacatcaggataaattttccgactcactcccggttaatggcgctatcccaccgccgccgaccacttcaccctcgctgactatatacttgatacagctcgtcaagattcggatcggcgacggtgtagcctttatcagcggtaagaccgtattcggcggatacctgacgaatgacgcgggcgatagcaggattatcctgcagcgtcaggcgacgcattacag

SEQ ID NO: 142824 - DNA, 5287 bp, Homo sapiens
tcagacaaatgaaagttgagggatttcatcaacgccagacctgtcctccgtgcccctatgaactgtttcttttcctctcgagtctttattggtcatagccctagatttcccatcaaattcaacccggcctgagcggcaggcaatgcccctgctgggtgcggattgcaggcccaccactggagggcgtctggacgcttctaaacagctctgaagcgcctggaaatcccgtctgaggactggaaagcgcaggagggtgaacgtgagatttgattttattgggacccgcgctcgcgccgcccgcccgtcccgcgtcccgcgcaacacgcccgggcggagccccatccccccgccacgtccacgttcacgcgtgcggcctcgcgctctgctgaggctgctgccatgggtcgccgccgctgtcggctttccacgcaagtcattaacgagggggctctgttgctgctgtgcctgccgaagacgcgaagagccaaacttttctttgaggttttcgaggcaagaccgcttcgaaagccggcgcagctgccgcttaaccagttccaggacaccgacaaggctgggttgcggctccggatccccacccttctcggcgcaccgcccggtaccgcagcacttacgactcctctgagatttctgggggtcgccccgccatctgatgccccagggatgccaaggcacttaggagacccaaggagtgtgtaatccgacatgacagctcctggctcggccactctggcagcttgttctgcacacatgacgtaacccggcattagatcaaatttctggcaccttgaacccactggggttgctgctgtccagtagacagcgtagcggtcggcgacggccttggagcccgggtcctggtgaacacacacatccagagcaccagaaacaccagcgtcaacatctccactcggtgggaaggcgtgggcctgtgctcctatctgctgatcgggttctattacacgatccgaagaatggcgcacggcaatgaaagcgttcgtcgtgacccgtggggtgacgtgttcctcgctttcgcactgttcattctttacaacgaactggcaccctgaacttccgcgaaatggtggaactggcaccagcgcatttgcgacggcaataacatgctgatgtgggcgacgctgatgctgctgggcggtccgtcggtaaatctgcgcagttgcacttgcagacatggcttgacgacggcatggcgggccccaacgcctgtctccgcgctgatcaaagccgcaacgcatgtaaccgcgggtgtctacctgatcgcccgtaccaacggcctgttcctgatgacgccggaagttctgcatctggtgggtattgtcggggcggttacgctctgctggccggtttttccgcgcatgagccagattggctacatgttcctcgcgcttggcgtgcaggcatgggatgcggcgattttccacttgatgacccacgcgttctttaaagcgctgctgttcctggcatccggttccgtcattctggcctgccatcacgaacagaacatcttcaagatgggcggtctgcgtaaatctattccgctggtttatctctgcttcctggtgggcggcgcagcactgtcggcactaccgctggtcactgcgggcttcttcagtaaggatgagatcctcgcgggtgcgatggcgaatggtcatatcaatctgatggtggcaggtctggtcggtgcgtttatgacctcgctctacaccttccgtatgattttcatcgtcttccacggaaaagaacaaattcacgctcacgccgtgaaaggggtaactcacagcctgccgctgattgtgctgctgatcctttccaccttcgttggcgcactgattgtaccgccgctgcagggcgtgcttccgcaaacgacggaactggcgcacggcagcatgttgaccctggaaattacctctggcgtggtcgcggtggtcggcattctgctggcagcctggctgtggctgggtaaacgtactctggtgacctccatcgccaacagtgcgccgggccgtctgctgggcacctggtggtacaacgcctggggatttgactggctgtatgacaaagtgttcgtcaagccgttcctgggtattgcctggttgctgaaacgcgatccgctgaactcaatgatgaacatcccggctgtcctttcccgctttgcaggtacaggccggtggttagtgagaacgggtatctgccctgtgttgcaggcgctgccgctggattcgctgcataacgtactggttttcttgtcgatgccggtcgtcgctttcagcgtgattaatattgtcctgacactaagctctttcttatggcttaatcgaccactggcctgcctgtttattctggttggcgcggctgcacaatatttcataatgacttacggcatcgtcatcgaccgctcgatgattgccaatattattgataccactccggcagaaagttatgcgctgatgacaccgcaaatgttattaacgctgggattcagcggcgtgcttgctgcgctgattgcctgctggataaaaatcaaacctgccacctcgcgtctgcgcagtgttcttttccgtggagccaatattctggtttctgtactactgattttgctggtcgccgcactgttttataaagactacgcctcgttgttccgcaataacaaagagctggtgaaatccttaagcccctctaacagcattgttgccagctggtcatggtactcccatcagcgactggcaaatctgccgctggtgcgaattggtgaagacgcgcaccgcaacccgttaatgcagaacgaaaaacgtaaaaatttgaccatcctgattgtcggcgaaacctcgcgggcggagaacttctccctcaacggctacccgcgtgaaactaacccgcggctggcgaaagataacgtggtctatttccctaataccgcatcttgcggcacggcaacggcagtttcagtaccgtgcatgttctcggatatgccgcgtgagcactacaaagaagagctggcacagcaccaggaaggcgtgctggatatcattcagcgagcgggcatcaacgtgctgtggaatgacaacgatggcggctgtaaaggtgcctgcgaccgcgtgcctcaccagaacgtcaccgcgctgaatctacctgatcagtgcatcaacggcgaatgctatgacgaagtgctgttccacgggcttgaagagtacatcaataacctgcaaggtgatggcgtgattgtcttacacaccatcggcagccacggtccgacctattacaaccgctatccgcctcagttcaggaaatttaccccaacctgcgacaccaatgagatccagacctgtaccaaagagcaactggtgaacacttacgacaacacgctgtttacgtcgctatatgtgtggccaggagggccaccacaacgacgatgcaactcagcaccacacgaaacacaacgaccagtacccacacaccacaacaacgcacacaaacaacacacagcaaaaacaacaccacaacacaaactaaactacccgccacaacaacacaaacgacacgagcaacgccacacacgacaacaccacacaacacaccacacaccaactcacacgccagcccaaagacaaccacaaaaagacaccaatccccacgatacaacaaacaaccgcaccaaaaagacacaaacgccagcacgaacacaacaacacacaacccaacacgacaacacaaagacacacacgaacgaaaaaacgcaaaagaaaccgcaagacacaaacacagcgacgtacaacaacagcacacaccgcagacacactacagtcagcaccactccccgcaacaagacaaacagaggcaaacgcacaaaaagcaacacacgaacaagaacccgagaaccacaccaacaagcaacacaaaccagacacacacataacacagacaacccacgacgaccaacgacgaaaaaaaggacgacggacgaccaccaaaacaagacccaaccgaaacacaccatacggaacacgcagacaccacaacgacacacaacacggcgccagtcagcaccagcaccgccaccaccgcaacgcgaaccagacaaccaaacggcacaaacagacataagcaagaaaagaacgcatttctttgttctctcgtgtctgttgtcttctttcctacgacagaaggaaaagaggatgggaagcgagagcagacacaagaagtggacctcgtgttcccttgctctgttttgtattcccgccatattgcggaatgggcgggaaccatgtaacacggacccgttagcccatgttccgaattggcccggacccaggtgccaccaggtaaccagtcagcaccagcgttcgcccttggggcgtaacacagtcacgggtcatgtagtacagacccagtacaacgtcctgagacggaacgatgattgtttcgccgttcgccggggacaggatgttgttggtagacatcatcagcgcacgcgcttccagctgggcttccagcgtcagcggtacgtgaacagccatctggtcaccatcgaagtcggcgttatatgccgcacaaaccagcgggtgcagctggatagctttaccttcgatcagtaccggttcaaatgcctggatacccagacggtgcagagtcggtgcacggttcagcagtaccgggtgttcgcggataacttcgtccaggatatcccaaacgacagcttcttcgcgctcaaccattttcttcgcagctttaatggtggtagcaagaccacgcagttccagcttgccgtaaatgaacggtttgaacagctccagtgccattttcttcggcagaccgcacttgatgcagacgcaggtatggacctacgggggattacagaacgaccgggagtagttcaacacgcttaccgaggcaggtttctgacgggaaacgaccctgtttacctttgatcatgttcggccaaagatttcagagggacgcttgttagaaccggggattcgcacgaccgcgaacgaccgttatccagcagggcggtctaccggttccttgcggcatacgtttttcgttacgtaccaatattgtccggcgcagccagatccagcagacgttcagacgattgttacgggatcctctagagtcacctcagcatgcgctgcctgccccagcccagcaagcagagggctgtgttactgttgacaacatgttttccatgatactgactgttgtcaactgtctgctacctgggcaaaacatgtatttccccagtcactga

SEQ ID NO: 142825 - DNA, 249 bp, Homo sapiens
ttgttttttgaaaagattaacaaagtagatagaccactagccaataaaaaataataaagggaatatcaccactgaccttccagaaatacaaactaccattagggaatactataaacacctctatgcaaataaactagaaaatctagaagaaatggataaattcctggacacatacaccttccaaagactaaaccaggaagaagtcgaatccctgaatagaccaataacaagttctgaaattgaggcagt

SEQ ID NO: 142826 - DNA, 834 bp, Homo sapiens
tcatgatttggctctctgtttgtctgttattggtgtataagaatgcttgtgatttttgcacatgattttgtatcctgagactttgctgaagttgcctatcagcttaaggagattttgggctgagacgatggggttttctagataaacaatcatgtcatctgcaaacagggacaatttgacttcctcttttactaactgaataccctttatttccttctcctgcctgattgccctggccagaacttccaacactctggtagaattcggctgtgaatccatctggtcctggacttttttggttggtaagctattagttattgcctcaatttcagagcgtgttattggtctattcagggattcaacttcttcctggtttagtcttgggagggtgtatgtgtcaaggaatttatccatttcttctaggttttctagtttatttgcgtagaggtgtttattctctgatggttgtttgtatttccagtagtcattcaggagcaggttgttcagtttccatgtagttgagcggttttgagtgagtttcttaatcgtgagttctagtttgattgcactgtggtctgagagacagtttgttataatttctgttcttttacatttgctgaggagtgccttacttccaactatgtggtcaattttggaataagtgtggtgtggtgctgagaagaatgtatattctgttgatttggggtgaagagttctgtagatgtctattaggtccacttggtacagagctgagttcaactcctggatatccttgttaactttctgtcttgttgatctgtctaatgttgacagtggggtgttaaagtctcccat

SEQ ID NO: 142827 - DNA, 4452 bp, Homo sapiens; identical to SEQ ID NO: 130477

SEQ ID NO: 142828 - DNA, 927 bp, Homo sapiens
tcaaatatctctggaaagtagccgtgttcgttcattgttaatagggcaaggtgcagtgtcatagagggttaatccatgtaaattggcttccacccgtaaagaaattttaattacggcagaaggggaagccaacatcttcttcacaagaaactccaaagactgaaccaggaagacttttgaaaccctgaacagaacaataacaagttctgaaattgaatcagcaataaaaaaccctcttgcttgcaagtcttgtgtaggatgtaccaagaatgcaacatcgagtgataaggaggaactgtacagaacagcccagtcattgtcctcatctctcctctggtagaatttggctgtgaatccgtctggtcctggactttttttggttggtaggctattaattattgcctcaatttcagagcccgttattggtctattcagggattcaacttcttcctggtttagtcttgggagggtgtatgcgtccaggaatttatccatttcttctagattttctagtttatttgcatagaggtgtttatagtattctctgatggtagtttgtatttctttctctctggctgcccttaacattttttctttcatttcagctttggtgaatctgacaattatgtgtcttggagttgctcttctcaaggagtatctttgtggcattctctgtatttcctgaatttgaatgttggcctgctttgctaggttggggaatttctcctggataatatcctgcagagtgttttccaacttggttccactctccgggtcactttcagatacaccaatccgatgtagatttggtttcatttcattcatttgatcttcaatcactgatactctttctcctagttgatcgaatcggctactgaagcttatgcattcatcacgtagttcttgtgtcatgtttttcagctccat

SEQ ID NO: 142829 - DNA, 1212 bp, Homo sapiens
tcacttgctgggatagagttgtagttccccaattactagtagttccactacctcttctaacttgtcaaataatgaggagactttgaaggctaaatccagcagtagctcctctttatttgtgttgctgtctctttccacttttttaatttctccagttcttctcccctcaatctctgcttcctttgtgggcaatgcaagaggctcttttccttccagctggcaaggcattaaggaggtctcctgttgtgtggcctggttcctaacaggccacagagtggtagtggtccagggcctggggactggggatccctgccacggccagatacccctctgagacaaagcttccagaggaatgatcaggcagcaacatttgctgttcagcaatattcgctgttctgcagcctccactgctgatacccaggcaaacagggtctggagtggacctccagcaaactccaacagacctgcagccgagggtcctgaccattccattctgtgtgtcatgctgccgaagcagcacttggaatctagaagtaccaagtgccacaattcgtctccttgtgactcatggcaccagatgacaagcaatcctctgtccttcagcagcaccagaaacagtggaggatccgtgtgggtgttcacagcgttgtgaatagattgagaaggtggcttttgagtaaagaagttagccatgcagacgcttggaggagagttcctatgaggaaatgacttatgccccaagaccataaggacaggggatgcttggtgcgttccaggaaccacaaggaagtcagcatggaagtagggtaaaatctcaggctctttgtcattcttgccagtaagggatgggctctgatagaatttggctgtgaatccgtctggtcctggactctttttggttggtaggctattaatcattgcctcaatttcagagcctgttattgatctattcagggattcaacttcttcctggtttagtcttgggagggtgtatgtgtcgaggaatttatccatttcttctagattttctagttcatttgcgtagaggtgtttatagtattctctaatggtagtttgtatttctatgagtgagaacatgcggtgtttggctttttgtccttgtgatagtttgctgagaatgatggtttccagcttcatccatgtccctgcaaaggacatgaactcatctttcatggctgcatagtattccat

SEQ ID NO: 142830 - DNA, 1341 bp, Homo sapiens; identical to SEQ ID NO: 119021

SEQ ID NO: 142831 - DNA, 3228 bp, Homo sapiens
atgaggaacagtttggaactttctagagacttgttaaattgttgtgaccaaaatgttggtagtgatgtggacaatgaagttcagactgaggaggtctcagatgaaaatgagaaatttattgggaactggaataaaggtcactcttgctatgctttagcaaagagactggtggcattgtgcccctgctctagggatctgtggaactttgaacttgagagagatgatttagggcccagaggcctaggagggaagaatgatttcctgagccaagcccagggccctgctgccctgcagagccttggggcactgctccctgcatcccagacacttcagctccagcagtggctcaaaggggcccaggtacttggactgcagcttcagagggtgcaagctttggtggctccacatgatgttaagcctgcaggcagcccatggctacagaagaagctgctcccagtcacctctggcttggtttggatgggtgaggttgtcccgtttctgcagctccagtcgtggcttaaaggggccaatgtacagctcaggccattgtttcagaaggtgcaagacccaagccttggtggcttccacatgttgggcctttgggtgtgcagaagacaagagttgaactttgggagcctctgcctagatttcaaaggatgtatggaaacacctggatgtccaggcagaagtctgctgcagggacagagccctcgtggagaacctttaccagggcaatgcagaggcagaaatgtgggtttggagcccccacacagagaccccactggggcactgcctagcatagctgtgagaagaaggccaccatcctccagaccacagaatgttaggtacactggcagcttgcactctgtgcttggaaaagtcacaggcattcaacaccagcccatgaaagcagccataggggatttaccctgcagagccacagaggcagagctgcctcaggccatgggagcctaccccttgcatcagtgtgtcctggatgtagaccccaaaacaagactgcatgatacaggagaggataaaggacagagccccgtgacacaccggcagaggccccttacttactgtttggttgataaaaatccagccaatgggctgatcatcaagtccacatcaaccaacctgtctaaaagtagcaaggcatctctgaaagaaaaagcagcagccccagtcaggggtttagagataaaactcccatctccctgggacagagcacctgagggaaggggtgactgtgggcacagcttcagcagacttaaatgttcctgcctgccagctctgaagagagcagctaatcttccagcacagcacttgaactctgctaagggacagactgtctcctcaagtgggtccctgacccccatgtctcctgactgggagacacctcccagcaggggtcaaaagacgccttataaaggagagctctggctggcatctggtgagtgcccgtctgggacaaaacttttagaggaaggaacaggcagcaatctttgctgttctgtagcctctgctggtgatacacagacaaacagggtctggagaggacctccaacaaactccagcagacctgcagcagagggacctgttagaaagaaaactaacaaacagaaacgaatagcatcagcatcaacaaaaacgacatccactcaaaaaccccacccaaatgtcaccatcatcaaagaccaaagatatataaatccacgaagtacaatcaaattagaactcggaattaagaaactcactgaaaactgcacaactacatggaaactgaacaacctgctcctgaatgactgctgggaaaagcaggaaagatctaaaactgacaccctaacatcacaattaaaagaactagagaagccagagaaaacaaattcaaaagctagcagaagacaagaaataactaagatcagagcagaactgaaggagatagggacacgaaaaacccttcaaaaaatcaataaatgcggaagctggttttttgaaaagattaacaaaatagatagatcactagctagactaataaagaagaaaagagagaagaatcaaatagacacaataaaaaatgatgaagcagatatcaccactgatcccatggaaatacaaactaccaacagagaatactataaacacctttatgcaaataaactagaaaatctagaagaaatggataaattcctggacacatacaccctcccaagactaaaccaggaagaagttgaatccctgaatagaccaataacaagttctgaaattgaggcagtaattaatagcttactaaccaaaataagtccaggactagatggattcacagccgaattctaccagaggtacaaagaggagctggtactgtttcttctgaaactattccaaacaatagaaaaagatggactcctccctaactcattttatgaggccagcatcatcctgataccaaaacctggcacagacacaacaaaaaaagaaaatttcaggccaatatccctgatgaacgtcaatgcaaaaatcctcaataaaatactagcaaaccgaatccagcagcacatcaaaaagcttatccatgatgaccaagtcagcttcatccctgggatgcaaggctggttcagcatatgcaaaccaataaacataatccatcacataaacagaaccgatgacaaaaaccacatgattatctcaagagatgcagaaaagtccttcaataaaattcaacagcccttcatgctaaaaactctcaataaactaggtatcagtggaacatatctcaaaatagtgaagatgcacaccatgtcctcctcgcatctcttctacctggcgctgtgcctgctcaccttcaccagctctgccacggctggaccggagacgctctgcggggctgagctggtggatgctcttcagttcgtgtgtggagacaggggcttttatttcatggagcagtgtacgatggctgtttccattcgtggcagagagctgctggggccatcggagcaagagatgcttcacaaagaaagtggaaagcagcgccaaaaggcaaatacaattcctgtcacatccaaaatagttcatttagctctttatgctactctcttactctttgtcatggagcaatttctaggagagtcgcataaaagtagggagatttttagctttgagcagcaaataagtgaactgggcaaggagagcatgaaatttagtgaggaaaaagaaaaagaatga

SEQ ID NO: 142832 - DNA, 1524 bp, Homo sapiens
tcacatctcagggatgaaggcgacttgatcgtggtagataagctttttaatgtgctgctggattcggattgccagtattttaatgaggattttcgcattgatgttcatcagggatattggcctgaaattttctttttttgttgtgtctctgccaggttttggtaacaggatgatgctggcctcataaaatgagttagggaggagtccttctttttctttggtagaatttggctgtgaatctgtctggtcctgggcttttttggttggtaggctattaattactgcctcaatttcagaacttgttattggtctattcaaggattctacttcttcctggtttagtcttgggagggtgtatgtgtccaggaatttatccatttcttctcgatgttctagtttatttgcatagaggtgtttatagtattctctgatggtagtttgtattttggtttcaaataacttatttatttctgccttaattttgttatttacccagtagtcattcaggagcaggttgttcagtttccatgcagttgtggggtttttagtgagtttcttaatcctgagttctagtttgagttcactgtggtctgagagactgtttgttatgatttttgttcttttgcatttgctagggagtactttacttacagttatgtggtcagttttagaataagtgtgaggtgttgctgagaagaatgtatattctgttgatttggggtggagagttctgtagatgtctattaggtccacttgatccagagctgagttcaagtcctgaatatccttgttaattatctgtctctttgatctgtctactattgacagtggggtgttaaattttcccactattattgtgtgggagtcgaggtttctttgtaggtctctaagaacttgctttatgaatctgggtgctcctgtattgggtgcaaatatatttaggatcgttagctcttcttgttgcattgatccctttaccattatgtgatgcccttctttgtcttttttgatctttgttgatttaaagcctgttttatcagagactaggattgcaacccctgcttttttttgctttccatttgcttgataaatcttcctccatctctttattttgagcttatatgtgtctttgcacatgagatgggtcgctgaatacagcacaccgatgggtcttgaccctttatccaatttgccagtctgtgtctgaaaattgtggctttcactgttatcattgacgacaccagtgaagttacaaagctgctcattagtaactgaaattagattttctcttgttgaaggaattttcagtttttcagagaatgagagttgtaatctcacttctattgaacgttgtactgaaggttctgggcctcttgacagcaatttttgctcagttgccagtagactgatatattttttcgtagatagccaaacagcaatgcacatatgttggttaggaagacaatctacttcactgtctgctgcctcagtgcttctcggcatcttttcttcaccacgtgacat

SEQ ID NO: 142833 - DNA, 825 bp, Homo sapiens
tcatctttctatcaaacatcgattgagtttgagcgagggcgtggaggggttgagcacagtgccaggcactggaagcacgttggtgaacaagacaagcctgggcaatgttcccacagagctcacgatcagctcgtctttgtacctctggtagaatttggctgtgaatccgtctggtcctggactttttttgattggtaggctattaattattgcctcaatttcagagcctgttattggtctattcagggattcaacttcttcctggtttagtcttgggagggtgtatgtgtccaggaatttatccatttcttctagattttctagtttatttgcgtagaggtgtttatagtattctctgatggtagtttgtatttccagccgtcttttctctcgttttgatgaggacatggaaacactgtcatgcctgggcaggtctgcagactggctgtgggaccctggtaaccaccgggtcctcctagtcatcagagatccagcactggttccagggtcagcctcggtggagcagatgtagggtctcaggaaggagacacgaagccagtacagttttgcctttatgcttcttgctaccccaaaatagcagcagcatgcagctgggctgaaatcgcagcatgcctctgtgagtgagtcctctcgaactctcgtgctgtaggaagttactaaacaccaggtttcctccaattttaagatgagggataaggaccgcagcgggcgagcatctagtctgcggaaacatcgacgtgagtagcggtgcaggatgtgaagtcttctggctggcgagtccacttttaggtggaagtggggcat

SEQ ID NO: 142834 - DNA, 1347 bp, Homo sapiens
atggctaaattcctggacacatacaccctcccaagtctaaaccaggaagaagttgaatccctgaatagatcaataacaagttctgaaattgaggcagtaattaatagcctaccaactaaaaaagtcccggaccagatggattcacagccaaattctgccagagttactttaacagttataaagatgttcttcttctcattaaataaggagatggaagatcaaaaagaaccagtgtgtccgtcagcgtcgcttcataaaagcggcatgctggcagtcaaaggtaaatacatcaccatcgaaaataacgatgcgctggcccagcttgctggtcatacgcttgttgtaaggagaccctgtatggctatgtatcagaacatgctcgttgttatcgatcctaaccaggacgaccaaccagcattgcggcgagctgtttatttacatcaacggattggtggcaaaattaaagcctttttgccgatctatgacttctcatacgaaatgaccaccctgctctccccggacgaacgtaccgctatgcgtcagggcgtcatcagccagcgtacagcctggatccacgagcaggcaaaatattatctcaatgctggcgttcccattgaaattaaagtggtctggcataaccgtcctttcgaagccatcattcaggaagtgatcagcggcggacacgatttggtgctaaaaatggcgcaccaacatgaccgtctggaagcggtgatttttacgccaacggactggcatctgttacgcaaatgcccaagcccggtgtggatggtgaaagaccagccgtggccggaaggaggcaaggcgctggtggcggtgaatctcgccagtgaagagccgtatcataatgcgctcaatgaaaaactggtcaaagagacgatcgaactggcagaacaagtcaaccataccgaagttcatctggttggcgcttatccggtaacgccaattaatatcgcgattgaactgccggaatttgacccgagcgtttataacgatgccattcgtgggcaacatttgctggcaatgaaagccctgcggcagaaattcggcattaatgaaaacatgacgcacgtagaaaaaggtctgccagaagaggtgattcctgatttggcggagcacttacaggcggggattgtggttctgggcacgccaccaaccggggccggggaagggaactggtcggttttcgcgctggacgggaattacgcggaagaaaagcagatggaatcggagccctcggccatatcacaacggggaaaacaaggcaacagaagaggacaggaacaagaggccgacatcagggcccacattgccacgacacaggggtga

SEQ ID NO: 142835 - DNA, 2315 bp, Homo sapiens
atgggtgactttaacgctgcactgtcaacattagacggatcaatgagacagaaagttaataaggatacccaggaattgaactcagctctgcaacaagcagacctaatagacatctacagaactctccaccccatatcaacagaatatacattcttctcagcaccacatcacacttattccaaaactgaccacatagttggaagtaaagctctcctcagcaaatgtaaaagaacagaaattataacaaactgtctctcagaccacagtgcaatcaaactagaactcaggattaagaaactcactcaaaatcgcccaactacatggaaactgaacaacctgcttctgaatgactactgggtacataacgaaatgaaggcagaaataaagatgttctttgaaaccaatgagaacaaagacacaacataccagaatctctgggacacatttaaagcggtgtgtagagggaaatttatgccactaaatgcccacaagagaaagcaggaaagatctaaaattgacaccctaatatcacaattaaaagaactagagaagcaaaagcaaacacattcaagagctagcagaaggcaagaaataactaagatcagagcagaactgaaggagatagagacacaaaaaacccttcaaaaaaaatcaatgaatcccaggagctggtttttttttaaagatcaacaaaattgatagatcactagcaagactaatgaagaagaaaagagagaagaatcaaatagacacaataaaaaaatgataaagggaatatcaccaccgatcccacagaaatacaaactaccatcagagaacactataaacacctctatgcaaataaactagaaaatctagaaggaatggataaattcctggacacatacaccctcccaagattaaaccagaaagaagttgaatccctgaatagaccaataacaagttctgaaattgaggcaataattaatagcctaccaaccaaaaaaagtccaggaccagatggattcacagccgaattctaccagaggtacaaggaggagctggtaccattccttctgaaactattccaatcaatagaaaaagaaggaatcctctctaactcattttatgaggccagcatcatcctgataccaaagcctggcagagacacaacaaaaaagaagaactttagaccaatagccctgatgaacattgatgcaaaaatcctcagtaaaatactggcaaaccgaatccagcagcacatcaaaaagcttatccaccatgatcaagtgggcttcatccctggaatgcaaggctggttcaacatacacaaatcaataaacgtaatccagcatataaacagaaccaaagacaaaaaccacatgattatctcaatagatgcagaaaaggccttcgacaaaattcaacagcccttcatgctaaaaactctcaataaactaggtattgatgggacgtatctcaaaataataagagctatatatgataaacccacagccagtatcatactgaatgggcaaaaactggaagcattccctttgaaaactggcacaagacagggatgctctctctcactattcctattcaacgtagtgttggaagttctggccagggcagtcaggcaagagaaagaaatagagggtattcaattaggaaaagacgaagtcaaattgtccctgtttgcagataacatgattgtatatgtagaaaaccccatcatctcagcccaaaatctccttaagctgataagcaacttcagcaaagtctcaggatacaaaatcaatgtgcaaaaatcgcaagcattcctatacaccaataacagacaaacaaagagccaaatcatgagtgaactcccattcacaattgcttcaaagagaataaaatacctaggaatccaacttacaagggatgtgaaggacctcttcaaggagaactacaaaccactgctcaacgaaataaaagaggacacaaacaaatggaagaacattccatgctcatggataggaagaatcaatattgtgaaaatggccatactgcccaaggtaatttatagattcaatgccatccccatcaagctaccaatgactttcttcacagaattggaaaaaactactttaaagttcatatggaaccaaaaaagagcccgcattgccaagacaatcctaagccaaaagaacaaaactggaggcatcatgctacctgacttcaaactatactacaagcctacagtaaccaaaacaaaatggtactggtaccaaaacagagatatagaccaatggaacagaatagagcccccggaaataatatcacacacctaa

SEQ ID NO: 142836 - DNA, 551 bp, Homo sapiens
ctatgttggattttgccacggtttataccgtggctttttttgtacattgcctgatgcgcttcgcttatcaggcctacatgatctctgcaatattagaatttgcgcgattttcaggaaggatatggtactcatgccgcatccgcatgagtactgcactcttatgcgatataaatcgcatccgctttaaaggtaggcatttcacgccatcacccataaggcagcatcccatcacggtcattactggttgcgacgacgccaaccagaggggttacggcggcgttggagtgagcgctccaggataccagggggccgctgcggcaatgagataccaaataatcggggaaaacgcggggaaagacggcggagataaccagggggccgcacaggacaaattgggggaaggggaggcgagccagtgtgaccgtaggtttgcgggcttgcagcgtgccaaacgtcggcgtcatggtggcattaccattcacgcgccagcgaggccaaaagtggcatcttccttagagctggtggtgaacatcttcacgtttccgcattga

SEQ ID NO: 142837 - DNA, 1992 bp, Homo sapiens; identical to SEQ ID NO: 124847
  misc_feature (1)...(1992): n = a,t,c or g

SEQ ID NO: 142838 - DNA, 1566 bp, Homo sapiens
tcactgccatccacgcttccacgtgatatatccggagacacctcccgcgtatgtgggagacaagagcatattcctcgtgaaaattgcccgatcgatcgtagctactagcaaccccaggaggccgttcggtatcaaagtttcggcggttgttttgttaatatccagcagcacaagcccttttagctgccctgcgacatataccggcgtcagcaaactcatcacgttctgtttagtacgctgatcctggtaaatgctcgacaatacggtacgcccggtaaataccttttcaatatctttgcgatcgatgccaatacttcctgactgcaggaaggaccagttattcatcgcaaagtattcaacattaaccggctcataaaaatagacatagcggtcattgagatcgagataatagtgaaatttctcttcggccatcccaagacctgaaccgtaatcatcctggtggcggttgccttccactgcctgatcaaaagcgggtaatagtgctgcagcttccacaattgtgtcgcagtcagtggatgcggtttgtagtgtgccgcgtaagcccgggtatttatgggcagtcaggtttaagccatgggtgttattggcagactcaaaagcctcgcagatggcgcgccgctgttctggcgacacttccgactgctcagcagcgagagcgcgcatcacatgcgcggcaatactctgattctgatacttatcataaagaaaggaggagtctgctttctgcacgatatagcgcagataggcactcattgctctgtcgctggcgacaagttcaaaaataaggaaggaagatgtcagcacaatgacacttgcggcgataaaatgccggagcattctatggtgcaatttcatgataaatggcactccttcggttagtgaaacgagaaaaccagataagtgggactatgcgtgtctgtgtgcgttgtgctgttggtgtcctgcacgtcggtctggctggtagtctgctagtccttgtgctgcgtctcgacaacaacgttgcacttgcatatgagtggtatgttatgctattgatgtgtgcgtgcgtgcacactgtgctagccacgatgcacacatgcaccgtgctaatcactgccatgtgcactgctgggaatgatatggcgcttgcaagtctgtgatgtgcactgtgtgtgtgcgctgacgaacaaaatgtgttgtgcactggacctgttgtgctagccacgacaatgtgcatgctgactgcgtgccctgccctgcagaccgagtagggccgcccagggtattttgtcttcatgacgtagctagcctccatattgcgctgacacgtatatgctagtatcttgacattaagcggccttgtgctcctgtgtcccttacgcgtataaacggaagcatcccttgtgggtgctggtccccggttggttgcttgggcctggttgccccatggatggggcccctgcccgataggaggaagaatgtgcaaccgccagaagtgatggagacctggcccagggtgaaaaagggcccgttggtcccgggttattttgggggaaattttggccc

SEQ ID NO: 142839 - DNA, 687 bp, Homo sapiens
tcaatccctatcttttctcctgtggctttcttcgttctctcgttctctcttcctctctgctttgtcttgtttctttgttgctttgtgtcgtgttctgctttcttcttcttctcggctcttccctttgtctctcgttcttcgtttgttttttctctttcgttgtttcttccttctctgtcgtcgtgtcccttctgtctgtctgtccttttcgcgctgcttgtcttctcgctgctccttcgtgttgtttggctgtcccgtccgtctcttgggtggcgccgtacgggtggagtcgcggactgccggtggaccggtccctggggttgtattcttgtaggtgtgggaccaccggtttgagaacccaaggaacttggtttgaaattggcaaggctgatcaactacccaaccataagttgcaatcggcaactgaccgctttcgaacatattgggattcttttgcggatcggcaaccggcgaatgtggcttgttgcttaacatcacaatcgtcatatgattcaccggatcgataacggtcaccgttccgtccagccagtgtgaccttgccgtgttttgggaagggtccttcaaggggggtcgggagcctgatgcgtaattactgccatgcaaacacaggccagtgttaaccgtttgcctgggcactattgggctggccccgttgggctgcaccat

SEQ ID NO: 142840 - DNA, 415 bp, Homo sapiens
aaaaacctcgacgaaaaactattgccagcttccagcagcagctgtcggatatgggctacaagtccagttcatcacctctggcaggtactgaaaaaaatccttttcggctggaaccctacgaaatctccacgctgtttgagcaacgccaggccatgttcagtctatcaaagaaggcgtcgttgccgtggacgatcgcggcgaggtcacgctgatcaacgatgccgcacaagaattgctgaattaccacaatttcattcgctcacgttctttgccggtctttgtattggcatcagcctgtggctcaggcactcgccgccgaagggcaaactaacgcggatgaccgctggttgtcgaagcatcaacgccttcgctttatgcgccacaacaatcgccgatgccgaaattctcgcgtccg

SEQ ID NO: 142841 - DNA, 1086 bp, Homo sapiens
gtccgacccggacatctgctggatattgacgataccgacatgcccagtcttcgttactcggatcctgaagcccagcgtattggtcagccatttaaaggtgatgacatccttaaagcgctgaatggcgaagaaaatgtcgctatcaatcgcggttttctggcgcaggctttacgcgtatttacccccatctacgatgaaaatcataaacaaattggcgtggtggcgatcggccttgagttaagccgtgtgacccaacagatcaatgacagtcgctggagcattatctggtcggtattatttggcatgctggtcggactgattggcacctgcattctggttaaggtacttttgggaaaatctttggctgaacctacaaatctcagctgtttgagcaacgccaggccatgggtcgactctagaggatccccgtcctctagagtcagaactggccgaagcatccgaggactcagtctgcctccagcttgcactcgagcagagcgacgagaggtggaacgtgttgtggtggatgcactgagtggcctgaagggtgacctggctggacgttactataggctcagtgagatgacagaggctgaacagcagcagcttattgatgtgagggccttaagaggccgaacctgcaggcagcgacacctgacagcggcccaatcaaagcgcgacttctttgcggttccaccaatcagcgaagggcgcgcaccgaggatcctcatcatcctgataccaaagccgggcagaaacacaaccaaaaaagagaattttagaccaatattcttgatgaacattgatgcaaaaatcctcaataaaatactggcaaaccgaatccagcagcacatcaaaaagcttatccaccatgatcaagtgggcttcatccctgggatgcaaggctggttcaatatacgcaaatcaataaatgtaatccagcatataaacagaaccaaagacaaaaaccacatgattatctcaatagatgcagaaaaggcctttgataaaattcaacaacccttcatgctaaaaactctcaataaattaggtattgatgggacgtatctcaaaatcaaaatttga

SEQ ID NO: 142842 - DNA, 1796 bp, Homo sapiens
atgtggatcatcagctgcgtcatgaagcggacagcgatgaattgcgtgctgtggcggaagagacggcggaaggtttgcgcgagcatttttactggcaaaaatcgcgcaaaccaaaagcgggacaacgttgaattatttgatgcccgatgccgccctctaaatgatgcggctgataccgttcgctatctcccggtgttgaccgtacagctgctggacaaacagccgcgcttaacggtactgaaaaaaatccttttcggcctggaaccctacgaaatctccacgctgtttgagcaacgccaggccatgttgcagtctatcaaagaaggcgtcgttgccgtggacgatcgcggcgaggtcacgctgatcaacgatgccgcacaagaattgctgaattaccgtaagtcgcaggacgatgagaaactgtcgacgctaagccactcatggtcacaggtggtagatgtctcggaagtgttacgcgacggtaccccgcgccgcgacgaagagattacgattaaagcaccggctattactgatcaccaccgttccggtgcgcagtaatggcgttatcatcggtgccatttcaaccttcagggacaaaactgaagtacgtaaactgatgcagcgactcgacggtctggtcaactatgctgacgcacttcgtgaacgatcccacgaatttatgaataaattgcatgtgattctcggattattgcatctgaagagttataagcagttggaagattacattctcaaaacagccaataactatcaggaagagattggctctctgctgggtaagatcaaatctccggttattcgctggttttttaatcagcaagattaaccgcgcgaccgatttaggccatacgctgattttaaacagtgaaagccagctgccagacagcggcacggctgcttgtgggcagtcgctgaacgttctttaccagcgtatagtgggcgaacgaaaactacacactggatctctcatgtctgccgcaggaaagagcaacccactggcaatcagtggcctggttgtgctcacacttatctggagttatagctggattttcatgaagcaagtcaccagttacatcggtgccttcgactttaccgccttacgctgcattttcggcgctctcgttttattcatcgtccttttattacgtggtcgcggaatgcgcccgacaccgtttaaatacaccttagccattgccctgttacaaacctgcgggatggttggtctggcgcagtgggcgttggtcagcggaggtgcggggaaggtggcgatcctgagctataccatgccgttctgggtggtgattttcgccgcgttgtttctcggtgaacgcctgcgacgtgggcaatatttcgcgattctgattgccgctttcggaatctgtaccgcaacgcaaagaaatcgcctgctgccatgtaaaaaccagccctgcaaagcgaatcagtaccagggaactggcgatgtgctaaatcagttacatattgattttagagcctttagcggtgtcatggttgctggctctaggcaaatatttgctaatgaaatttcgtcaggagcaagtaatgtaggagtagttatattttctactcaggattcggcgaatacattcaatgttcttaatgcttcaggcggatctcgttccgtttatccagtaatgtcggatgacatgaatggttcatcctggaaatttagcacccgaatgcaaaaaatcgatcctgcattgagtgttacatctggtcaacttatgagccatgtgttagtggatatttactacgaataa

SEQ ID NO: 142843 - DNA, 2061 bp, Homo sapiens
acgagattctctggccgtcgctgtacatcgatgagactgggtataccctggcgatgaccatctttatcggcttagcagcacaaatcttcatacagcactggcagtttccgttgccagagtctcttcccctatatagccaatcattcttactccctttgaattacccgcctcatcagagataatgcttaagaaatttgtcacacaaggaagctgatgagacattcattgccctaccgcatgttacgcaaacgtccgatgaaattgagtaccacagtgatcttaatggtcagtgcggtactgttctcggtgctattggtggtgcatctgatttacttctcgcaaatcagtgatatgacgcgagatgggctagccaacaaggcactggcagtggcgcgtaccctcgccgacttgccggaaattcggcagggcttgcagaaaaaaccgcaggagagtggcatccaggccatcgcggaagccgtacgcaaacgcaacgatctgctgtttattgtcgttaccgatatgcaaagtcttcgctactcgcatcctgaagcccagcgtattggtcagccatttaaaggtgatgacatccttaaagcgctgaatggcgaagaaaatgtcgctatcaatcgcggttttctggcgcaggctttacgcgtatttacccccatctacgatgaaaatcataaacaaattggcgtgatcaatgacagtcgctggagcattatctggtcggtattatttggcatgctggtcggactgattggcacctgcattctggttaaggtactgaaaaaaatccttttcggcctggaaccctacgaaatctccacgctgtttgagcaacgccaggccatgttgcagtctatcaaagaaggcgtcgttgccgtggacgatcgcggcgaggtcacgctgatcaacgatgccgcacaagaattgctgaattaccgtaagtcgcaggacgatgagaaactgtcgacgctaagccactcatggtcacaggtggtagatgtctcggaagtgttacgcgacggtaccccgcgccgcgacgaagagattacgattaaagaccggctattactgatcaacaccgttccggtgcgcagtaatggcgttatcatcggtgccatttcaaccttcagggacaaaactgaagtacgtaaactgatgcagcgactcgacggtctggtcaactatgctgacgcacttcgtgaacgatcccgcttagagcacattctccacaatcaaagagtgccatttatcatgaaattgcaccatagaatgctccggcattttatcgccgcaagtgtcattgtgctgacatcttccttccttatttttgaacttgtcgccagcgacagagcaatgagtgcctatctgcgctatatcgtgcagaaagcagactcctcctttctttatgataagtatcagaatcagagtattgccgcgcatgtgatgcgcgctctcgctgctgagcagtcggaagtgtcgccagaacagcggcgcgccatctgcgaggcttttgagtctgccaataacacccatggcttaaacctgactgcccataaatacccgggcttacgcggcacactacaaaccgcatccactgactgcgacacaattgtggaagctgcagcactattacccgcttttgatcaggcagtggaaggcaaccgccaccaggatgattacggttcaggtcttgggatggccgaagagaaatttcactattatctcgatctctttagagcagtaggagacggccacaactctaaggaagatgccacttttggcctcggctggcgcgtgaatggtaatgccaccatgacgccaacgtttggcacgctggcaagcccgcaaacctacggtcacactggctggaccggaacggtgaccgttatcgatccggtgaatcatatgacgattgtgatgttaagcaacaagccacattcgccggttgccgatccgcaaaagaatcccaatatgttcgaaagcggtcagttgccgattgcaacttatggttgggtagttgatcaggtgtatgcggcgttaaagcagaagtaa

SEQ ID NO: 142844 - DNA, 338 bp, Homo sapiens
  misc_feature (1)...(338): n = a,t,c or g
attnnnnttnnggggtggcgatattcggaacgttaacgtcttttgccgccgcagccgctggagctgctgccggagctgcttctttcttctcttctgcctgagcaggtgcagcgtctgctgcaccgtcggcggaatcgaaaatcataatcagtgcgccggtctgggttttatcgccaacagagactttgatctctttaacgatacccgcctgcggagacggaactttcatagaggctttgtcgccttctacggtgatcaacgactgttcggctttaactttgtcgcccactttgaccacgatctcggggaattcaaccttatcatcccccatgggccgg

SEQ ID NO: 142845 - DNA, 1560 bp, Homo sapiens
  misc_feature (1)...(1560): n = a,t,c or g
atggctatcggggtcaaattaccagacatcgggggtgatgaagttgaattcaccgagatcctgttcaaagtgggcgacaaatttgaagccgaacagtcgctgatcaccgtagaaagcgacaaatcctctatggaatttccgtctccgcatgcgggtatcgttaaagagatcaaagtctctgttggcgataaaacccagaccggcgcactgattatgattttcgattccgccgactgtgcattatacgctgcacctgctcaggcagaatataataaagaagcatctcccgcaacagcaccatcggctgctgcggcaaaatacgttaacgttccggatatcggcggtgacgaagttgaagtgactgaagtgatggtgaaagtgggcgacaaagttgccgctgaacagtcactgatcaccgtagaaggcgacaaagcttctatggaagttccggcgccgtttgcaggcgtcgtgaaggaactgaaagtcaacgttggcgataaagtgaaaactggctcgctgattatgatcttcgaagttgaaggcgcagcgcctgcggcagctcctgcgaaacaggaagcggcagcgccggcaccggcagcaaaagctgaagccccggcagcagcaccagctgcgaaagcggaaggcaaatctgaatttgctgaaaacgacgcttatgttcacgngactccgctgatccgccgtctggcaccccagtttggtgttaaccttgcccaagtgaagggcactggccgtaaaggttggacagcacttcatgaagctagtgtaggaggattttatcggacagcaagtgaactattaaaaggtggagcagatgtaaatatcaaaggattataccagattactcccctacatgatgcagccaacctgacgccgttgttggcgattctcctgcacggactcggttttcctgtggggggtcacggggttagcgaagatccaacccgcgtgctgactgaaaccatttttgaattgatgggtattacgccaacgttgcacggcgggcatgcgcaggcgaagctcgacgaacatcaaccggtgtttatgccagtcggcgcgttttgcccgccgctggaaaaacaactggcgatgcgctggcggatgggcgtgcgtaacagtgcacataccctggcgaaactggcgacgccatttgccgaaggtgaggcgctgcgtctttccagcgtttcgcatccggaatacattggacgcgtcgcgaagttctttagcgatatcggcgggcgggcgctactaatgcatggtactgaaggtgaagtgtatgctaatccgcagcgctgcccgcagatcaatctcattgaccgtgaagggatgcgggtgctgtatgaaaaacaggacactgctggtagcgagttactgccacaagcaaaagatccggaaaccacggcgcagtggattgagcgttgccttgctggcagcgaaccgattcccgaatcgctgaaaatccagatggcttgctgcctggtggctacgggtgaagcggcaactatcagcgacggcctggcgcgcgttaatcaggcattttaa

SEQ ID NO: 142846 - DNA, 2853 bp, Homo sapiens; identical to SEQ ID NO: 140902

SEQ ID NO: 142847 - DNA, 1366 bp, Homo sapiens
ttatccagatttgttgcacatgtagcccgctatccagcgcaacgacgctggcgcgttgcccggtttaagcgatcccagaacaccatcaacacccagcattcgcgccggatgcagcgacgccatatggatggcttccgcaggcgttacgcccgtcaactcgaccatattgcgcactgccgcatcaacagacagcgtactgcccgccagcccaccagacgcggtacggacaacgccaccgtgcatctgcacttcttcaccacataacgtatagcgaccatccggcatcccagctgcctgcatcgcgtcggtgatcagtacgattctctctttcgcacagcaacaacacagcgacattgccgccggatgcacatgatgaccatcggctatcagttccagccaggcgcgcttgtccgttaatcccgcgccaaccatttcccgggtcgcggtgatgtaaacctgtcatcccgttatagcaatgcaccaggccgtcggcaccagcatcaaatgcggcgcgggtttgttgccaggtcgcagtaggtgtcgccgtacctttcgctgtcgcagtacagatggggattaccttcctgttctcggtgatgatgtaacaaacctccacatgaccccttgaatcccacactaccggttctgttattggctcccacagtctagaatttccatgatattctgcatagtgacccaccacggacggtttgaccatcggcgcgttgctatgataacgcaggctctggttgacgagatcgttattgaatgtggtagaaagccacaccggcgtgtcgttatcggccagcgtcagcagcacgctggtggtggcgatattcagcggttgccagccgcgtttgagctgatgcagggcgacaatcacgcccggctcgctcatggcctttaacaggcgacgaaaactgtgctgggcatccatcgtaaagaagtcgacccggctggcgttcacttcggcctggcgtgcggcaatgcgtgccatacggtcagcgtccagcggggcaataagggtttctgataagttttgaaagtggcgagattgctgcatcagcgcgtcaatcagcgcgcagcgttcggcgtgctgtttatcacgcccctgcacccagctgtagccgagcgtgccgtcagtcaggcgcacggcggcgcgggtcagcgtggcgtcgccggcaaaaaaacgttcgccggtgccgcccatccgcgcctgaatctgtaccaggccagtttcagcggcgcggatcacctcatagtcggcggtgatgtttagcgcgttcaggcgtgctgccagttcagccggttggctgtgcgccagcacggacatccagtgctggcgggtcgcggtatctgcgtgcat

SEQ ID NO: 142848 - DNA, 1440 bp, Homo sapiens
tcagggtgctggcttttcaagttctttaagaatggcttcaattttctctatacactcagttggaacacgagacctgtacaggttaagcaccattttatcgcccttatacaatactgtcgctccaggagcaaactgatgtcgtgagcttaaactagttcttgatgcagatgacgttttaagcacagaagttaaaagagtgataacttcttcagcttcaaatatcaccccagcttttttctgctcatgaaggttagatgcctgctgcttaagtaattcctctttatctgtaaaggctttttgaagtgcatcacctgaccgggcagatagttcaccggggtgagaaaaaagagcaacaaatgatttaggcaatttggcggtgttgatacagcgggtaataatcttacgtgaaatattttccgaatcagtcaaaatgctcgtccagtatactctcacaccagtcagggttccccagatgtattcattctgcagatctgttggtttgcacctgtgcagcatggcgatcagatgaagatcacccataaagaaatcaacggcagggacccaagcataggagtatacggtggcgcgtctggtgggctggcgggcagtacgctgtctgttgatgcggcagtgcgcaatatggtcgagttgacgggcgtaacgcctgcggaagccatccatatggcgtcgctgcatccggcgcgaatgctgggtgttgatggtgttctgggatcgcttaaaccgggcaaacgcgccagcgtcgttgcgctggatagcggggaagcgaccgccgacctcgaaacggaaaacgtaactatcgaaggctggatcggcccggtagaaatcgaccagatcaaaggtaagaccattaccgttgtgcaacttctgcgtgcgggtcttggtatgatggacggtgtgctggaaaacgttttccagaaactggtttctaacatcgatgagcgtatggcgctgatcgttgacccaatgctggcaaccggtggttccgttatcgcgaccatcgacctgctgaaaaaagcgggctgcagcagcatcaaagttctggtgctggtagctgcgccagaaggtatcgctgcgctggaaaaagcgcacccggacgtcgaactgtataccgcatcgattgatcagggactgaacgagcacggatacattattccgggcctcggcgatgccggtgacaaaattgtctttcattgccatgcggaactccggatgagcattcatcagtcgggcaagaatgtgaataaaggccggatagaacttgtgcttatttttcttagcggtctttaacaagaccgtaatatccagctgaacggtctggttataggtacattgagcaactgactgcaatgcctcaaaatgttctttacgatgccattgggatatatcaacggtggtatatccagtgatttttttctccat

SEQ ID NO: 142849 - DNA, 1866 bp, Homo sapiens
  misc_feature (1)...(1866): n = a,t,c or g
atgatcgggccgcgtattttgccaggtaagattgagttcgcggttaagcgcctcatcttcattaccttctgtcggcttatcgttaatcgccgtcagccgcgcccgcaccaccggataaaacgattccgggactatctgatgttccgcgaggaacgctttagcggtgcacctgttcgggatcctctagggtcactagaggaggcgccgcccccccttccaatgagggggctacaaatgggcgaaaaatttgtggacaacgaatcaatgggtgacgaaaccagggaacaacacggctggcgtttagaagaagcacagaaggggcgccaaaacgtccgggaaaatattccccccggtaaagattgcgccccgtatacgcgnctgaaaaccgttctggtggatggcgtagtcaaagcagaaaaactggttgaaggcgcaaaggcggttttacgccaggccattaacggcgacctcgactggaaagcaaaacgtcagccgaagctggaaccactaaaactgagcaagattgaagccaccatgagcttcaccatcgctaaagggatggtcgcacaaacagcggggaaacattatccggcccccatcaccgcagtaaaaaccattgaagctgcggcccgttttggtcgtgaagaagccttaaacctggaaaacaaaagttttgtcccgctggcgcataccaacgaagcccgcgcactggtcggcattttccttaacgatcaatatgtaaaaggcaaagcgaagaaactcaccaaagacgttgaaaccccgaaacaggccgcggtgctgggtgcaggcattatgggcggcggcatcgcttaccagtctgcgtggaaaggcgtgccggttgtcatgaaagatatcaacgacaagtcgttaaccctcggcatgaccgaagccgcgaaactgctgaacaagcagcttgagcgcggcaagatcgatggtctgaaactggctggcgtgatctccacaatccacccaacgctcgactacgccggatttgaccgcgtggatattgtggtagaagcggttgttgaaaacccgaaagtgaaaaaatacccgtcagcgggcgttttccatcagctttattgccgcgatgtggtgatcccaatgttcgccatttacacctttggcccgcaaatcgttggtttgttgggattgggggttggcaaaaacgcggcactagggaatgtggtgattagcctgttctttatgctcggctgtattccgccgatgctgtggttaaacactgccggacggcgtccattgttgattggcagctttgccatgatgacgctggcgctggcgcttttggggctaatcccggatatggggatctggctggtagtgatggcctttgcggtgtatgcctttttctctggcgggccgggtaacggctttaaccgcgtcaaagaagagttcgaccatgaacgtttcctggtagccctcaccaactacggtacggcgatgtgcgcctttgaagatgcggcgcgctacgccaatcagcgcgtgcagtttggcgaggctattggtcgtttccagttgattcaggaaaaattcgcccacatggcgatcaaattaaactccatgaaaaacatgctgtatgaagcagcgtggaaagcagacaacggcaccatcacctctggcgatgcagcgatgtgcaaatacttctgcgccaatgcggcatttgaagttgtggatagcgcaatgcaggtgctgggcggtgtcgggattgcgggcaaccaccgcatcagccgcttctggcgtgatctgcgtgtagaccgcgtctccgggggatctgacgaaatgcagatcctgacgctgggtcgtgcggtgctgaagcaataccgctaa

SEQ ID NO: 142850 - DNA, 3900 bp, Homo sapiens
atgcggaatttaaaatcgctcggtacaacccgggcccggagtttatcgccggccgggaagttttggaattttcaaccgtgggcacccgtaatccacttgtgtctcccgccgtacagaatccacttgcgaaacatccgctgcacagccaggagctgctcgatccgttacgggcgatgttggcgaaaacccttggctgcgctaacgcccggtaaactgaaatacagcttcttctgtaatagcggcaccgagtccgttgaagcagcgctgaagctggcgaaagcttaccagtcaccgcgcggcaagtttacttttattgccaccagcggcgcgttccacggtaaatcacttggcgcgctgtcggccacggcgaaatcgaccttccgcaaaccgtttatgccgttactgccgggcttccgtcatgtgccgtttggcaatatcgaagccatgcgcacggctcttaacgagtgcaaaaaaaccggtgatgatgtggctgcggtgatcctcgaaccgattcagggtgaaggtggcgtaattctgccgccgccgggctatctcaccgccgtacgtaagctatgcgatgagttcggcgcactgatgatcctcgatgaagtacaaacgggcatggggcgcacgggcaagatgttcgcctgcgagcatgagaacgtacagccggatatcctctgccttgccaaagcgctcggcggcggcgtgatgccgattggcgcgaccatcgccactgaagaggtgttttcagttctgttcgacaacccattcctgcataccaccacctttggcggcaacccgctggcctgtgcggcggcgctggcgaccatcaatgtgttgctggagcagaacttaccggctcaggctgagcaaaaaggcgatatacctcaccagcttgaagccatcgtcgaaaagcaccaaccggatgtgattggcctgcaggagacaaaagttcatgacgatatgtttccgctcgaagaggtggcgaagctcggctacaacgtgttttatcacgggcagaaaggccattatggcgtggcgctgctgaccaaagagacgccgattgccgtgcgtcgcggctttcccggtgacgacgaagaggcgcagcggcggattattatggcggaaatcccctcactgctgggtaatgtcaccgtgatcaacggttacttcccgcagggtgaaagccgcgaccattattgtgattttcttcccgctctttgtcgcccatggtcgctgatgatgtgttattcggtgttcctgtttttcttgttctttgctgtcccgcgcatcacttcgacaatgcctgacggcggcgaaatatcacccgcgctactggataaatgcagggtagaagggaaggcaaagctgaagactactgcggccagagcagcagagaagggcgtaattcataaacccgtactggggaaaaaacggcacgaacacagtgattcccgtaccgtcgataactggtgtgatgaccacgatcaaatcctcaaggcgctgattcgcaaagatcctcatgctgctaagctggcaatgtggcagcatctggaaaacaccaagatcatgttatttaacgaaaccagcgacgacttcgagttcaatgccgaccgctatctattcgccgaaaacccggtggtgcatctcgatacagccaccagcggcaaggtcgaccaaaacagggcagggcagcgtgcacgtgccactattttttgtaacacgcactttaaaaagcagttaagccgtgacgatatcgtctggacctactccggtgtgcgtccgctgtgtgatgatgagtccgactcgccgcaggctattacccgtgattacacccttgatattcatgatgaaaatggcaaagcaccgctgctgtcggtattcggcggtaagctgaccacctaccgaaaactggcggaacatgcgctggaaaaactaacgccgtattatcagggtattggcccggcatggacgaaagagagtgtgctaccgggtggcgccattgaaggcgaccgcgacgattatgccgctcgcctgcgccgccgctatccgttcctgactgaatcgctggcgcgtcattacgctcgcacttacggcagcaacagcgagctgctgctcggcaatgcgggaacgatgattgatgtcttagggccggagaaacgcagacggcgtaccacacaggaaaagatcgcaattgttcagcagagctttgaaccggggatgacggtctccctcgttgcccggcaacatggtgtagcagccagccagttatttctctggcgtaagcaataccaggaaggaagtcttactgctgtcgccgccggagaacaggttgttcctgcctctgaacttgctgccgccatgaagcagattaaagaactccagcgcctgctcggcaagaaaacgatggaaaatgaactcctcaaagaagccgttgaatatggacgggcaaaaaagtggatagcgcacgcgcccttattgcccggggatggggattgcacgtcattctcagacgaaccgatgactggatggatggccgccgcagtcgtcacactgatgatacggatgtgcttctccgtatacaccatgttatcggagagctgccaacatgccaactacagtcaacaactcgccatcgagacagcagcaaaccatcagcgacgcgctggaaacatcagcctgaacgtgaaggaggtcaccacgggcaaccagacgctaaccatcactcaggacacctccaaagcgcaaacggcgattaaagactgggtgaatgcgctacaactcgctaatagataccttcagcagcctgaccaaatacaccgccatgcgggagctgatagccagagttctagcaatggtgcactgctcggcgactccacgctgcggacgattcagacgcagttgaaatcgatgctgagtaataccgtcagttcttccagctataaaacgttggcgcagattggtatcacgaccgatcccagcgatggcaaactggaactggatgccgacaaactcaccgctgcactgaaaaaagatgccagcggcgtaggtgcattgattgttggcgatggtaaaaaaaccggcatcacgaccaccatcggcagcaacctgaccagttggctttcgacaacgggcattattaaagccgctaccgatggcgttagtaagaccctgaataaattaactaaagactacaacgccgccagcgatcgcattgatgcgcaggtcgctcgctacaaagaacaatttacccaactggacgttttaatgacctcgttaaacagcaccagcagctacttaacgcagcagttcgaaaacaacagtaattccaaaccctggctccactggatttccgcacggatcattattagccccgcgttctggatgttctggcgtacctggcgcgtcgtacgcaactggctggagaatatgcacgggcatgattatgagcatcatcatcacgatcacgaacatcaccacgaccatggacatcatcaccatcacgaacatggcgagtatcaggatgcccatgcacgagcccatgccaatgacattaaacgacgctttgatggtagagaggtcaccaactggcaaattttgttatttggcttaaccggtggccttatcccctgcccggcagcaattaccgtgctgttgatatgcattcagttgaaagccctgacactgggcgcaacactggtcgtcagtttcagcattggcctggcgttaacgcttgtcaccgtaggcgttggcgcagcaatcagcgttcagcaggtcgcaaaacgctggagcggatttaacactctcgctaaacgcgccccctatttttccagtctgttgattggcttagtcggtgtgtatatgggcgtacatggcttcatgggcataatgcgataa

SEQ ID NO: 142851 - DNA, 1521 bp, Homo sapiens
atgggaaatcggacaaaagaggatgaactgtaccgagaaatgtgcagagttgtcggtaaagttgtgctggaaatgcgcgatctggggcaggaaccaaagcatattgttatcgcaggcgtattacgtacagcattagccaataaacgcattcagcgcagtgagctggaaaagcaggcgatggaaaccgtcattaacgcactgggcaatcccggttatctgcatgttgtgattgaacaccaaagcaagccggataagaaaatggcctttcgcatgatgcgttattctatagccgccatgcaccggcatctggaggctgaccacgataagctgccgctggtggtgccgatactgttttatcagggcgaggccacaccttatccgctatcaatgtgctggtttgatatgttttactcgccggagctggcgcgacgcgtctataacagtcctttcccgctggtggatatcaccatcacaccggatgacgaaatcatgcaacatcggcggattgcgattctcgaactactgcaaaaacatattcgccagcgcgacttaatgttattgcttgagcaactggtcacgctgatcgacgaagggtacactagcggaagtcagttagttgccatgcaaaactatatgctgcaacgcggtcatactgaacaagcggatttgttttacggtgtgttgagagacagggaaacgggaggggagtctatgatgacgctggcgcagtggtttgaagagaaagggattgagaaggggattcagcaggggaacgaacagcggaaaaggttaaaggtccaggggaaactttcccgccccaaggcgttccttcctgagtcaaggaatgtctcgggaagacgttgcagagatggcaaatttcctcttgctgagatgatacgtattaacttattaagtactgtgtcgacgatacgggcgcaaataaaattaaccaagcgagccacatgcgagggaactgctaatgacggtgcggggtttgcaaatggttccacagccgcagataaagcaagtgctgtcgccgttgaagtctggagcactgtaactccggcaacagggagtgcaacacaatttagctgtgtaacaccagcatcacaagaggtaacaatctccactgcagccaatgcggtcgtttattatccgatgagtgcacgcctggtcgtggaaaaaaataaaaccgtaaacaatgtcactgcggccattgctggacaggatattgaccttgttgccaatgtaaaaaacagcacctgcaaaagcggaatcagtaaccagcgtaatattgatcttggcgtcgttggggtgggatatttttcaggtaatgttactcctgaaagttatcaaccaggtggaaaagagttcactatcactgtatccgactgtgcattacagggaactggcgatgtgctaaatcagttacatattgattttagagcccttagcggtgtcatggctgctggctctaaggcaatatttggtactgaaattcggcacgagccagtaatgtag

SEQ ID NO: 142852 - DNA, 3129 bp, Homo sapiens
ttaacgcccggttcttccagcaattaggcacacgctacttaactgccagatcttgcccgccataccaagcaactggttacgggccttgtttagggcatcgggacccagcccagccggatcatttacctcaaagtcgaaacccgttgccgtgcccagttcaacaatggctggcatattgaatggaatgacgaaaccgtcgcggatcttgcccaattccattttggcacgatggattaccgcttccgcactgttttcgtcaccattacgctcttcccacggtttcagactgacgaaggccataccggcgttttgtgcctggccgctgaagctaaagccgttaaccgtaaagacactttcaacgttcgctttctcgttcttcagatagtaatccgtaacttgatccaacactttttgcgtccgctcttgcgtcgcgccagcgggtaactgaatcatggtcagaaagacaccctgatcctcttcaggtaagaaggaagacggaagacgtaaaaacaacaccaccattcctgcaacaatcagcgcatagatcagtaaatatcgtcctgtggatccgaggattttcgccgacgctgttggtgtagtggttaacgcgaagaaaccgcccttattttcgtgatgctcagcagagacgggtttaagcagcgttgcacataacgcaggggtaagaatcaatgccaccagaacagaaagcgccattgccgaaacgatggtgatagagaactggcgataaattgcccccagtagaaccgccgaagaatgccatcggaataaataccgctgacagccacactgtccgagaatgctaaaccggtcaatatcggataacatgccacagagggggcccgggtacatcacgcagggcgcgaggatgccggtaatcgcggtctggcgtaacaggttggagacgttacgggcgcttaagtaggcaccatcggtggtccaggtaaagaacagcatgattgcgatgatagctgcaatcatcacgaagacctgctcctgagtcaggttatgatttatcaggttggcttttagtttcccttcatgcatcaccagtacacgatcgctaaggccgagcacttcaggtaattcggaagagatgacaataacggcaataccctgctggacgagttggttaattaatttgtagatctcgtatttcgcgccaatatcgataccccccggccgggagaagttgatggcaaaagtaccaatttgaccacccaggtagtcaacgttgaacaccagttcctgcggcagcgcttcttcgtcacgccagataacccagccgcagcccagcggagccagaccgaatttatggcctgaagcactgatcgatttcacacgcggcaggcggaagtcccagacgatatccggggcgacgaacggtgccaggaagccaccgctggcagcgtcgatgtgcatgtcgatgtcgataccggtatcggcctggaatttatccagcgcatcgtgcagcggttgtgggaactcatagttaccagtgtaggtcacgccgaaagtcggcaccacgccgatggtgttttcgtcacaggcttcaatcatgcgtttcgggtccataaacaactgaccggggcgcatagggatctcacgcagctccacatcccagtagcgggcgaatttatgccagcagatttgtaccggaccgcacaccaggtttggtttatccgttggtttgcctgcagcttccatacgcttgcgccaacgccatttcatcgccatcccgccgagcatacaggcctcggaagaaccaatggtgttggtgccaacggcctgaccatttttcggcgcaggcgcatgccacagatcggcaaccatatttacgcaacgcaggtcgatggctgcggattgcggatattcttctttgtcgatccagtttttacataagtggaaaggccaataactcagcggctgcgacagcacatcaaagcccggatgcgcaccaatttcaaaatggctttccccgccgccggtcgtcaccgcccacagcaaatgtttgccatgcagcgccgtgccgccatgaccgtaagcccagccgtgggagaaaactttatcgatccaaagtttgaggagcggaggaatgctgtaccactgcatcggatgctgccagacgatcagatcggcgcgagacagcgcctcctgctcggcggcaatatcgatattgaagtcaggatagagttgataaagagagcgaatttcgacgccttccagcgtccccattctctgcccgcggatcgtcatattgctggtctgcgccagtgacatccctcgagtctccggggcaaacgctacggaaatcaacaagccaaacagcgagatacccgcccccattagcatcgtgttactgataccgtaattattgataaagatcggtagtgcccaggtcgaaacaatggtgccaatacgacttaaggacataatcacgcccacggcagaggcgcggatatctgtcgggaagagttcattaggatagagccactgcaaattacccggcccgccagagaaaaaggcatacaccgcaaaggccatcactaccagccagatccccatatccgggattagccccaaaaccgccagcgccagcgtcatcatggcaaagctgccaatcaacaatggacgccgtccggcagtgtttaaccacagcatcggcggaatacagccgagcataaagaacaggctaatcaccacattccctagtgccgcgtttttgccaacccccaatcccaacaaaccaacgatttgcgggccaaaggtgtaaatggcgaacattgggatcacctggcaggtccagatggcggcaacaaacagaacaaaaggaaaatggcggcgattaaacagatcgcgaaaacgggtttgctgcggctgctcttcatcgaaagccaccggttcgccaaacagtttgatcatcatctcttcgcactcttttactcgccctttgcgtaataaccagcggggagattcaggcagttcgaatcgaccaatcaaaatcaacaaacaggggatcgccgcgctacccagcatccagcgccagccgccttccacatcataaagccagtagccgaccagatcggcacaggtcgcgccgacataccacat

SEQ ID NO: 142853 - DNA, 1348 bp, Homo sapiens
atgcatctgccttcgccttatggcattcgcctgatcaaaggcagccatattgtggtgccgcgcgtgcatacccagaagcaagcctacattctgcaaaacgaagataaacgtattgtgttcgtgatcccgtggatggacgagttttccatcatcggcactaccgatgtcgagtacaaaggcgatccgaaagcggtgaagattgaagagagtgaaatcaattacctgctgaatgtgtataacacgcactttaaaaagcagttaagccgtgacgatatcgtctggacctactccggtgtgcgtccgctgtgtgatgatgagtccgactcgccgcaggctattacccgtgattacacccttgatattcatgatgaaaatggcaaagcaccgctgctgtcggtattcggcggtaagctgaccacctaccgaaaactggcggaacatgcgctggaaaaactaacgccgtattatcagggtattggcccggcatggacgaaagagagtgtgctaccgggtggcgccattgaaggcgaccgcgacgattatgccgctcgcctgcgccgacgctatccgttcctgactgaatcgctggcgcgtcattacgctcgcacttaccgcaggaacagagaagctgctgctcggcaatgcgggaacgctcggtaccgtgcgcgaaagcgaaaggctgggaagtgaaagtagaaacccagggtcaattggtctggaaaatgaactgactgcggaagatgtggcgagcgctgatatggtgattctgaccaaagatatcggcatcaagtttgaagagcgttttgctggcaagaccatcgtgcgcgtcaacatcagcgatgcagagttcctcatgacgaatcgtatctctcgcctcaaaactgcactgtttgccaatacccgtgaaatctcgctggagcgggcgctgctttataccgccagccatcggcaaaccgaaggcgaaccggtgatattgcgccgggcgaaagcaacagcgtatatccttgaacatgttgaaatttcgattcgtgatgaagaactgattgccggtaaccgcaccgtaaaaccgcgcgccgggattatgtcgccggaaatggacccttactggctgctgaaagagctggatcaattcccgacgcgtccgcaggaccgctttgctatcagcgaagaagataaacgtatctaccgtgaagagttgttcccgtactgggaaaaacgttcgatgaaagatttcatcaacgggcagatgacagatgaagtaaaagccgcgaccaacacgcagattttcagcatcaaccagacggataaaggccagggcacattattattgattacccacgcctgttga

SEQ ID NO: 142854 - DNA, 1446 bp, Homo sapiens
atggctaacctgcacgccactcatatgaagctgggcgacgaatccttttcctttgccgatgtggtcgacgccagtattttcgttaacccgatgcagttcgaccgcccggaagatatggctcgttatccacggaccttgcaggaggactgcgagaagctaaacaaacgtaaaggggatttagttttcgccccttcggaaaaagagatctacccgaacggtactgaaacccacacttacgttgacgttcctggcctttcgaccatgctggaaggtgccagccgcccgttacattttcgcggcgtttcgactattgtcagcaagctgttcaacctggtccagccggacatcgcctgcttcggtgaaaaagattttcagcaactggcgctgatccgcaaaatggttgccgatatgggcttcgatattgagattgtcggtgtgccaattatgcgcgccaaagacggtctggcgctaagttcccgcaacggttatctgacggcggaacaacgcaaaattgcgcctgccgccatgcaccggcatctggaggctgaccacgataagctgccgctggtggtgccgatactgttttatcagggcgaggccacaccttatccgctatcaatgtgctggtttgatatgttttactcgccggagctggcgcgacgcgtctataacagtcctttcccgctggtggatatcaccatcacaccggatgacgaaatcatgcaacatcggcggattgcgattctcgaactactgcaaaaacatattcgccagcgcgacttaatgttattgcttgagcaactggtcacgctgatcgacgaagggtacactagcggaagtcagttagttgccatgcaaaactatatgctgcaacgcggtcatactgaacaagcggatttgttttccggtgtgttgagagacagggaaacgggaggggagtctatgatgacgctggcgcagtggtttgaagagaaagggattgagaaggggattcagcagggaagacaggaagggaccacccggttaccatttactcctaacctcccccccccccccacacccaccaccccccactctcaccccgccccaccacccttcccaatcaaccaccactatccactcacgcccccaacacccaacccgacgccactcctcacgcgggctgttgcattcctgtgggtatacgatgcagcgattcgcctgccgaatacggtagccgtttgccaccaatgtccaggtgagatcaatgtcttcgactttagtacgatccgagaaaccgaacttacgcaatacatcagtacggaacatcccgcaggcaccgctgataataaacggagctgctgtagcgtgcgcttcataacaatcatcggcaactttacggtcgcgcggatgtgcggtaacagacccgcgcctttcaacgcagtagaagggaaattgccggcttaa

SEQ ID NO: 142855 - DNA, 1650 bp, Homo sapiens
acctgaaatacgattgaacgttcggcaaataatttgctggcaattattaatgatgttctcggcttctcgaaacctgaaaccaggtaagctgattctggaaagtattccattcccactacgcagcacgctggatgaagtcgttactctgctggcacattcttctcacgataaagggttagaactgacgctcaatattaaaagcgacgtgcctgataacgtgatcggcgacccgctgcgattacagcaaatcatcactaacctggtggggaatgcaattaaattcaccgagaatggcaacattgatattctggtagaaaaacgtgcgctgagtaataccaaagtgcagattgaagtgcagattcgggatgccggcattggtattcctgaacgcgatcaatcgcgcttattccaggccttccgacaggctgatgccagtatttcccgccgtcatggtggcaccgggctggggctggtgattacacaaaaactggttaatgaaatgggcggcgatattccgttccatagccaggcgaatctcggtacaacaatatggttccacattaatctcgatctgaacccgaacattattatcgaagggccatccacccagtgcctcgcaggtaagcgcctggcctatgtcgaaccaaactccgcagcagcgcaatgcacgctggatattttaagtgaaacgccgctggaagtggtttatagcccaacgttctccgcgctgcctcccgcgcattacgacatgatgttgttaggcatcgcggtgaccttccgcgagccgctaacaatgcaacatgagcgattagcgaaagcggtatcgatgaccgatttcctgatgctggcacttccttgccatgcacaagtcaatgctgaaaaactcaagcaagatggtatcggcgcgtgtctgctgaaaccattaacacctacacgcctgttgcctgccctgacggaattttgtcatcacaaacaaaacacgcttttgcctgtaaccgatgaaagtaagctggcaatgacagtcatggcggttgatgacaaccccgctaacctgaaacttatcggcgcattgctggaagatatggtgcaacatgtggaactttgcgatagcgggcatcaggcggttgaacgggcgaaacagatgccgccggcccggggtatccacccgcgcgctagtggcaccacctggggccccgggtctcacaacccgggcatcctcaaacgtcaccgggcgcttgctggtcggaaaatccgacaacacgttcaaacccgtgggccgtcaggtcgacaaggggaagaacctattgccatgtcagcaatgaacgcagctaaccacttgaaaggcgttacggcgatcatcaccatgaccgaatcgggtcgtaccgcgctgatgacctcccgtatcagctctggtctgccaattttcgccatgtcgcgccatgaacgtacgctgaacctgactgctctctatcgtggcgttacgccggtgcactttgatagcgctaatgacggcgtagcagctgccagcgaagcggttaatctgctgcgcgataaaggttacttgatgtctggtgacctggtgattgtcacccagggcgacgtgatgagtaccgtgggttctactaataccacgcgtattttaacggtaga

SEQ ID NO: 142856 - DNA, 2745 bp, Homo sapiens
atggcaaagcaccgctgctgtcggtattcggcgctgaccacctaccgaaaactggcggaacatgcgctggaaaaactaacgccgtattatcagggtattggcccggcatggacgaaagagagtgtgctaccgggtggcgccattgaaggcgaccgcgacgattatgccgctcgcctgcgccgccgctatccgttcctgactgaatcgctggcgcgtcattacgctcgcacttacggcagcaacagcgagctgctgctcggcaatgcgggaacggtaagcgatctcggggaagatttcggtcatgagttctacgaagcggagctgaaatacctggtggatcacgaatgggtccgccgcgccgacgacgccctgtggcgtcgcacaaaacaaggcatgtggctaaatgcggatcaacaatctcgtcccgctatccagcgcaacgacgctggcgcgtttgcccggtttaagcgatcccagaacaccatcaacacccagcattcgcgccggatgcagcgacgccatatggatggcttccgcaggcgttacgcccgtcaactcgaccatattgcgcactgccgcatcaacagacagcgtactgcccgccagcccaccagacgcgaaaaacgtgcgctgagtaataccaaagtgcagattgaagtgcagattcgggataccggcattggtattcctgaacgcgatcaatcgcgcttattccaggccttccgacaggctgatgccagtatttcccgccgtcatggtggcaccgggctggggctggtgattacacaaaaactggttaatgaaatgggcggcgatatttcgttccatagccagccgaatcgcggttcaactttctggttccacattaatctcgatctgaacccgaacattattatcgaagggccatccacccagtgcctcgcagggaaaccaatttcttcccctatggtcgccgcacgcatggggcgcgatcgttctaagcctctgcgtaaaaactgggagtcggtcaaagaacaggtgatgcgaaaagcacttcgcgctaaattcgaacagcatgcagaactgcgtgcgctcttgctggcaaccgcgcccgcaaaactggttgagcatacggaaaacgatgcttactggggagacggtggtcatgagagcctgaaaggacacagcacggacgtgctctattccgtgcaaatgcagggcaatcccggttatctgcatgttgtgattgaacaccaaagcaagccggataagaaaatggcctttcgcatgatgcgttattctatagccgccatgcaccggcatctggaggctgaccacgataagctgccgctggtggtgccgatactgttttatcagggcgaggccacaccttatccgctatcaatgtgctggtttgatatgttttactcgccggagctggcgcgacgcgtctattacagtcctttcccgctggtggatatcaccatcacaccggatgacgaaatcatgcaacatcggcggattgcgattctcgaactactgcaaaaacatattcgccagcgcgacttaatgttattgcttgagcaactggtcacgctgatcgacgaagggtacactagcggaagtcagttagttgccatgcaaaactatatgctgcaacgcggtcatactgaacaagcggatttgttttacggtgtgttgagagacagggaaacgggaggggagtctatgatgacgctggcgcagtggtttgaagagaaagggattgagaaggggattcagcagggaagacaggaagtaagtcaggaattcgcccagcgtcttctgagtaaaggaatgtctcgggaagacgttgcagagatggcaaatttacctcttgctgagattgataaggttaaaaacaatgagcacaaaaccactcttccgttacggaaagcgaaaaaatcatccggtgaacctgacgtcgtcctgtgggcaagcaacgattttgaatcgacctgtgccactctggactacctgatcgttaagtcagcaccagacaacgctcactatcaaggcaatgaagagatgatgatcaaactgtttggcgaaccggtggctttcgatgaagagcagccgcagcaaacccgttttcgcgatctgtttaatcgccgccattttccttttgttctgtttgttgccgccatctggacctgccaggtgatcccaatgttcgccatttacacctttggcccgcaaatcgttggtttgttgggattgggggttggcaaaaacgcggcactagggaatgtggtgattagcctgttctttatgctcggctgtattccgccgatgctgtggttaaacactgccggacggcgtccattgttgattggcagctttgccatgatgacgctggcgctggcggttttggggctaatcccggatatggggatctggctggtagtgatggcctttgcggtgtatgcctttttctctggcgggccgggtaatttgcagtggctctatcctaatgaactcttcccgacagatatccgcgcctctgccgtgggcgtgattatgtccttaagtcgtattggcaccattgtttcgacctgggcactaccgatctttatcaataattacggtatcagtaacacgatgctaatgggggcgggtatctcgctgtttggcttgttgatttccgtagcgtttgccccggagactcgagggatgtcactggcgcagaccagcaatatgacgatccgcgggcagagaatggggtaa

SEQ ID NO: 142857 - DNA, 1146 bp, Homo sapiens
atgccgctctgtttgagtggcggcatttgtgaaggcggaaaactcgatggcggagtttgtcacttcggcattgatagacttcgacgcaagagtgttcgactcgcggttgaactcctgcatcataaaatccagacgacgaccaaccgcttcttttttcttcagaatgttgtaggtctctttgacatgcgcttcgaggcgatccagttcttcggcaacgtcaattcgttgtgccagcagaaccagttcctgctccagacggttgttttccagttgcacctgagcatcttccacgttcgcgaccagacgctcacgctgccattgcaggatttccggcatatgggagcggactttgaccacttcggcggtgacgccttccagacgctgctcgatcaatgctttcagtgcctagacttcggtttcgcgcgcgacaataaagtcgtccagcgtaccatccagcgccgcgagaatttcagcggcaatggcgtcaagatcctgctcctgggctcgccatcacgcccggccagcaactgttcatcaccattaagctttggaacgacgaccaccaagcgcccccgcgaagccttgctcgacagcctgaaaaaactccagcttgattatatcgacctctacttaatgcactggcccgttcccgctatcgaccattatgtcgaagcatggaaaggcatgatcgaattgcaaaaagagggattaatcaaaagcatcggcgtgtgcaacttccagatccatcacctgcaacgcctgattgatgaaactggcgtgacgcctgtgataaaccagatcgaacttcatccgctgatgcaacaacgccagctacacgcctggaacgcgacacacaaaatccagaccgaatcctggagcccattagcgcaaggagggaaaggcgttttcgatcagaaagtcattcgcgatctggcagataaatacggcaaaaccccggcgcagattgttatccgctggcatctggatagcggcctggtggtgatcccgaaatcggtcacaccttcacgtattgccgaaaactttgatgtctgggatttccgtctcgacaaagacgaactcggcgaaattgcaaaactcgatcagggcaagcgtctcggtcccgatcctgaccagttcggcggctaa

SEQ ID NO: 142858 - DNA, 1732 bp, Homo sapiens
atgaacaaagcgcactttgttagcaatctcggggcaactaaatgttgccccctttcgtttttaccctaccgctggcgtcgggtcatcgcctttgtagtcgcgttttacttccgtcacctcatcgaccttctcgttgtgcagatgcacttcaagctggttaaaggcaatgttgatgtcgttttcacggcacagctgatcgatagtacggttcagctcatcgacagtacgactacggtcacgcagttcacgcacatacagacgcagctcatgatccaacgtgctggcaccaaatgccgtaaagaagacttccggcattgtgtaggtatcctagaacctgaatggtacccgattatcgttgttagagtcgtcgtagacgtaagccagtttgaagtacggagtcagagcctgatcttcgctgtaggtgaaggtataacctgcatctacacccagttcataacgcatgctgtcgtaagactgaccgtcaactttcatgtcgttgctcagctgtcatcaccagactggaacagaccagaaacgctgcccgtaaggagtcacgtaaccagcatcacccagtttgaagtcgtaaccggctttcaaaccgaagccccaagcgtcggagttggtgctaccgtcaacgtaagtaccgttgctcatggttgcagacaggtcgttgttgaagtgagagtagctcaagctaccatcaacaaagacgttgttcgcgaagtgagcagaagagtagatgtaggcagtctggctgtcttgatccacctgaccagaacggtcattcatgtcacctttagcgaagcctgcagccgcaccgacgatccacttagcgttgttaccgtcaattttggtatcaacaccgaccatgatgccgttaacatcctgatcatagttgatggtgccgttgtcgccgttgaagttaccaccgaagtagcttacccatgcgccgccgttatcagccaggccatgacgagagttggtcagacgagtaccaacggtgtctggacgatatcgtcagtgaatgcatttcagataagaacaggggcagcgagatcactggcccccccctggtcattaaccgagaaggtcttttgcggaacgacgatggaacgcatgcgggctgctttagaggcgatcatgccatttaccgaatcttccagcgctacgcaggcaccttacttaccctgtggccgggaatgcggcttggctgtaaggcagtttttcggccgaggcgagggcatcgaaactgtcgcgtacctatttcgaataattcgggtcgtcagaacaagagttctctccatcggcggtttctccaggactcgaatttcatcaacgccagtgaaaatagcgactcttcgccaaaacagatcggattgtcacgctgccatgattgctgacacatatcgtcaagtgaccccaacagacccattttcccggcacccattttcacgtgtcttgcgtggtcttttctttatcatctttaaagatacgaaagcgcacaacggcatcggcatgatcggcggcgtcaaccgccgcgccgattatttgaatctgctggaaaaagtatttggcgatcgtgtttccagcccgcaatggcaggctacgttgaaagcgatcgttccgtcttatggacgcaagctgaacggtgatgtagcggcaacagaacgcgagttgcagtacaccagcgaagtggtggggttgaactacgacaagccgcaggcagcagata

SEQ ID NO: 142859 - DNA, 624 bp, Homo sapiens
atgattgctgacaatatcgtcaatgacccaacgaccattttccgccaccattttcagtgtctgcgtggtcttttctttatcatctttaaagatacgaaagcgcacaacggcatcggcatgatcggcaaaggatttcttatgagcgaacaaatcacgtttgccaccagcgattttgccagtaacccggaaccacgttgcccgtgcattttgctgctggatgtttctggttctatgaacggtagacctattaatgaacttaacgccggattggttacctttcgtgatgaactgcttgctgatccgctggctttaaaaagagtggaactcggcattgtgacgttcggcccggtgcatgtggaacaaccctttaccagcgccgctaatttttttccgcccatcctgtttgcccagggcgatacaccaatgggtgcggccattaccaaagctctggatatggtagaggagcggaaaccgcgagctttgcgggcagtatttgcaatcttccggacaagctccggtcttaatcgacagcaacgtgctgacctgcacctgacgaggatcgaaatgctggcgatgcacctgctgcgcttcaaacagcagatccagcaacggtttttcaaataa

SEQ ID NO: 142860 - DNA, 455 bp, Homo sapiens
tgaccagttcggcggctaacatgcaaattctcccggtggcggtaatgttccgctaccggacttttcagaaatcatttattcccctcgcgtcccgcccgttgttactcttccttgttcaggaatgccaaatataaggacatcatcatgcagagccggaagctcttaaaagaacaactcatctatatccgggataaacgcaacggagaggtgaaaaacagatgaaaataatacttctgtttttagcagccctggcaagttttaccgtacacgcacagcccccctcacagaccgtagaacaaacagtccggcatatttatcagaactataaatcagatgccactgccccttattttggtgaaaccggagagcgggcgataacttctgcgcgtattcaacaggcgcttaccctgaacgacaatcttacgctgcaaggaaatattggctggctggattat

SEQ ID NO: 142861 - DNA, 1200 bp, Homo sapiens
atgcgtggagacaattgtagtggtgcttgtggtggtggtggtggcgacggcggtggtggtggtgacggtggtggtggtgatggtggtgtgggtgatggtggtgatggtggcaatggtggtggtggtagcaatggtggcagcagtggtggtgatggtggcgatggtggcaatggtggtggtggtggcagtgattgtgttggtggcaatggcagtggtggtagcggtggtgaggatggtggcgatggtggtggtggtggtggcggtggcagcggcggtgatggtggtggtggtgatggttgtagtggtggtggtgatggtggcgatggtggtggtggcggtggcggcagcggtgaaggtggtggcagcggtagtggtggtggcagtggcggtgatagtggcaatggtggttgtggtggtggtgatggtggtggtgtggtggcggcagcggtggtggtggtgatggttgtggcagtggtgatggtggcggtggtggtggtgatggtgatggtgttggcggtggtggcggtggcagtgatggtggtggtggtgatggttgtggcagtggtgatgatggtggtgatggtggtggtggtgatggttgtggcagtggtgatgatggtggtgatggtggtggtggtgatggtggtgggggcagtggtggttgtggtgacagtggcagtggcagtggcggtggcagttgtggtggcggtggtggtgatggtggtggtagtggtgatggtggtggtggtggtgatggtggtgatggtggtggcggtggtggcagtggtgatgatggtggtggtggttatggtggtgatggtgatggtggtggtgatgcacgcactcacaccccacaccaccaccagcaaagcccactctacagccatgggaagaccttcaggcttggacacctatagaagttcatgtaaggctaggaagtttacacaccctggtttctctgtggggcagaccgtggtagacataacagtggaatcagaaagagcaataaagaagctatatctcaagtctaggaaaagagccttacgaatgaagaagcaacttctcgatgagttatataaacttacatacaatcttgaggttatagaaagattgaagccttggatcctgaaaaattatcttccacaaaaccggtccctggtgccaaaaaggttgcggactgctgctgtgaaggacctctag

SEQ ID NO: 142862 - DNA, 4107 bp, Homo sapiens; identical to SEQ ID NO: 140363

SEQ ID NO: 142863 - DNA, 1371 bp, Homo sapiens
atggtggcaatggtggtggtggtagcaatggtggcagcagtggtggtgatggtggcgatggtggcaatggtggtggtggtggcagtgattgtgttggtggcaatggcagtggtggtagcggtggtgaggatggtggcgatggtggtggtggtggtggcggtggcagcggcggtgatggtggtggtggtgatggttgtagtggtggtggtgatggtggcgatggtggtggtggcggtggcggcacggttgaaggtggtggcagcggtagtggtggtggcagtggcggtgatagtggcaatggtggttgtggtggtggtgatggtggtggtgtggtggcggcacggtggtggtggtgatggttgtggcagtggtgatggtggcggtggtggtggtgatggtgatggtgttggcggtggtggcggtggcagtgatggtggtggtggtgatggttgtggcagtcgtgatgatcgtcgtatagtgtggcccgttcccgctatcgaccattatgtcgaagcatggaaaggcatgatcgaattgcaaaaagagggattaatcaaaagcatcggcgtgtgcaacttccagatccatcacctgcaacgcctgattgatgaaacgtgcgtgacgcctgtgataaaccagatcgaacttcatccgctgatgcaacaacgccagctacacgcctggaacgcgacacacaaaatccagaccgaatcctggagcccattagcgcaaggagggaaaggcgttttcgatcagaaagtcattcgcgatctggcagataaatacggcaaaaccccggcgcagattgttatccgctggcatctggatagcggcctggtggtgatcccgaaatcggtcacaccttcacgtattgccgaaaactttgatgtctgggatttccgtctcgacaaagacgaactcggcgaaattgcaaaactcgatcagggcaagcgtctcggtcccgatcctgaccagaatgccaaatataaggacatcatcatgcagagccggaagctcttaaaagaacaactcatctatatccgggataaacgcaacggagagaccgtagaacaaacagtccggcatatttatcagaactataaatcagatgccactgccccttattttggtgaaaccggagagcgggcgataacttctgcgcgtattcaacaggcgcttaccctgaacgacaatcttacgctgccgggcaatattggctggctggattatgatccggtttgtgattgtcaggattttggcgatctggtgctagaaagcgttgcgataacccaaactgacgccgatcatgccgatgccgttgtgcgctttcgtatctttaaagatgataaagaaaagacacgcagacactga

SEQ ID NO: 142864 - DNA, 1179 bp, Homo sapiens
tcaggtagaccagcaccgggccgccgggcaaggccgtgatgacggacgttgctcagcaggttggcggcgacctgggcgtagcggtccgggtcgaccacgtgcacgaacatgcgggtcgatggcgatctcgatcaccaggccgggataggcgacgtcggtttcgcagacgatctgccgcaccagttgcgagacgtcggtgtcgaccgggttcacggtgaggccgatgcccgattgcaggcggctcatgtcgaggatctggctgaacagccgctccatgcggctgctggacgcggaaatgtgttggcgcagttcggtggtgcgggtgtcgctggaggacagcagggccgccgccatggagatcgactcggccgcatggttgaggcacagttccatcaggtccaggcgcagcttttcggcgatcgccaggtcggtttcgctccagggcgtggagtggccgcggaccacttcctcccaggcctcgaacgagccgcgcggggtcagctgcgggccggaggggccgatggtcaacagcttttccggcttgccgccccagcggatgcggtgcacttcctcgtggcggaaccagaagatccagcccgattcctggcggtggaaacggatcgccagcacaccgcagcagtcgccgccgtccggagagtcaaagctgggctgcggccagttgtcggtgtggtagatgtcccgttccgggtcgcgctgcaggcgttgcaggatattcccggcctggcgctcgaagtcgctgcggatgctcagggtgcggccgccgagcatgaccagggcgccgtcgcagggaatcagtgcggcgatgccatcgtccgggtgggccagtgcgccgaacaggtcgtcggcgtcctgcgcgcggcgagccagggccagcctgcgctcggtggacacgcgcagcagttcggcgatacgcccctgctccaggcgctcgacgatggcgctgcagacgtggtgcaggttaacggtaaagtccgtgccaaaatcatcgttccggtggacgcaacggaagaacaggttcgcgaacgtgctggccaggaacatctggtagcaaaatatcttgatggcgttactgtacgtaaagtgatttacgtaccaggtaaactcctcaatctggtcgttggctaagcgcgggaggaagcgtgcgatatctggcaacat

SEQ ID NO: 142865 - DNA, 1527 bp, Homo sapiens
ttactcgatccctttactacgcaggtaatcttcgtaattaccgctaaagtcgatcacgcgttccggggtgatttccagaatgcgggtcgccagggagcttacgaactcacggtcgtgtgaaacaaagatcagcgtgccctgatacagttccagtgccatgttcagcgactcaatggattccatatccaggtggttggtcggttcgtccatgatcagaatgttcggcttctgcatcattaacttaccaaacagcatccgccctttttccccaccggaaagcactttagctggctttttgatgtcgtcctggctgaacagcaaacgaccgagaatactgcgtaccgcctgctcgtcatcgccttcctgcttccactggctcatccattcgaacacggtcagatcattttcaaactcatatacgtggtcctgagcatagtaaccaatgcgcgcgttctcagaccattttacggtgccggcggaacagctgaagataccgatcgccaggataccgattaacgtcgatggaatggtgattgccagcagatcgaggaactcaagatggcgaccatcaaaggtgacattacccagcatcgcaaccagagacacgaccgcaaccgacaccggactggcgataatccccatctgtgcaccgatagaacttgccgccatcggacgttccggacggatgttgttcttaatggcgacgtcgtagatgatcggcagaatggtgtaaaccacatgacccgtaccgcaaagaatggtcagtgtacaggtcacaaacggcgcgacaattgagacatatttcgggttgcggcgcagcagcttctcggcaatttgcagcatgacatcaagaccgcccgaagcttgcaaggtcgccgatgccgccaccaccgcaatgataaccagcatgacatcaactggtggtttacctggcgatgtggaagatacaagtaatggccgatgatctataatggtgacactgacgggggacacttcggcgagaaaataatccggtgagccgacaatagccatgggtatatctggcccgattcgaatggcgatcatatctttatccatctccccacccagacggacgcctgcatcaaaacgttcagaaacgacatcggtcaaaccataatcaatggtgagctgaatatcaatttcaggatgcgatttcaggaatgtgcgcattgctggtaacaatatcgtttttgctgcatgttctacagtagtaatacgtattgtcccggatgggcggttctgcagatcgctcagggatgccatggctgaatctatgtcatgcaacatagggccaagaacagacaaaagatgctcgcccgcttcagttggaacaacgctgcgcgtggttcgcgtcagaagccgcaatcccaatcgttcttctatacgacgcactatctggcttaaagctgactgcgccatgctcaggcgggctgctgcacgagtgaagctacgctcctctgcaacgacgacaaacgccatcagatcagcgatttcttcacgcttcat

SEQ ID NO: 142866 - DNA, 2205 bp, Homo sapiens
atgaaagatgtcacgctggtgcgtccgcaagatgcgggagcgaatacatgtgctcacatcctgagccagttgccgcatttgcagctaccaacgctggagacgctggggctaatcaacgcattgggttatgcgccaggcgatatgcagccgtcagattccgcaacctggggcgtggcagagctgcaacatgaaggtggcgatacctttatggggcatcaggaaattttaggcacgcgcccgttaccgccgctgcggatgccttttcgcgatgtgattgaccgtgttgagcaggcattagtttccgctggctggcaggtggagcgccgtggcgatgatctgcaatttctgtgggtcaatcaggcggttgcgattggcgataatctcgaggcggatttaggccaggtctataacattaccgccaatctctctgtgatctcttttgacgacgcaatcaaaattggtcgtatcgtgcgtgagcaggtacaggtcggtcgggtcattacatttggtggcctgttaaccgacagtcaacgcattctcgatgccgcagaaagcaaagaagggcgctttattggtatcaatgcgccgcgttctggcgcttatgacaacggtttccaggtcgtgcatatgggctatggcgtcgatgaaaaagtgcaggtgccacaaaaactgtatgaagcaggcgtgccaaccgtgctggtggcgcaccaccagcgtgtttttgccattttcgcggtcgctattgatatcacgcaggttattaatattcagtactgccgttgccagcaggccgcatgcggtcgccggaaggatcagtgccggaatcaatccaaagaaaaccagtacggaaatatcacccagaccgatataaccataaggacgattgcccacggtgtaggtgatagcggcaatgatcgacaacccgccaagaatcaggaaaccgacaaaatcggccagctaactctggtggccgttattttatctcttggcggtaagtttattcactttatggaaccgttatcgcgtgtttcatggtttgtcggcgtcatcgtcgcctttgcggcctacgccttattaaagaaacgtacaacagcagaaaaaacaggagagcaaaaaaccatagaaaacgaagctcgcgttgtagatatcgccgttaaaggcggaaaaattgctgctatcggtcaggatctgggcgatgcaaaagaagttatggatgcgtctggtctggtggtttcgccgggcatggttgatgcgcacacccatatttctgaaccgggtcgtagccactgggaaggttatgaaaccggtactcgcgcagcggcaaaaggtggtatcaccaccatgatcgaaatgccgctcaaccagctgcctgcaacggttgaccgcgcttcaattgaactgaagttcgatgcccgcggtgtttgcgctccgcattgtgtttattcgccgccgtttccagctttcgggaagctcaatctgccctttccccgtccttttgcgccgtcctctgcgttggcggattccgcccttcacattttctacgaatttgtgcccttccccccggtctgcacgtatcacctgctgatcatcgtcatgctgttattgctgttaacgctggtgctgacgggcctggcaccgcatctgtttcggagaaacacagtgaacgttaattcatcgtcaaatcgtggcgaagcgattctcgccgccctgaaaacgcagttccccggcgcggtgctggatgaagagcgacaaacgcctgaacaggtcaccattacggtgaaaatcaatctgctgcctgacgttgtacagtatctttattatcaacatgatggctggcttccggtcctgtttggcaacgacgagcggacacttaacggtcattacgcggtttattatgccctttcaatggaaggggccgaaaaatgctggattgtggtgaaggcgctggtcgatgccgacagtcgggagtttccgtcagtcacaccgcgcgtccctgccgcggtctggggcgagcgagaaattcgcgatatgtacggtctgattaccggttggcctgccggatcagcagtcgcctggtgttgcccaatgactgcctggtaccgagctagcggcgttttttttcggcccaaatctcttatgtccccctttgtgccgaaattcctttacgctttctctataattcagggccaaaattttgtcccataa

SEQ ID NO: 142867 - DNA, 690 bp, Homo sapiens
atgaataactatggcagcgagggacgcagactcacacacgacacaaaatacgcgtgcgaccaagcgaacgacggcacgacaaaaagacacaaagacagacagagacactgtgtcgcggtgtgtgtagaaagacacacgaacacgcacgcgcacgcacagagaaaacagatgagcgcacgagggagagacgtgagagtattaagacatatacgcaacaacaaaagagcaaagaaaacacacgcagagtatcagatgatcatgacggttaatgcgaccgtgttgatccccggccgtgatatctacccgattagcgccaaagtcttccgttcgttcttcgataacccgcaaatggcgttacgaacagataacgaacaagacatgatcgtaaaagagatgtacgaccgtgctgccgaacagctgattcgtaagctgccaagcatccgtgctgcggatattcgttccgacgaagaacagacgtcgaccacaacggatactccggcaacgcctgcacgcgtctccaccacgctggtggcatcaggcaatagtgaccaaattttgggtatagcccacctgcgtccagctgcggccaggtttcacaaaattcttcgtaactgcaatgcagcgtatcagggcgcgacaaaatgctgcgtaccggaccgtgtgccagaacagtttcgtcttcatatttaa

SEQ ID NO: 142868 - DNA, 2703 bp, Homo sapiens
  misc_feature (1)...(2703): n = a,t,c or g
atgaattcgttacaaatcttgagttttgtcggttttacgctgctggtggcggtgatcacctggtggaaggtccgcaaaacagataccggatcgcaacaaggctattttcttgccggacgttcactaaaagcgccggttattgccgcttcgttaatgctaaccaacctttccacggaacaactggtcggcctttccgggcaggcctacaaaagcggcatgtcggtgatgggctgggaagtgacttcagcggtgacgctgatcttcctcgcgctaatctttttaccgcgctatctgaagcgcggcattgccaccatccccgattttctggaggaacgttatgataaaacgacgcgtattatcatcgacttctgcttcctaattgccaccggcgtctgctttctgccgattgttctctactccggcgcgttggcgctcaacagcctgtttcacgtcggggaatcgctacagatttctcacggtgcggctatctggctactggtaaatttgcttggtctggcgggaattttgtatgcggtgatcggcggactgcgcgcaatggcagtggccgactccatccaccgtattgggctgtaccaaactcatctgaaaaagcaggccagctatattgtggaaggcaatgccgaaagcaaaagggcgctacgccagcacaaccgggagcagataaaacagcatccagaatggtttcctgctccgctcaaggcgagtgacagacgctggcaggcgctggcggaaaacaaccactttttaagcagcgaccatctgcataacattaccgaagtggcgattcaccgcctggagcagcagcttggcaagccttacgtctggggcgggattctatacagtcgtgtgaacgtcgtggactgcggcgatctggtatatgcctttggcgatgcccgtgagatgagcgaaaagctgcaagcgcacgccgagaagctgctggctgccggcaagcgtatactctcttataggggtgaccactttgttacgctgccgctgctgcgtgctcatgctaagcattttggcaaaatggcgctggtacactttgacgcccacaccgatacctatgcgaacggttgggaatttgaccacggcactatgttctataccgcgccgaaagaaggtctgatcgacccgaatcattccgtgcagattggtattcgtaccgagtttgataaagacaacggttttaccgtgctggacgcctgccacgtgaacgatcgcagcgtggatgacgttatcgcccaagtgaaacagaatgtgggtgatatgccggtttacctgacttttgatatcgactgcctggatcctgcttttgcaccaggcaccggtacgccagtgattggcggcctgacctccgatcgcgctattaaactggtacgcggcctgaaagatctcaacattgttgggatggacgtagtggaagtggctccggcatacgatcagtcggtaatcactgctctggcagcgtcaacgctggcgctggaaatgctgtatattcagtcggcgaaaaagggcgactttcgaaggctaaggcaacaagatatcaacagtccatcggcagaagccgcgcctgtagaagatggtctggcgcaattgtacgttctgccgccgctaagcacgctgaccattcatgttgggaaacgcaaaattaaactgcgcccggaagagttacagaaagtcactggcgaacgtggacgccgcgttgagtgccgtaaacctacagacgctgaaagctacggcaatgctatctatatcgctaaccaccagaacaactatgacatggtgacagcatcgaacatcgtgcaaccgccgacggtgacggtaggtaaaaagagcttgctgtggatccccttcttcgggcagttgtactggttaaccggcaacttattgatcgacagaaacaatcccactaaagctcacggcaccattgcggaagtagtgaatcacttcaaaaaacgccgtatttccatctggatgttttttcgatacaggggaantggcgcagcactgaactttacccgtgcggcggaaaaactgcatacctcacagccttcgttaagcagccagatccgcgatcttgaaaactgtgtcggtgttccgttactggtgagggataagcgcaaagtcgcgttgacggcggcgggagaatgttttctccaggacgcgctggcaatcctcgaacaagcggaaaatgccaaattacgggcgcggaaaattgttcaggaagacagacaattaaccattggctttgtgccatcggcggaagtgaatttactgccaaaagtattaccgatgtttcgtctcagacagccagacaccttgattgagctggtgagtttaatcaccacgcaacaggaggaaaaaattcgccgtggtgaactcgacgtcggcttaatgcgccatcctgtttatagcccggagattgattatctggagctttttgacgaaccattagtggttgtgttaccggttgatcaccctttagcacatgaaaaagagatcaccgccgcgcaactggatggcgtgaatttcgtcagtaccgatccggtgtattccggttcgcttgcgccgatcgttaaagcgtggtttgcgcaagaaaacagccagccaaatatcgtccaggtggcaacgaatattctggtgaccatgaatctggtgggcatggggctgggcgtcacttga

SEQ ID NO: 142869 - DNA, 3132 bp, Homo sapiens; identical to SEQ ID NO: 122931

SEQ ID NO: 142870 - DNA, 823 bp, Homo sapiens
gcgggccgcggtggcgcccgcacttcctgcggcgagcgtgcgctggcgggctcccaccgggccgagtgggagaccccggtccgtcgcgggacgccagtcggtcacgggcggaccgcgaccacgggacggcgcggcgctcccctgttgaaatccggttcggtgcgtcgctaattccgcttgcgcaggggtatgcatcccccggaaacgataaaaattcccttgaaacctttgtttattcatgcgttgcgattaacaatacgcttttccagagagcggcttttaacaatgccctaacctgatttcaggtgacgtacaatgccagtctctcagaccttcagagggtgttatgctatatatctttcgtcttattattaccgtgatttacagcatcttagtctgggtattcggctccatttaatgccttttcagcccgcgtaacccgaaacatgtggccacctttgggcatatgtttggccgtcttgcgccgctgtttggcctgaaagttgagtgccgtaaacctacagacgctgaaagctacggcaatgctatctatatcgctaaccgccagaacaactatgacatggtgacagcatcgaacatcgtgcaaccgccgacggtgacggtagaaacaatcgcactaaagctcacggcaccattgcggaagagtgaatcacttcaaaaaacgccgtatttccatctggatgttcccggaagaacccgcagccgtggtcgcggcctgctaccgttcaagactggagcattcacgcggcaattgcggcgggcgtcccgattattcccgtgtgcgtctctaaacttcgaataa

SEQ ID NO: 142871 - DNA, 2670 bp, Homo sapiens
atgaaatccttttcaaggaattgcgatcatcaagtattcagtgcgctgctgattaacgccggtatcgatcgcggaaacaccgatgagatcgtgcaatcaatcgctgactatattgatgtcgatgactcaccacgctttcacggcgcagaagatagcttttaccaaagccagacgccgccccggcatagtgccaatcagatgctttttctgactggcgaattacgtcagataaaaggcataaccgaaaacatctatcagcggcttatcccgtatgtctgcgttctcccgaccacggaacttagcatcaatcttaatatgctaacggagaacgatattccgctcttcagagcgttattcctcaataacatcacggatgctgacgctcgggtcttattgcaaaaaaggccgagggaaggctggctaaccacggatgcatttctttactgggcgcagcaggatttctccggtgtgaagccactggttgctcagtctccgtccacaaaaaaaagaaagagaaacgagacacctttagatttgctggtcttgagcttcactcggcgcgaaccagtggggtacaagagactggggcacctggttgggcatttctgtcggtaccggttcaagtccgacttcgggggaataccctacgagctctccacgactctgaagctgaccggcagcactgtgctgaacggtgccattgaccccacgaatgtcactctcgcctccggtgccacctggaatatccccgataacgccacggtgcagtcggtggtggatgacctcagccatgccggacagattcatttcacctccacccgcacagggaagttcgtaccggcaaccctgaaagtgaaaaacctgaacggacagaatggcaccatcagcctgcgtgtacgcccggatatggcacagaacaatgctgacagactggtcattgacggcggcagggcaaccggaaaaaccatcctgaacctggtgaacgccggcaacagtgcgtcggggctggcgaccagcggtaagggtattcaggtggtggaagccattaacggtgccaccacggaggaaggggcctttgtccaggggaacaggctgcaggccggtgcctttaactactccctcaaccgggacagtgatgagagctggtatctgcgcagtgaaaatgcttatcgtgcagaagtccccctgtatgcctccatgctgacacaggcaatggactatgaccggattgtggcaggctcccgcagccatcagaccggtgtaaatggtgaaaacaacagcgtccgtctcagcattcagggcggtcatctcggtcacgataacaatggcggtattgccccaatctatatcgctaaccaccagaacaactatgacatggtgacagcatcgaacatcgtgcaaccgccgacggtgacggtaggtaaaaagagcttgctgtggatccccttcttcgggcagttgtactggttaaccggcaacttattgatcgacagaaacaatcgcactaaagctcacggcaccattgcggaagtagtgaatcacttcaaaaaacgccgtatttccatctggatgttcccggaaggaacccgcagccgtggtcgcggcctgctaccgttcaagactggagcatttcacgcggcaattgcggcgggcgtcccgattattcccgtgtgcgtctctacaacttcgaataagattaatcttaatcgactgcacaacggtctggtgattgtcgaaatgctgccgccaattgacgtcagtcagtatggcaaagatcaggaaaaccatagaagaatgggtttggggctgtttccaggcaaggccagcagagtttccataaacacatcacaggctggcacaaaggagatgcagaaggagcagccgcagcatgtacagtcaaaagcacctggcacctctgcttttgatcccgcgaagaatgatccgctgagtcgtgccgtgcttggtgaacacagcctcgaagatggcatagatggcttccttggattgacctggaatcaggagttagccgcgacaatcgaccgactggaatcactggatcgaaatgaactgcgtaaacagttttccattaagcgactcaatgaaatggagatttatccgggagtgaccttttcagaagagttagaggggcaactctttgcctcgatcatgcttgatatggaaaagctgattagcgcgtatcgacgtttccaccggggcaaatgcggcgttacccaggatggccaatccccgcggtataccgaagctcggcccgcaacttcgcgagacatcgaaggtgagcgcctgattgaagcctctgccggcacaggcaaaacctttacgattgcggcgctctatttgcgcctgttacttggactaggcggttccgccgcctttccccgcccgctgaccgttgaagaactgctggtggtcacctttaccgaggctgccacggcagaattgcgcggtcgtatccgtagcaatatccacgagttgcgcatcgcctgtctgcgtgaaaccaccgacaatccactgtacgaacgcctgctggaagagatcgacgataaagcgcaagccgcgcagtggttgttgttagccgaacggcagatggatgaagcggcagtctttactattcacggcttttgccagcgcatgctcaacctgatgccttga

SEQ ID NO: 142872 - DNA, 2659 bp, Homo sapiens
  misc_feature (1)...(2659): n = a,t,c or g
ggttgctgccgcggcgcaacgccccgctggccgccgttctctgtccgccccctcctcttccgcgcgggtctctcggcgccgtcgcgggccaccctctctcgccgggggtccgtagcgaccgggcacgggtcgttgttcagctgtgcagctccccgttcttctgctgcgcggcccccactcctctcacacggtcggtacccaccatggtggatctggattccggccagctgtgcgtttacccgggtaactccgatgagtccatgccggcggcgacccaggcgcgtgaacgtctgctggccgataccgccaagaagaaagcgcagattgctgagttgcaatctttcgttagccgctttagcgccaacgcctagaaatctcgccaggcaacttcgcgcgcgcgccagattgataaaatcaaactggaagaggtgaaagcctccagccgtcagaacccgttcatccgttttgaacaggataagaaactgttccgtaacggcgctggaagtggaaggtctgaccaaagggtttgataacggtccgctgtttaaaaatctcaacctggtgctgcgaagtgggtgaaaacctgccggtcctgggtaccaacggcgtcggtaaatcaacgctgctgaaaacgctggtgggcgatctgcaaccggacagcggcaccgtaaaatggtctgagaacgcgcgcattggttactatgctcaggaccacgaatatgagtttgaaaatgatctgcccgtgttcgaatggatgagccagtggaagcaggaaggcgatgacgagcaggcggtacgcagtattctcggtcgtttgctgttcagccagggcgacatcaaaaagccagctaaagtgctttccggtggggaaaaaggccggatgctgtttggtaagttaatgatgcagaagccgaacattctgatcatggacgaaccgaccaaccacctggatatggaatccattgagtcgctgaacatggcactggaactgtatcagggcacgctgatctttgtttcacacgaccgtgagttcgtaagctccctggcgacccgcattctggaaatcaccccggaacgcgtgatcgactttagcgnnttgggtaacccgtgccttcaccgcctgcggatcgtgaccgtcgatttcatggatcacatgccagtgataggcttcaaaacgttttgccgtatcgtcggtaaaccagccttctgtttcaccgtcgatggaaataccgttgtgatcgtaaaaaccaatcagcttgcccagtcccagcgtgcctgccagcgaacagacttcgtgggaaataccttccatcaggcagccgtcgcccataaacacataggtgaagtgatcgacgatctcatggtctggctggttaaactgcgccgccagtgtacgctctgctatcgccagcccgacggcactgatcctctcaaggcagaatctggcccaggatttcagacgctgacgctcacgctcgatattctcaagtttctcgttaaagcgcgcccaacgttcgtcatccaccaggcccagttcacgaccgatttcagtcaaacgcagatccgcatatcttcgcgtagcatcagacgatattctgcgcgcgaagagcgtgaagagaatcgcctgccgcactatgacaatgagagcgaggagaaccgtcgtgctagaagaataccgctgaatgttcactggatctcggctgccctgttgaagaatttaacgcattttgcgatgcccatcccgatcgtactggtcgtcgtctacgccaaacacttctgctgcggtaacctcgtgatcacactccgccaccagtgctgtactggctttccggtatggctggcgaatatcctcttctctgttatctggctgcgttacttccgccaggggccggtggaatggctctggcgtttttctggctccaacctgggagcctttcataataatgtgtttcttccattaaatggagaaatcaccaaagtcctggctgtgaaagagcatgatttgcttcaccagtcacattcgcaaacgcgatacccgctgatctccgagctgaaacagattctgctggagacctactacggtcgtgattatgtagaagtagcgctgtgtgcggcttcaataacgctcagcggaataccgtctttaatcgcctgctcgatgactttcggatcgttcggatcgaggaacacgtccagccagcaccgagaacgagaaagatctttaccagcgttgttgctctacactctctggagctactacaaaatgtgggggcgcatgacaacagaaactctccgcctgcgtcgcctcggtaaagtccagatgctggcacaggcagcggaagaacatcctctgcatggcggcactggtattgctcacactcgctgggcgacccacggtgaaccttcagaagtgaatgcgcatccgcatgtttctgaacacattgtggtggtgcataacggcatcatcgaaaaccatgaaccgctgcgtgaagagctaaaagcgcgtggctataccttcgtttctgaaaccgacaccgaagtgattgcccatctggtgaactgggagctgaaacaaggcgggactctgcgtgacgaacttttagaggaattcccccaccgccgggccagaccgatgcttccggaatccgccaacaaataa

SEQ ID NO: 142873 - DNA, 2820 bp, Homo sapiens
atggcgcgatttgtggtgttagtgattgatagctttggcgtaggggcaatgaaagatgtcacgctggtgcgtccgcaagatgcgggagcgaatacatgtggtcacatcctgagccagttgccgcatttgcagctaccaacgctggagacgctggggctaatcaacgcattgggttatgcgccaggcgatatgcagccgtcagattccgcaacctggggcgtggcagagctgcaacatgaaggtggcgatacctttatggggcatcaggaaattttaggcacgcgcccgttaccgccgctgcggatgccttttcgcgatgtgattgaccgtgttgagcaggcattagtttccgctggctggcaggcggttgcgattggcgataatctcgaggcggatttaggccaggtctataacattaccgccaatctctctgtgatctcttttgacgacgcaatcagaattggtcgtatcgtgcgtgagcaggtacaggtcggtcgggtcattacatttggtggcctgttaaccgacagtcaacgcattctcgatgccgcagaaagcaaagaagggcgctttattggggacaggagtagggttgctctggtttgtgttagcgccagaattatgatgtttgcatctccggctgatatgactctcgaatggcaggaatccggtgtggaaggggctaaccgcttcctgaaacgtgtctggaaactggtttacgagcacacagcaaaaggtgatgttgcggcactgaacgttgatgcgctgactgaaaatcagaaagcgctgcgtcgcgatgtgcataaaacgatcgctaaagtgaccgatgatatcggccgtcgtcagaccttcaacaccgcaattgcggcgattatggagctgatgaacaaactggcgaaagcaccaaccgatggcgagcaggatcgcgctctgatgcaggaagcactgctggccgttgtccgtatgcttaacccgttcaccccgcacatctgcttcacgctgtggcaggaactgaaaggcgaaggcgatatcgacaacgcgccgtggccggttgctgacgaaaaagcgatggtggaagactccacgctggtcgtggtgcaggttaacggtaaagtccgtgccaaaatcaccgttccggtggacgcaacggaagaacaggttcgcgaacgtgctggccaggaacatctggtagcaaaatatcttgatggcgttactgttccttccactatgaaggtcatgatcctggactcaggcgatccgaacgggccattaagccgtgcggtgcgtaaccagttacgtctgaatggtgtcgagttgcttgataaagaaaccacgcgtaaggacgttccatccttgcgtttgggtaaagtgagcatcgcgaaagataccgcatcggtattccgtaacggtcaaacagcagagtatcagatgatcatgacggttaatgcgaacgtgttgatcccccgccgtgatatttacccgattagcgccaaaggtcttccgtcgttcttcgataacccgcaaatggcgttagcgaaagataacgaacaagacatgatcgtaaaagagatgtacgaccgtgctgccgaacagctgattcgtaagctgccaagcatccgtgctgcggatattcgttccgacgaagaacagacgtcgaccacaacggatactccggcaacgcctgcacgcgtctccaccacgctggtgggtgaaaaactggcggtactgggtaccaacggcgtcggtaaatcaacgctgctgaaaacgctggtgggcgatctgcaaccggacagcggcaccgtaaaatggtctgagaacgcgcgcattggttactatgctcaggaccacgaatatgagtttgaaaatgatctgaccgtgttcgaatggatgagccagtggaagcaggaaggcgatgacgagcaggcggtacgcagtattctcggtcgtttgctgttcagccaggacgacatcaaaaagccagctaaagtgctttccggtggggaaaaagggcggatgctgtttggtaagttaatgatgcagaagccgaacattctgatcatggacgaaccgaccaaccacctggatatggaatccattgagtcgctgaacatggcactggaactgtatcagggcacgctgatctttgttcacacgaccgtgagttccccgcgtaacccgaaacatgtggccacctttgggcatatgtttggccgtcttgcgccgctgtttggcctgaaagttgagtgccgtaaacctacagacgctgaaagctacggcaatgctatctatatcgctaaccaccagaacaactatgacatggtgacagcatcgaacatcgtgcaaccgccgacggtgacggtaggtaaaaagagcttgctgtggatccccttcttcgggcagttgtactggttaaccggcaacttattgatcgacagaaacaatcgcactaaagctcacggcaccattgcggaagtagtgaatcacttcaaaaaacgccgtatttccatctggatgttcccggaaggaacccgcagccgtggtcgcggcctgctaccgttcaagactggagcatttcacgcggcaattgcggcgggcgtcccgattattcccgtgtgcgtctctacaacttcgaataagattaatcttaatcgactgcacaacggtctggtgattgtcgaaatgctgccgccaattgacgtcagtcagtatggcaaagatcaggttcgtgagctggctgcccattgtcgttcgataatggttcaaaaaatcgccgagctcgataaagaagtcgcagaacgcgaagccgccggaaaagtttaa

SEQ ID NO: 142874 - DNA, 1092 bp, Homo sapiens
atgcgcaccaccaaactccctgatccaaaagtgaatggcaatgccggtagtttcttcaaaaaccctgttgtatctgccgaaacggctaaagcattactgtcacaatttccaacagcaccaaattacccccaggcggatggttcagtaaaactggcagcaggttggcttatcgatcagtgccagctaaaagggatgcaaataggtggggctgcggtgcaccgtcaacaggcgttagttctcattaatgaagacaatgcaaaaagcgaagatgttgtacagctggcgcatcatgtaagacagaaagttggtgaaaaatttaatgtctggcttgagcctgaagtccgctttattggtgcatcaggatacagcctgcctgagcctatccagttacttaatgctaaacagatattgggtcagctggatgtcggtagtgtagccgtgctgccagtgattgactccacgaatcagtaccttcttgatcgtatcggagagcttaaatcgggcgatgcttgcattgcagaataccagcaggctggccgtggtcgccggggtcggaaatggttttcgccttttggcgcaaacttatatttgtcgatgttctggcgtctggaacaaggcccggcggcggcgattggtttaagtctggttatcggtatcgtgatggcggaagtattacgcaagctgggtgcagataaagttcgtgttaaatggcctaatgacctctatctgcaggatcgcaagctggcaggcattctggtggagctgactggcaaaactggcgatgcggcgcaaatagtcattggagccgggatcaacatggcaatgcgccgtgttgaagagagtgtcgttaatcaggggtggatcacgctgcaggaagcggggatcaatctcgatcgtaatacgttggcggccatgctaatacgtgaattacgtgctgcgttggaactcttcgaacaagaaggattggcaccttatctgtcgcgctgggaaaagctggataattttattaatcgcccagtgaaacttatcattggtgataaagaaatatttggcatttcacgcggaatagacaaacagggggcttattactga

SEQ ID NO: 142875 - DNA, 1891 bp, Homo sapiens
atggcggctaatgccaccggcagcttattgcctgtatatgtaaatcgtgcatattttactgaccacgcacggtatgaaaccgcagcagaataccgggaaagaattcgtctggatgctgtaaaaatgacggaatacctgcgtacaaaggttgaggatctggctctgaaggggctacgtgttttgctcgtggaaggtaacgacccccagggaacagcctcaatgtatcacggatgggtaccagatcttcatattcatgcagaagacactctcctgcctttctatcttggggaaaaggacgatgtcacttatgcaataaagcccacttgctggccggggcttgacattattccttcctgtctggctctgcaccgtattgaaactgagttaatgggcaaatttgatgaaggtaaactgcccaccgatccacacctgatgctccgactggccattgaaactgttgctcatgactatgatgtcatagttattgacagcgcgcctaacctgggtatcggcacgattaatgtcagatccccctatgatgtcatagttattgacagcgcgcctaacctgggtatcggcacgattaatgtcgtatgtgctgctgatgtgctgattgttcccacgcctgctgagttgtttgactacacctccgcactgcagtttttcgatatgcttcgtgatctgctcaagaacgttgatcttaaagggttcgagcctgatgtacgtattttgcttaccaaatacagcaatagtaatggctctcagtccccgtggatggaggagcaaattcgggatgcctggggaagcatggttctaaaaaatgttgtacgtgaaacggatgaagttggtaaagtgactggcgatgctgtcggaatggacgatatcccgcaagaggcccggcagtaccggcataaccaagcctatgcctacagcatccagggtgacggtgccgaggatgacgatgagcgcattgttagatttcatacacgtcgcctgaatcaaacggttcgtctgctgcttgagcatgagatgggacaggtttggatcagcggcgaaatttctaatttcacgcaaccagcttccggtcactggtactttacactcaaagacgacaccgcccaggtacgctgcgcgatgttccgcaacagcaaccgccgggtgaccttccgcccacagcatgggcaacaagttttagttcgcgccaatattacgctctacgagccgcgcggcgactaccagataatcgttgagagtatgcagccggccggtgaagggctgctgcaacagaagtacgaacagctcaaagcgaagttgcaggctgaaggactgctttccgttacccttttaagcggctgttcgctgtttaacagcgaagaagatgtggtaaagatgtccccattgccaaccgttgaaaaccagtttacgccgaccacggcgtggagcacttccgatggtagcggcattggcaacttctattccaatcttcatccggcactggcggacaacgttgtctatgcagcggaccgcgctggtttagtaaaagcgctgaatgcggatgatggcaaagaaatctggtctgtcagcctgaccgagaaagatggctggttctctaaagagcctgcattactttcttgccgtgtgaccagtgtctggccgaacaaccaaacagaaaagtttaataaacagcggacggaggggccggcggtggcggagccggagcaagcaggggttcggcggcattacctgtacccattcaccggcggctaccggcggcggcgcgcagcgtgtcaggcggagagacccgccgccagctttacgacttcaaaggaccgacaccgcgccagagtaccgctggcgcagatagattccgccaacaggcaagccggccgag

SEQ ID NO: 142876 - DNA, 3321 bp, Homo sapiens
atggatatcatttctgtcgccttaaagcgtcattccactaaggcatttgatgccagcaaaaaacttaccccggaacaggccgagcagatcaaaacgctactgcaatacagcccatccagcaccaactcccagccgtggcattttattgttgccagcacggaagaaggtaaagcgcgtgttgccaaatccgctgccggtaattacgtgttcaacgagcgtaaaatgcttgatgcctcgcacgtcgtggtgttctgtgcaaaaaccgcgatggacgatgtctggctgaagctggttgttgaccaggaagatgccgatggccgctttgccacgccggaagcgaaagctgcgaacgataaaggtcgcaagttcttcgctgatatgcaccgtaaagatctgcatgatgatgcagagtggatggcaaaacagtttatctcaacgctgctgttgtataaaggagacgttatgcaggatttaatatcccaggttgaagatttagcgggtattgagatcgatcacaccacctcgatggtgatgattttcggtattatttttctgaccgccgtcgtggtgcatattattttgcattgggtggtactgcggaccttcgaaaaacgtgccatcgccagttcacggctttggttgcaaatcattacccagaataaactcttccaccgtttagcttttaccctgcaggggattatcgtcaatattcaggcggtattctggctgcaaaaaggcaccgaagcggcagatattctgactacctgcgcgcagttgtggatcatgatgtatgcgctgctttcagtcttctcgttgctggatgttattttgaatctggcgcagaaattcccggcagcatctcagttaccgctgaaagggatatttcaggggattaaactgatcggcgcgattctggtcggcattttgatgatctcgctgctgattgagggttacatcaccgtgcaggggcgcgagaaagatcagattaaccgtggcggcgagaagatcgctgccgaagagatcgaaaacctgctgctgcgccacccggcggtgatctacgccgcactggtgagcatggaagatgagctgatgggcgaaaaaagctgcgcttatctggtggtaaaagagccgctgcgcgcggtgcagaataaagttgactgggcctttgaaccgcaacgtgccgcgttgttaatccatgatatgcaggactattttgtcagcttctggggcgagaactgcccgatgatggagcaggtgatcgcgaatattgctgcgctgcgcgactactgcaaacagcacaatatcccggtttattacaccgcccagccgaaagagcagagcgatgaagatcgggcgctgttgaatgatatgtgggggccgggcctgacccgctcgccggaacagcaaaaggtggtggatcgcctgacgccagatgccgacgacacggtgctggtgaagtggcgctacagcgcgtttcatcgttctccgctggagcaaatgctgaaagagagtggacgtaaccagctgattattacgggactaactcagcagagagcagttctaataaggctgacaacaagacagagctatcgtgcaggaaccacaattggcgcatgcatgctggcaatgccgctagctgcggccggtgtaggttttagcgttacgttaatcttgttgattgggctttgggcgttgatgtgctacacggcgctattactgctggaggtgtaccagcatgttccggcagataccggtctgggcacgctggcaaaacgctatctgggacgctacggtcaatggctgacgggcttcagtatgatgttcttaatgtatgctctgactgcggcatacatcagcggtgccggtgaattgttggcctccagcatcagcgactggacaggtatttctatgtcggcaaccgctggcgtgctgttgttcacttttgttgccggtggcgtggtttgtgtcggaacttcactggtcgatttatttaaccgttttctgttcagcgccaagattatttttctggtggtaatgctgcgttcaaataccgttggtggacggttgcaaactggtgcaattacgtttctgccgccgttggcgtttgcactgttttatccacgaggatttgtgatggcgctgggttacgccggtgtggcgctggcggtactggcattgattatcccttcgctgttgacctggcaaagcagaaagcacaatcctcaggcgggttaccgggtcaaaggtggtcgtccggcgctggtggtggttgatcaggaagttgaacgttttctgagcggtcgtgccaaggcatcagcccagctggaaacgatcaaaacgaaagctggtgaaacgttcggtgaagaaaaagaagccatctttgaagggcatattatgctgctcgaagatgaggagctggagcaggaaatcatagccctgattaaagataagcacatgacagctgacgcagctgctcatgaagttatcgaaggtcaggcttctgccctggaagagctggatgatgaatacctgaaagaacgtgcggctgacgtacgtgatatcggtaagcgcctgctgcgcaacatcctgggcctgaagattatcgacctgagcgccattcaggatgaagtcattctggttgccgctgacctgacgccgtccgaaaccgcacagctgaacctgaagaaggtgctgggtttcatcaccgacgcgggtggccgtacttcccacacctctatcatggcgcgttctctggaactacctgctatcgtgggtaccggtagcgtcacctctcaggtgaaaaatgacgactatctgattctggatgccgtaaataatcaggtttacgtcaatccaaccaacgaagttattgataaaatgcgcgctgttcaggagcaagtggcttctgaaaaagcagagcttgctaaactgaaagatctgccagctattacgctggacggtcaccaggtagaagtatgcgctaacattggtacggttcgtgacgttgaaggtgcagagcgtaacggcgctgaaggcgttggtctgtatcgtactgagttcctgttcatggaccgcgacgcactgcccactgaagaaagacagtttgctgcttacaaagcattggctgaagcgtgtggctcgcaagcggttatcgttcgtaccatggacatcggcggcgactatgagctgccatactatgaacttcccgaaagaagagatccggtttcctcggctggcgcgctattcgtatcccgatggatcgtagaaagatcctgcgccgataagttccgggtattctgcggtgcttctggttttcggtaa

SEQ ID NO: 142877 - DNA, 1521 bp, Homo sapiens
atgatgtgtatcatgtatcgcaccgccagcagcctcgccaaccagtatcacatcgacagcgaacaggcccgacggggatcacagaatgcgtttgacgttaactttgaggcctggcagctggagatcaaccatgtgctggaagccgccagtgcgcaaagccagcgtaactatcagatttcggcactggtgtttatcagcatgattattgttgcggcgatctacatcagcagtgcgctgtggtggacgcgcaagatgattgttcaaccactggccattatcggtagccattttgacagcattgctgcgggtaatctggcgcgtccgattgcggtatatggtcgtaatgagatcaccgccatttttgccagtctgaagaccatgcagcaggctttgcgtgggacggtaagtgatgtgcgtaagggaagccaggagatgcacattggtatcgcggagattgtcgcaggcaataacgatctctcaagtcgtaccgaacagcaggcggcatcgctggcacaaacggccgccagtatggagcaattaaccgccacggtagggcaaaacgccgataacgcacgacaggcgctcggaactggcaaaaatgccgcgacaacggcgcaggcggcggctgttcagtttattgacaggtgccaggctgatttcacgcgcggtgcttaccgctaccggagtggaacgtactttatttgccagtacctgaccgtcacggttagtggtattgacgctcaccagcgtggacaaaccgatacgcagcggatattgctccagctgtttctggtccagttcgatacgcacaggcagacgctgaacgactttgatccagttaccggtcgcattttgcgctggaagcagctggaccgcgcggcgggagacataaccggtcatcggactgataatacgagtacgctccagcgccagccaggcgttacgtacttcggtggcagcctgttgcacggctggctgatcttccagtttagtccccagaatcatcgcctgattggcattgtattgttgaatcgcgacgtccagttgcgcctgggcactggtgacggcgtcgcgggcgtgttgcagctcttcgcgaccaatcaggttggcattgcccagcggcacacggcggttgtagtcgctttgtgctttcgcgagggcgattttctgcacctcaatattcgcctgcaactgcttgctgttaatcatcagctggtgggtttggcgaacgctggaagccagtgcagttttggctttttcaaacgcctggcgagcatctgtcgggtcgagagtgaccagcacgtcgccttcttttacaaaatcggtgttatcggcccagactttcgtcacgctgccagacacctgagacataatttgaatttgattccctgccacgtatgcgtcatcggtttcttcgaagtgacgcagtaccaaaaaccaataaatccctatcgctacggcaataattataaagagcaggtgagaaggaggagcagacgcttacgttgccgatcttcttag

SEQ ID NO: 142878 - DNA, 3090 bp, Homo sapiens; identical to SEQ ID NO: 140293

SEQ ID NO: 142879 - DNA, 1990 bp, Homo sapiens
tcctgcgtgaacagggtattgccgaatttaaattaccggatcgcgtggagtgtgtggattcacttccgctgacggcggtcgggaaagtcgataaaaaacaattacgtcagtggctggcgtcacgcgcatcagcctgaaggagagaacccgatggctattccaaaattacaggcttacgcactgccggagtctcacgatattccgcagaataaagttgactgggcctttgaaccgcaacgtgccgcgttgttaatccatgatatgcaggactattttgtcagcttctggggcgagaactgcccgatgatggagcaggtgatcgcgaatattgctgcgctgcgcgactactgcaaacagcacaatatcgcggattaagtcggggcccaccagaaatatcacagcgatgaagatcgggcgctgttgaatgatatgtgggggccgggcctgacccgctcgccggatcagcaaaaggtggtggatcgcctgacgccagatgccgacgacacggtgctggtgaagtggcgctacagcgcgtttcatcgttctccgctggagcaaatgctgaaagagagtggacgtaaccagctgattattaccggggtatatgcccacattggctgtatgaccaccgcaaccgacgcatttatgcgcgatattaaaccgtttatggtggtgcccccatgccaccgggtgaacttcgcacagtttacgccgaccacggcgtggagcacttccgttggtagcggcattggcaacttctattcctatcttcatccggcactggcggacaacgttgtctatgcagcggaccgcgctggtttagtaaaagcgctgaatgcggatgatggcaaagaaatctggtctgtcagcctggccgagaaagatggctggttctctaaagagcctgcattactttctggcggtgtgaccgtgtctggtgggcatgtctacattggcagcgaaaaggcgcaggtttacgcgctgaataccagcgatggtactgtggcatggcaaactaaagtcgcgggtgaagcactttcgcgcccggtggtcagcgacggtctggtgttaatccacaccagtaacggtcagttacaagcgctgaacgaagctgacggcgctgtcaaatggacagttaacctcgatatgccttcgctctctttgcgtggcgagtctgcgccgacaacggcttttggtgcggccgtcgtggggggcgataatggtcgcgtcagcgcagtgctgatggaacagggccagatgatttggcagcagcgtatttcccaggcgaccggttctaccgaaattgaccgtctgagcgatccattggcttcgcgaacgcgggttcaccgtcccggcgaccaacccccggatcacgcggaagaagatcagcatattcagcctgctggagacaccacacgcccacgacgctatagcaaaggcgatggtggaccaaaggaacagtttcacttccccgacgcgctttgccagccagccggtaagcgggatcgagatggcattcgccaccccgaaagaagtgattacccacgttccctggctgagcgatgagcccagattcccggcgatagtggggatcgccacgttagcaatggtggagtccagcacctgcatgaatgtcgccagtgacagcgcaatcgtcataatgaccagttgcgcgccttccagcggtttttgctgttgcatcacacgcacctctggattagccagcgttagcttttacgatatcgtcgatcagtttattgacaggtgccaggctgatttcacgcgcggtgcttaccgctaccggagtggaacgtactttatttgccagtacctgaccgtcacggttagtggtattgacgctcaccagcgtggacaaaccgatacgcagcggatattgctccagctgtttctggtccagttcgatacgcacaggcagacgctgaacgactttgatccagttaccggtcgcattttgcgctggaagcagtga

SEQ ID NO: 142880 - DNA, 1527 bp, Homo sapiens; identical to SEQ ID NO: 130196

SEQ ID NO: 142881 - DNA, 1395 bp, Homo sapiens
atggaagattctgtgggtgaagtcatggtaccaaccgaagaagtggttgaaatccgtggcggtcagcgtcgcaaaagcgaacgtaaattcttccctggctacgtcctcgttcagatggtgatgaacgacgcgagctggcacctggtgcgcagcgtaccgcgtgtgatgggcttcatcggcggtacttccgatcgtcctgcgccaatcagcgataaagaagtcgatgcgattatgaaccgcctgcagcaggttggtgataagccgcgtccgaaaacgctgtttgaaccgggtgaaatggtccgtgttaatgatggtccgttcgctgacttcaacggtgttgttgaagaagtggattacgagaaatctcgtctgaaagaagtgaggagcgtctctgcctggccgcccatcgtctgggatgtgagcagtggcgcggtgcagatgccggatgcgacgcttgtcgcgtcttatccgacctacgggaacacacatgtagggcggataaggcgttcacgccgcatccgccagtggcgcggtgcagttgccggatgcaacgcttgccgcgttttatccggccaggaggattgcacatgcagagcatcaccccgtatgcgacaggtgttccatatcgagcatcaactgcggttgtgccgggatcttcacgccgaaatccggttccgctttcactttcggtggcgttccgcgctcaacaggcagtcccgcgtcggaccaggtttgccagccgccatccagcaggcgcacatctttcacgccagcataaagcataatctgcgctacaagcctggcagcggtatttcctctcgcgtcgtgacgcccgaagtcaacgaaattgtggtgaacccgaatgcgaccctcgactggcaactggcactacgccaggcagcaggaaaaaccgatttagcgcgcgatatgctgcaaatgttactcgatttcctgcctgaagttcgcaacaaagttgaggaacagctggttgaacgccgcgcaattcgtgaatccgcgcagggcgctggtgcccgtgaagtcttcctgattgaagaaccgatggctgccgcaattggtgctggcctgccggtttctgaagcgaccggttctatggtggttgatatcggtggtggtaccactgaagttgctgttatctccttgaacggtgtggtttactcctcttctgtgcgcattggtggtgaccgtttcgacgaagctatcatcaactatgtgcgtcgtaattacggttctctgatcggtgaagccaccgcagaacgtatcaagcacgaaatcggttcggcttatccgggcgatgaagtccgtgaaatcgaagttcgtggccgtaattacggtgttcactcatcaacgtttttttgctttctggagttaaattaa

SEQ ID NO: 142882 - DNA, 1818 bp, Homo sapiens
atgaaggccagccacgccatgagggctgctgcaaaggtgagaagtcagaacacgagcactgcggacacggtcaccagcatgaacacggtcaatgctgcggtggtcgccacggtcgcggcggcggtcgtcggcaacgtttctttggtcacggtgaattacgtctgcccgggcgtcatctacccaacgctggattttctgcaggagcagtcgctgattaccatccgcgaagaggaaggaggtaagaagcagattgcgctgaccgaacaaggcgcgcagtggctggaagaaaaccgcgaacagtgtgtaaaaaggaatgcagctgcctgctttaacaagcatacataccaagttcagaacagtgtctatttctggagactaaggagagttactgtgattaatgtgatagacaagggcgacgaggtggaagcggacaaaacgttacacattgcgcaaaacggaacggtggtcgccgagggtgattatggattccgcctcacgaccgcaccaggtaatggtttgtacgttaactatgggctgaaagcgctgaacatccatggtgggcaaaagctgacgttagccgaacatggcggagcctatggcgcaacggccgatatgtcggcaaaaatcggtggtgaaggggatctggcaatcaatacggtgcgacaggtttcgctttccaacggtcagaacgactatcagggggcaacctacgttcagatggggacattacgtaccgatgcggatggtgcacttggcaacacccgggaactgaacatcagcaacgcggccatcgtcgatcttaatggatcgacgcagacggtagagacattcaccgggcagatgggttcgactgttttgttcaaagagggggcgctgacggtaaataaaggtgggatcagtcagggtgaactgacaggtggcggaaacctgaatgttacagggggaacgctggctatcgaggggcttaatgcacgctacaatgcgttaaccagcattagcccaaatgcggaagtcagcctcgataatactcagggtgaattcagcagtaagcgccgtcagaccagaaaagagattttcttgtcccgcatggagcagattctgccatggcaaaacatggtggaagtcatcgagccgttttaccccaaggctggtaatggccggcgaccttatccgctggaaaccatgctacgcattcactgcatgcagcattggtacaacctgagcgatggcgcgatggaagatgctctgtacgaaatcgcctccatgcgtctgtttgcccggttatccctggatagcgccttgccggaccgcaccaccatcatgaatttccgccacctgctggagcagcatcaactggcccgccaattgttcaagaccatcaatcgctggctggccgaagcaggcgtcatgatgactcaaggcaccttggtcgatgccaccatcattgaggcacccagctcgaccaagaacaaagagcagcaacgcgatccggagatgcatcagaccaagaaaggccatcagtggccactttggcatgaaggcccacattgcctggtcaccaccgcggccaacgagcatgacctcaatcagctgggtaatctgctgcatggagaggagcaatttgtctcagccgatgccggctaccaaggggcgccacagcgcgaggagctggccgaggtggatgtggactggctgatcgccgagcgccccggcaaggtaccggcgcggcatcgtctttctgcacacggatgtgttttgtataccgctctttcccgccgtattgtggcgctccccctgcctgtgtcggcgcccccataa

SEQ ID NO: 142883 - DNA, 2652 bp, Homo sapiens
atgtctcgacttctcgaaactggaagcagcacgctggatgaagtcgttactctgctggcacattcttctcacgataaagggttagaactgacgctcaatattaaaagcgacgtgcctgataacgtgatcggcgacccgctgcgattacagcaaatcatcactaacctgaatggcaacattgatattctggtagaaaaacgtgcgctgagtaataccaaagtgcagattgaagtgcagattcgggataccggcattggtattcctgaacgcgatcaatcgcgcttattccaggccttccgacaggctgatgccagtatttcccgccgtcatggtggcaccgggctggggctggtgattacacaaaaactggttaatgaaatgggcggcgatatttcgttccatagccagccgaatcgcggttcaactttctggttccacattaatctcgatctgaacccgaacattattatcgaagggccatccacccagtgcctcgcaggtaagcgcctggcctatgtcgaaccaaactccgcagcagcgcaatgcacgctggatattttaagtgaaacgccgctggaagtggtttatagcccaacgttctccgcgctgcctcccgcgcattacgacatgatgttgttaggcatcgcggtgaccttccgcgagccgctaacaatgcaacatgagcgattagcgaaagcggtatcgatgaccgatttcctgatgctggcacttccttgccatgcacaagtcaatgctgaaaaactcaagcaagatggtatcggcgcgtgtctgctgaaaccattaacacctacacgcctgttgcctgccctgacggaattttgtcatcacaaacaaaacacgcttttgcctgtaaccgatgaaagtaagctggcaatgacagtcatggcggttgatgacaaccccgctaacctgaaacttatcggcgcattgctggaagatatggtgcaacatgtggaactttgcgatagcgggcatcaggcggttgaacgggcgaaacagatgccgccggcccggggtatccacccgcgcgctagtggcaccacctggggccccgggtctcacaacccgggcatcctcaaacgtcaccgggcgcttgctggtcggaaaatccgacaacacgttcaaacccgtgggccgtcaggtcgacaaggggaagaacctattgccatgtcagcaatgaacgcagctaaccacttgaaaggcgttacggcgatcatcaccatgaccgaatcgggtcgtaccgcgctgatgacctcccgtatcagctctggtctgccaattttcgccatgtcgcgccatgaacgtacgctgaacctgactgctctctatcgtggcgttacgccggtgcactttgatagcgctaatgacggcgtagcagctgccagcgaagcggttaatctgctgcgcgataaaggttacttgatgtctggtgacctggtgattgtcacccagggcgacgtgatgagtaccgtgggttctactaataccacgcgtattttaacggtagagattacttaccaaatcacacatcgaggcaaaggttgtatctttcggcagacggatatgctccaccagttcgaaacgcagccagcgaagacgctcaatctggcgcaggatttttggttgctgacgcagggcgatgagcgtagggccatcaatattgaccgatgccagcaggccgtgctctataaagaagtcggctttttgcgccagcaaatcaatctgctctttcacaacctccatccgatggctgacgatcggctgccaggtgtaagcacgctcacactgcaaccaaaaacgccgttcctgcaagctctcgatgcttgcttcagggttgcttattcgctggataacctgccttatcatcaaagatgtcctgtgtttaaaagtgatgctgcccggactcgacaaagattatcgcgcgccatcaggttcacgactatgtccaaaaagattgccgtgattggcgaatgcatgattgagctttccgagaaaggcgcggacgttaagcgcggtttcggcggcgataccctgaacacttccgtctatatcgccccaccggcgagcgtacgttctactactggcggaacgaagccgccgccaaattctggctggagagtgagcagtctgcggcgatttgcgaagagctggcgaatttcgacttatctctacctgagcgggattagcctggcgatcttaagcccgaccagccgcgaaaagctgctttccctgctgcgcgaatgccgcgccaacggcggaaaagtgattttcgacaataactatcgtccgcgcctgtgggccagcaaagaagagacacagcaggtgtaccaacaaatgctggaatgcacggatatcgccttcctgacgctggacgacgaagacgcgctgtggggtcaacagccggtggaagacgtcattgcgcgcacccataacgcgggcgtgaaagaagtggtggtgaaacgcggggcggattcttgcctggtgtccattgctggcgaagggttagtggatgttccggcggtgaaactgccgaaagaaaaagtgatcgataccaccgcagctggcgactctttcagtgccggttatctggcggtacgtctgacaggcggcagcgcggaagacgcggcgtaa

SEQ ID NO: 142884 - DNA, 1536 bp, Homo sapiens
ttagtcgtcgtccttccttctcaacgcatttctccccacacgccactttgcgtcataaactttttgcgtcgcttcaaaaccgttggtgccagtcaggtgttgtcgcatccaaggtggaattccacaagattttttcgctctcaggtctcccataccccagccaatcggtgtgtaccagttactccgccagcccgttatccaagattcttggccggagaatactgccgcttcggtgtcagcacgtcctgacagacatgccggtataagcggaaacctatttcggcaaacatctgacgatggcatcgatacgcgtctggaaatcagcacgcacatctttacggaagctttcgtaagggttgccgtcgcaccttgcgatcgccgctgtaaatcagcgtacctcaacgccgttagttttgagcgcagcgccatagttactgtgcgccacatgaccccaatggagccggttctggccgtttgtgtgaccagccgtcgcatgccgaactggcaataagctgcactgcagttcatgtcattggcagcgcccagatgggtttgatatcgcgcatacgggcaataatgtcggcgcgtcaaacgccccggacaccattccacccggcgtatccatatccagaagatgccgtcaacgccggggtcactgattgcctgctgcaggcgagcaatgatccgttgtaacccgtcatcccggaataagggggttttacgaccagcgtgccggaaaccggcaagaccgcgataccatttgccacctgaagctgcgtgatggacggggatccatgtcatcatcctcaccaaacagcgcagcggttcggctatttgtccggcatcaagcgtgatgccagagacggtattgtcagccgggtgatgcccaactatcatatagcgatccctcttgtgagaaccatgccaatgttgtacgctgtatgagggaccgatgctcttagcccaaaggtgggcattgaacgcggacaatagtccccatcccacctctaccttaggacgagtcatcgaacgatgccactctgtggtgttcgaaacccaaaggtatgcccgtcgcgtcgatccattaagatcgacgatgtccgcgttgctgatgttcagttccggttgttgccaagtgcaccatccgcatcggtacgtaatgtccccatctaacgtaggttgccccctgatagtcgttctgaccgttggaaagcgaaaccgtcgcaccgtattgattgccagatccccttcaccaccgatttttgccgaatatcggccgttgcgccataggctccgccatgttcggctaacgtcagctggtgcggtcgtgaggcggaatccataatcaccctcggcgacaccgttccgttttgcgcaatgtgtaacgttttgtccgcttccacctcgtgccctgatagttacggccttccaggtgtagtcacccgcgccgacaaccagcgtatcgacgctgatattccctccgcgagcgtcgcagcaggaatatccgtatcgaaagatggatgctacgcgtcgcat

SEQ ID NO: 142885 - DNA, 2424 bp, Homo sapiens
atgccacggaagctttcagcccgtgaccaaagacccgttgagatcaatgccggcctggtacaggtgccagaaaacccggggctgggtgtagaaatcgatatggatcaagtgatgaaagcccatgagctgtatcagaaacacgggcttggcgcgcgtgacgatgcgatgggaatgcagtatctgattcctggctggacgttcgataacaagatcgatgctgataataccgcagttcttccagctataaacgttggcgcagattgtatcacgaccgatcccagcgatgccaaactggaactggatgccgacaaactcaccgctgcactgaaaaaagatgccagcggcgtaggtgcattgattgttggcgatggtaaaaaaaccggcatcacgaccaccatcggcagcaacctgaccagttggctttcgacaacgggcattattaaagccgctaccgatggcgttagtaagaccctgaataaattaactaaagactacaacgccgccagcgatcgcattgatgcgcaggtcgctcgctacaaagaacaatttacccaactggacgttttaatgacctcgttaaacagcaccagcagctacttaacgcagcagttcgaaaacaacagtaattccaaacaggtcatgtacgcggcaaaaggcacccaggcctatgcacaaattggcgtcgaaagcgccgtaatgagcgccagccagcagcagctggtcaccatgctatttgatggagtgctgagcgcactggttagagcgagcctgtttatgcaggacaacaatcagcaaggcaaaggcgtctctttgtcaaaagcgatcaacatcattgagaacggactgcggggcgacgaggtggaagcggacaaaacgttacacattgcgcaaaacggaacggtggtcgccgagggtgattatggattccgcctcacgaccgcaccaggtaatggtttgtacgttaactatgggctgaaagcgctgaacatccatggtgggcaaaagctgacgttagccgaacatggcggagcctatggcgcaacggccgatatgtcggcaaaaatcggtggtgaaggggatctggcaatcaatacggtgcgacaggtttcgctttccaacggtcagaacgactatcagggggcaacctacgttcagatggggacattacgtaccgatgcggatggtgcacttggcaacacccgggaactgaacatcagcaacgcggccatcgtcgatcttaatggatcgacgcagacggtagagacattcaccgggcagatgggttcgactgttttgttcaaagagggggcgctgacggtaaataaagtcggaccggaaacgctaaagcgtgacccacccgtcagagcaatgacaatccccgcaacagctgcggtatataaaccgtactggggtgccacaccactaccaatagccaacgccatcgccagcgggatagcaataatcccgacggttatcccggcaatcaggtcacggcggaatggtatcgcagacaacgacttcatcaattacagagttacgcaggttgttcgccgcgttgccagagaagatcgggtgagtcgcgtacgcaaatacacgtttagcaccacgttactttcagagcttcagcagctttacacagcgtaccgccagtgtcgatcatatcatcgaccagtacgcagtcacgacctgcaactaaacctgctgatcattaaagataatcagattgtgtatcgcaaagcctggggagcggcgaaaaagtacgatggcagcgtgttgatggaacagcctgtcaaagccaccaccgggacgctgtatgacctggcctcaaacaccaaaatgtacgccacgaacttcgccctgcaaaagctgatgagcgaaggcaaactgcatcctgacgatcggattgcgaaatatattccggggtttgccgatatggttgtcacctgcgggccattcatgagctttggcgaacgtcgcctgctgggtctgttccagaaccgttacggacctaaccgtgttggctataccatctgccgacaagaaggccccggcacccggattccggcccctttcccaaacaagtttggcgccaggcccttggaaattgggccgaaccattggcagtttgaaaatacggaagattatgttcgccaggccgttgaagaaccacaccagcggggtgcaaaccaggtacgctacgccaccgcacgctcagtcttcaaatgggatggcaccgataccgtcaaagtcggcagcgatgaaaccccggttcgcgtgctggacgaagaagtctccaccgaccaggcgcgctggcataaccgctattggatcgacagcgaagggcaaattcgccagtcggaacagtatctcggcgcggattattttccggtgaaaaccactctcatcaaggcggcaaaacaatga

SEQ ID NO: 142886 - DNA, 4901 bp, Homo sapiens
  misc_feature (1)...(4901): n = a,t,c or g
gaatattttcgacataagcgtaggcttcatgtccacgagcgtagccgtaagtcagcttgctgtaatagggtttctggctaagtaaaggcagacgctgttttacgtcagcccaactgtcaggattccctttggtttttgccgtcagggcgcgggcatccagcatatgcgggtaccgagctcggtagccacattggaaagatccccaagggttcccgcgcggcgtaccgccgcagtgctcggcgaagtggcgaagcaggcgccgtcgacacgccgagaagcgcgcatcggtgatgagcgacacgtcttgccccacgagatatgcttgtagcgcggaggtgagnctggtaggtctcttccatgccggtgccggacggccgccgccgatcaccaccatgatatcgccctgcacaatctcttcccgcttgatcgccttgatcgcctgcgcttccgagacaaacacccgcacccggccggtgtggtggtatacgccatcttcgcccaccaccgacgggtcgatcgccgtggccttgatcaccgaaccttccggcgcgatgttgcccgtcgggaagcagaccgtcgaggtcagccctttcgcttttgccttctccggcggcaggatcacgtcatccggctctacgccgtcctgctcgcgcaggcactggcggaagcgcgcccggcgctcggacgcctgccaccattcaaggttctcgcccaccgtctggccggtcacggtcatggcgtccagatgcagcaggccgaggtcgcgcaggtggagcatcacctccggcacgccgcccgcgaggaaggcgcgcacggtcgggtgatagtccgggccgttgggcagcacgctcaccagacgcggcactttacggttgatgcgcgtccagtgctcaacgtccgggatcgtgcagcccgccgcgtgggcgatggccggaatgtgcagcagtaaattcgtggagccgccgaacgccgcgtggctcaccatcgcgttttacatggctttatccggacaggatatcccgcgtggtgatgccgcggctatccagctcgctgaccgcgcgcgccgactggcgggcgatctccagccacaccgcctgcccggacggcgccagcgcggagtgcggcagcgccagacccagcgcctccgcgaccacacccgccgcccggcgaggcgcaggcgcgacagcccagttcgcggcctcctgcagggagagttcgtggttggcgaaacgcgcgccgatggtctgcaccttgcccgcgtcttctacgacgtcgcgcagctcgccccctacccaggatgtcggctcgcagaggaagtagtggtttaccgtaccgttgtaacggttttcgatacgacgcagttcgccgtaacgttcaccggggctgatgttacagccgatggaacattgctggcagatgctcggcgcaaactgcatatcccatttacggttgtaacgctcggagtgcgttttgtcggtaaatacgccggtcgggcaaatttcgaccaggttaccggaaaattcgctttccagcgtgccgtcttccgggcgaccgaagtagacgttgtcgtgcgcaccgtaaacgcccagatctgtaccgtcagcgtaatctttgtagtaacgcacacagcggtagcaggcgatgcagcggttcatttcgtgagagatgaatggccccaaatcctgattacggtgggtacgtttggtgaaacggtagcgacggaagctgtgtccggtcatcacagtcatatcctgaagatggcagttaccgccctcttcacataccggacagtcgtgcgggtggttggtcatcaaccactcgaccacgctttcacggaactgtttcgcttcttcgtcgtcaatggaaataaaggtgccatcggaagccggtgtcatacaggacatcaccaggcgaccacgcgtgtcttccgcgttttggtattgcttcaccgcacactggcggcaagcaccgacacttcccagcgccggatgccagcaaaagtcgggaatatcaaggcccagagacagacaagcttccagcaggttgtccgctccgttgacctcgtattctttgccgtctacatgaattgtagccattagcatgcttccacagcgctctttcagcaggttcggctgaatcccattaatcaaatgggtattgctgaacggctgtttgattcccgcctcaaattcttcgcggaaatatttgatggcgctctgtaacggctccactgcaccaggtgcgtgggcacagaaagttttacccgggcctaagaatcgacacagttgctcaagtgtttcgatatcgcccggctgaccttcaccacgctccagcgcacgcagaattttcacgctccacggcagaccgtcgcggcacggcgtacaccagccgcaggactcacgggcgaaaaactcttccaggttacgcaccagcgacaccatgttgatctcatggtcaaccgccatcgccagcgccgtacccagacggctgcccgctttaccgatactttcgaattccatcggcagatcaaggtgcgcttcggtcaggaagtcagtccccgcgccgcctggctgccaggctttaaatttcagaccatcacgcataccaccggcgtaatcttcgaggatctcgcgtgcggtggtgccgaacggcagttcccacagtcccggatttttcacccgaccggagaagcccatcagcttggtcacggtgtcgaaagctatcgcaccactggcgcgccgcgtatcagtcctactcactttatggacagcgacggcaaagtgggcgcggaagtggctccgcgtcgttatttctgtctgcaatgtcacgtaccgcaggccgataccgcgccaatcgtggggaatacccccagccgtctggcgctggggacgctgctgttgatcggttttgttggcggcatcgtcttctggggtggccgggcttgccgattcgaagatattcctgtaaatcagctctcgccgggcaacaacgccgcgtcgctttagcgcgtctgtgctacccgtgccacgtatgatggcagagccaacaatcccgcaatcaatgccgatatatttcgggttttccgggtgttcatagcttacgaagatgttgccaggtgcatatcggcatggaaaaagctgcacgccgcgttccgccagcaatttcatgttagtgccgtttttctccagcgccgcaacatcagacaccggaatgccgtaaatgcgctccatcaccatcatcccttcactacaatagtcagggtaaacttccgggatgtagagcatcgggctgtcttcaaaattgcgccgaagctgaatggcgttggcagattcccgcagcaaattcagttcatcaatcaatgtcttttcgtactcgcgcaccacttcggttgggcgcagacggcgaccatccggcagcaaacgcggcacccagcgagccagacggtagataagtttcagatccgctttaataaccggcaaaatatccgggcggatgactttaatcaccacctctttaccattcgatttcaatcgcgcggtatgaacctgggcgatagaagcagaagccagcggcttgatttcaaaatcgtcaaaccacgcttctaccggcaagccgcccattgcagcttcaatctgctgcttcgccagcttgccatcaaacggagcaactttgtcgaatagggcgatcatcaacgctggcgcatagatgatgtaggcatgaagcagcaggaacgccagcggcgcagtcaggaagatcagccgtggaatgcccgacaagaagtggaacatggcgttgacgtaacatagccgctgagcaaacttcagccctttaccggtgagcgggttatcgagacggaagatttgtaccatcccgcgcgcccagcgaatacgctgaccgatatgcgccgacagactttcggtcgccagccccgcctgcctgccggaatacgcattatagcgctggcaggtattaggccacggagggttatcgacagcaatgccgccaatttcatccagcggcttacgacgaatcaccgcacaggaaccgcagaagaaagtggcgtcccacatatcgttgccatcctgcaccagaccatagaacagcgtgccttcgttcggcgttttacggaaacgccccaggttgcgttcaaacgggtccggtgagaagaagtggtgcggcgtctgcatcatcgccagctgtttttctttcaggaaccagcccatggtcatttgcaagaacgatcgcgttggtacgtggtcgcagtcgaaaatcgacacgaactcgccttgggcatatttcagcgcattgttgatgttgcctgctttcgcatgttcatgagtggtgcgggcgatatatttcacccccacgttttgcgcaaactggcgaaactcttccctgccgccgtcatcaaggatccagatattcagcttatctttcggccagtcgatacccagcgaggcgtaaatggtatttttcaccacgttgagatcttcgttgtaagtcgggacaaagatatccaccgacggacacagcgacatatctttcggcaatggcaccggctgacgattcagcggccatactacctggaagtagccgagcaccagcacaatccacgcgtacgtttcagggaagagcagaataagcccgcacaccagggaagcgatgatcgaatgatcatagcaagcgggcatggctttacgctcttcggcgccgagctgggagaactcgccaccgctgcccaggaagaacaggccgtcaacgcctgctttgatcagatcgtcgatcagcgcggcggtgcccggcttatcgagctggccgtcggcggtaaaaatggtggagacagggggaatgattcccgtgaacaacgcggactgcggcatgagatctccttgctgaatcat

SEQ ID NO: 142887 - DNA, 1846 bp, Homo sapiens
ctgctcgtcccctttgccgatgatgctcaccagcggcagcgcgatgccgctgatagcgagcgagcccgccgccgccaggaagaagcgccaggactgcagggcgtgacgctctttcgggtcggcggtgatgacgcccggcatggcgcagtacggcacgttaacgaaggtgtagaccagcgtcaggagaatgtaggtcacgcaggcgtagatgatcttgccctgtgcggagaagtccggcgtgtagaaggtcagcacgcagacgatgccgaacgggatggccccccacagcaggaacgggcggaactggccgtgccgcgtgcgggtgcggtctaccagcagccccatcagcgggtcggtgacggcgtcgagcacgcgggagaccaaaaacagcgtgcccataatccccgccgacaggccgaagacgtcggtgtagaaataggccagcaggaacatcgtggcctgccagacgaagccgcaggcggtgtctcccagcccgtagccaattttgtcggcgttaattacctcgataattttatcggtgtcataaatacagcctttccaggtgccgccgctcaccgactgcagtgccgcccacagccgggtgtcgtccggcaaaaagtcgtgggcgtgcaggtccgggtgcgtctgccgccgcgccagctcgcgcgcgccctcttccggcgtcagcgggttgtccgcggtgccgatgaagttcacgctgccagttaacgtcagacgatccagcgggcatatctctgatgatgtcgttatcgcgcagcttgccaatcggcccgcccgccagcgcctccggcgacacgttggcctgaatgcagtgacgtcccttcgacacgcccgagaagcgcgcatcggtgatgagcgacaccgtcttgccccacgatgatatggtttcaaccagcggtaagccgactacggcgtgatagctgccatttatcttcctgacaaaacagccacccagcccctgaataccgtatgcacctgctttatctaacggttcatcgctggcgacatagcccgcgatgtcttcgtctgttaacgttctgaaagtcacatcggtgaccaccaggcaatcgagaatgtgctggctgtcggccaacgccactgctgtcatcacctgatgggtctgacccgataatttgcgcaacatctgcgccgcatgctctgcgtcgcgcggtttctccagcacttctccgttcaggataacgatagtatccgcacccagcaccgggagatccttcgccgtttgcgcgacacctgcccgtgctttctcgcgcgccagacgcacaacatactgctgcgcgctctcctgcggctgacgctgctcctcaatgcccgtaacaatacgttcaaaggtcacgccaagttgcgcaagtaactcctgacgacgcggagaaccggaagctgcatagatatcaaagcgatgccctttagtgactaccgcgtttggcgtggcgacattcgccagcggtggcgcgtagtccgggcgctttaccaccacgcgtttggtcgccagcaagcgtgcaggctccagtaatccatcggcatcaagatccggtcccaccagcgactgaaagacacgcatctcttttttcactagcgcgcttttctgcttatgcgggaacatcgggtcgagataaaccacctgcgggcgcggggtaatatcagtcagcgccgtcagggggaaccggatttgtgttgggcacatccataagacgcgccagcgtcgcatcaggcatcggagcacaactgccggattcggcgtgaacgccttatccgatctacgggcctcgtccctgttgtgataaaccaggcgggcaacatctttcat

SEQ ID NO: 142888 - DNA, 3072 bp, Homo sapiens
atgctcaacctgcgcgacctcggcctgctgcatctggacgccatgaccgtgaccggccagacggtgggcgagaaccttgaatggtggcaggcgtccgagcgccgggcgcgcttccgccagtgcctgcgcgagcaggacggcgtagagccggatgacgtgatcctgccgccggagaaggcaaaagcgaaagggctgacctcgacggtctgcttcccgacgggcaacatcgcgccggaaggttcggtgatcaaggccacggcgatcgacccgtcggtggtgggcgaagatggcgtataccaccacaccggccgggtgcgggtgtttgtctcggaagcgcaggcgatcaaggcgatcaagcgggaagagattgtgcagggcgatatcatggtggtgatcggcggcgggccgtccggcaccggcatggaagagacctaccagctcacctccgcgctaaagcatatctcgtggggcaagacggtgtcgctcatcaccgatgcgcgcttctcgggcgtgtcgacgggcgcctgcttcggccacgtgtcgccggaggcgctggcgggcgggccgattggcaagctgcgcgataacgacatcatcgagattgccgtggatcgtctgacgttaactggcagcgtgaacttcatcggcaccgcggacaacccgctgacgccggaagagggcgcgcgcgagctggcgcggcggcagacgcacccggacctgcacgcccacgactttttgccggacgacacccggctgtgggcggcactgcagtcggtgagcggcggcacctggaaaggctgtatttatgacaccgataaaattatcgagggaataccaatcggtaaaagtgggagacaatccatgggtggactgcccatgaaggggggtaccatcatgttcgatacggatattcttgctgcgacgctcgcggaggaatatatcagcgtcgatacgctggttgtcggcgcgggtgactacacctggaaaggccgtaactatcaggtaaacgggacgggcgacgtgcttatcgacgtgcctaaaccgtggaatgatcccatggcgaataaccctctgacgacgctcaatttgctggaacacgacgatagccatgtcggcgttcaactggtgaaggcgcaaacggttattgggtcgggtggctcattaacgttacgtgatttacagggcgacgaggtggaagcggacaaaacgttacacattgcgcaaaacggaacggtggtcgccgagggtgattatggattccgcctcacgaccgcaccaggtaatggtttgtacgttaactatgggctgaaagcgctgaacatccatggtgggcaaaagctgacgttagccgaacatggcggagcctatggcgcaacggccgatatgtcggcaaaaatcggtggtgaaggggatctggcaatcaatacggtgcgacaggtttcgctttccaacggtcagaacgactatcagggggcaacctacgttcagatggggacattacgtaccgatgcggatggtgcacttggcaacacccgggaactgaacatcagcaacgcggccatcgtcgatcttaatggatcgacgcagacggtagagacattcaccgggcagatgggttcgactgttttgttcaaagagggggcgctgacggtaaataaaggtgggatcagtcagggtgaactgacaggtggcggaaacctgaatgttacagggggaacgctggctatcgaggggcttaatgcacgctacaatgcgttaaccagcattagcccaaatgcggaagtcagctcgataatctcccggttgttaggcatcgcggtgaccttccgcgagccgctaacaatgcaacatgagcgattagcgaaagcggtatcgatgaccgatttcctgatgctggcacttccttgccatgcacaagtcaatgctgaaaaactcaagcaagatggtatcggcgcgtgtctgctgaaaccattaacacctacacgcctgttgcctgccctgacggaattttgtcatcacaaacaaaacacgcttttgcctgtaaccgatgaaagtaagctggcaatgacagtcatggcggttgatgacaaccccgctaacctgaaacttatcggcgcattgctggaagatatggtgcaacatgtggaactttgcgatagcgggcatcaggcggttgaacgggcgaaacagatgccgttcgatttgatcttaatggatattcaaatgccggacatggatggcattcgggcctgcgaactcatccaccaactcccgcatcagcaacaaacgccggttatcgcggtaacggcgcatgcaatggccgggcaaaaagagaagctgcttggcgcagggatgagcgattatctggcgaaaccgattgcagaagagcgattgcataattggttgttgcgctacaagcctggcagcggtatttcctctcgcgtcgtgacgcccgaagtcaacgaaattgtggtgaacccgaatgcgaccctcgactggcaactggcactacgccaggcagcaggaaaaaccgatttagcgcgcgatatgctgcaaatgttactcgatttcctgcctgaagttcgcaacaaagttgaggaacagctggttggagaaaacccggaaggcctggttgatttgattcataaactgcatggcagttgcggctatagcggtgtgccacgtatgaagaatctctgccaactgatcgaacaacagctacgtagcggtactaaagaagaagatttggaaccggagctgctggaactgttggacgagatggataatgtcgcgcgcgaagccagcaaaattctcggccaggaatcagatactgcattcccatcgcatcgtcacgcgcgccaagcccgtgtatctgatacagctcatgggctttcatcacttgatccatatcgatttctaaacccaggccccggttttctggcacctgtaccaacccgccttgatctcaacggtcttgggcaagagctattgcctccgggaaatccaggcgatcatagcgcatatacccgggaaaggggagatgtaatagccggaagtaaaacgggtaaatag

SEQ ID NO: 142889 - DNA, 1869 bp, Homo sapiens
ttaaacaacccgtatgccggacaatatgcgccagcatcgcatccggcacgatccccaaaacctggcgcttatctggccgtgtttttctaaaatctcgataatctgccgatccgtttgctgcatcgaatggcttgctaacgcacacaggttggcaatcgactgctcaacatcatgcgccacaatcccttcattgccggtcacggcggtatcatccagcgccattaacaccgctttccacgcagccgaagcactggtcgaaaccttcatcgcgcagctgttcgacgcaccatcgcaaatcatgccgctgacatcgccgatcatactgctgatcgccatcgagatggtttcataacgcccatccaccagccatgccatcccggcggcggcccccattgctgcggtcgttgcggcacacagcgcagacaaacgcggtaactgggtatggatgtaaattgcgctcaaatgcgaaagcatcagcgcacgcgccagccgttcatcatccgctccgaagtgttctgctaccaccaccacaggcattgttccgtaatccctggttaccgagcccgagttactcatagccggaagcgtagcgccgcccatacgcgcatcggatgccgcgctggtacgaatcacaatggatgaagagagatctttcgccagcaaaccgcgctcgcacgccacgcgcaggtagtagtagaggccgattgccgaaccgacaaccacggcacccaccagccaccacaagtgtgcctggacaccgaccgccagcacgtagaacttaccgataaagcccagcgtcatcgggataccggccagagacagcatcatcaccgtcatcactgccgcgaggatcggacgatgccagaacagaccgcggtaagagaacagggaatcagcatccgggccacgatacgggctggacatcaggctgaccacgccgaacgcgccgaggctgcgcttccatcgacatctcgccggtttgcaggcaatcagcgctaccagcagatagccgaggtgagagatagatgagtaaccgagcagacgtttgatattggtctggctcagcgccatcaggttaccgaagatgatggaggcaaaggcgataatcgccagcaccacgcgaatcgcttcgctgtcacccaccggtgcgtagaggaacagacgcatcaccacgaccataagtcgtttttgctcacgaatatcagaccagtcaacaagtacaatgggcatcgtattgcccgaacagataaagctagcatgccaacggtatacagcgagtcgctctttgtggaggtgacgattacctaacaatcggtcgattcgtttgatgttatgttttgttctcgctttggttggcaggttacggccaagttcggtaagagtgagagttttacagtcaagtaatgcgtgcaagccaacgttaagctgttgagtcgttttaagtgtaattcggggcagaattggtaaagagagtcgtgtaaaatatcgagttcgcacatcttgttgtcttaacttaatgatttttaccaaaatcattaggggattcatctggtgaaagccggaaacatcgacgccgccgtcgagctttctcaccagaccaacaccctgccggaaattaccggacgcgtttgtccgcaagaccgtttgtgtgaaggtgcctgtactattcgcgatgagcacggcgcggtaactatcggcaacattgaacgaccagcccagcactttaccaagccgccagcccgtttcagtgaagcatcgctggttaaagagctggaaaaacgcggtatcggtcgtccgtctacctatgcgtcgatcatttcgaccattcaggatcgtggtaattgaattgtggaagcaggtccttcccat

SEQ ID NO: 142890 - DNA, 1644 bp, Homo sapiens
atgctcattatattttatttaatcatttcggccagcgcccatgctgccggagggatcgcattaggtgccacgcgtattatttatcccgctgatgctaaacagactgcggtatggattagaaatagccataccaatgagcgctttgtggtcaattcgtggattgaaaacagcagcggtgtaaaagaaaagtcattcatcattacaccgccactgtttgttagtgaacccaaaagcgaaaatactttgcgtattatttacaccggtccaccgctggcagcagatcacggtattgaacgcaaactggaaatagaaaaagcggtcactgacgttgcggaactgaacggtgaattacgtaatcggcagtatcttgtcgagcaattaacaaaagcacatgtcaacgatgtgaattttacgccgtttaaatatcagttaagcccgtcattgccagtgaaaaaagacggtccggcgcagccatacgtacggcgttacgtgcgtattccacgaacatcaggaaggtggagtgtacggcaggaagccaccgtgcagggagataccgttagcaatcgcggtcataccgaactcgcgaacaccgtagtggatgtagttacccgcagcatcttcgttgattgctttagaaccagaccacagggtcaggttagacggcgccaggtcagcagaaccgccgaggaattccggcaacagcggaccgaacgcttcgatagcattctgagacgctttacggctggcgattttcgccggattagcctgcagtttagcgatgaactctttcgctttagcgtcgaagtcagacggcatttcgcctttcatacggcgggtaaattcagcggcttcctgcggataagctttcgcgtaagcagcgaatttctcgttccatgcggattctttcgcctggcctgcttctttcgcatcccactgagcatagatttcagacgggatttcgaacggcgcatatttccagcccagttgttcgcgggtcagggcaatttcagcgtcgcccagcggcgcaccgtgggagtcgtgggtaccggctttgttcggggaaccgaaaccgatgatggttttgcacatcagcagggaaggtttgtcagtcactgcgcgcgcttcttctactgcgcgtttgatagatgccgcgtcatgaccgtcgatgtcgcgaataacgtgccagccctaagcttcactacgacctgcaggcatgaaggaaatccggcgctatgggcggcggtgattatgtactgcttctcgctgcgaagaatggcgaatctacgcaaggttcagcgactggcgcaaagtggcgttctggtggtcagcgatcgcttcccgcaggctgaaatttcgggcttttattatgatggaccggggattggcgtcgaaccatgttctctggcgcagcgcgaacggcgtttataccaacaaatggcgcaatatcgcccggaattaattattcgcctgggcattgatattgagactgccatctcccgcaagcctgaccatgactatgccgagctgcaggacaaaatcggtgtcatgtcgaagattggctataacggcacaaaaattcttgagattgattccagagcgccctacagcgaagtgctggaacaggcacagaaggcggtttctctg

SEQ ID NO: 142891 - DNA, 1248 bp, Homo sapiens
atgcctgtggtggtggtagcagaacacttcggagcggatgatgaacggctggcgcgtgcgctgatgctttcgcatttgagcgcaatttacatccataaccagttaccgcgtttgtctgcgctgtgtgccgcaacgaccgcagcaatgggggccgccgccgggatggcatggctggtggatgggcgttatgaaaccatctcgatggcgatcagcagtatgatcggcgatgtcagcggcatgatttgcgatggtgcgtcgaacagctgcgcgatgaaggtttcgaccagtgcttcggctgcgtggaaagcggtgttaatggcgctggatgataccgccgtgaccggcaatgaagggattgtggcgcatgatgttgagcagtcgattgccaacctgtgtaggcaactgtcctacctgggtagcggatgcatccgcaccaaagtggatgatttaccgtctcgtctgaaactcatctatgcgggcgtgacggaaatcatcacccagttccagcctgattatttcgccattgaacaagtctttatggcaaagaacgctgactcagccctgaaactgggccaggcgcgcggcgtggcgattgtggcggcggtgaatcaggagttgccagtatttgaatacgcggcacgtcagcggcgctatctggggctgctctccggcgaagacggcgacaaaatcaaacgattgccgttggttggcgtctggctggaacggcgactggcggccaaatcctcgaaaacccaaagcatgaaaaccaaatctccggcgctatgggcggcggtgattatgtactgcttctcgctgcgaagaatggcgaatctacgcaaggttcagcgactggcgcaaagtggcgttctggtggtcagcgatcgcttcccgcaggctgaaatttcgggcttttattatgatggaccggggattggcgtcgaacgtgcgaccgggaaaatcagcatgtttctggcgcagcgcgaacggcgtttataccaacaaatggcgcaatatcgcccggaattaattattcgcctgggcattgatattgagactgccatctcccgcaagcctgaccatgactatggtaccgacgggtggaaaagttccaagcagggtcgagaggcgcgccggtggcgaccgccagagcgcaaaatgccggaaagcgcggatggcccaggaaccgatcaacggccagtttcccgtataagcactgcggcccaacagggcccctttcccgccgcataa

SEQ ID NO: 142892 - DNA, 1521 bp, Homo sapiens; identical to SEQ ID NO: 142877

SEQ ID NO: 142893 - DNA, 807 bp, Homo sapiens
ctatggctgtgcggtgttttcgggcgcgtcgcccccgctgtcttctgctctgttgtgcgggggggtgttttcttgtcgcgtgtgctcccctctttgtttcttcttctcttcttgctgtgttcgtggtccggcggttcggttgttgcgtgtgggtttgtgcgtttttcccgctcgttgctcggtcgttttttgtttttgttggctcttctccccctcgccgcgccgggtcttgttttgtttgtttgcggttcctgcgcgttctcttgctctgtttgggtggcggtctgtgttttgttttttgtttgttttggtttttttgtggggcctctcttgttttgttcctgtttggtcggtggtgttcgtgtggtgtgtttgtgtggtgtgtttgggcttcttttgtttggcttctgttttctgggcgcttgtctttcctcgtgctgcggccgtttcgttgctaccgaagtcatctgccgctccagcttgcgccatgacgcgcaattcaccgttaaaatcgccaatcggcagtgtaaccgagccttcgccctgttcgttgagcgttaacggagcgccaccacgtttcagctcatcaccatcgccaccgaaacgcagagctgccagacgcccctgaccttcaataacctgaccgtaaatatcgtaaatgtctgcgccatagcgtttctgaccaaagaacgcctgccacggatctggcgtgacgtagtcagtaatattcagcacaccactgtttagcttctcgccatttttagtgctggctttaattttcacggttaatggttgattgggacgcat

SEQ ID NO: 142894 - DNA, 2828 bp, Homo sapiens
atgaagcgttggcaggacaacagcgacggtagcggcgcagtgcgacccgcccgtgtcacgctgaaactggataaagccagttatcgccctggcgacaccattaagttgcatatcgccgcgccaacggcgggtaaaggttatgcgatggtcgagtccagtgaaggcccgctgtggtggcaagagattgatgttcgggctcaagggctggatctgacgattccggtcgataaaacctggaatcgtcatgatctgtatttaagtacgctggtggtacgtcctggcgataaatctcgctccgcgacgccaaaacgcgcggttggtgtgttgcatctgccgcttggcgatgaaaaccgtcgcctcgatctggcgctggaaacaccagcaaaaatgcgtcccaatcaaccattaaccggtgaaaattaaagccagcactaaaaatggcgagaagcctaaacaggtgaatgtgctggtgtctgccgttgatagtggtgtgctgaatattactgactacgtcacgccagatccgtggcaggcgttctttggtcagaaacgctatggcgcagacatttacgatatttacggtcaggttattgaaggtcaggggcgtctggcagctctgcgtttcggtggcgatggtgatgagctgaaacgtggtggtaaaccgccggtcaatcacgtcaatattgtcgtgcagcaggcgctgccggtaacgctcaacgaacagggcgaaggctcggttacactgccgattggcgattttaacggtgaattgcgcgtcatggcgcaagcctggacggcagatgacttcggtagcaacgaaagcctggttgatcgtctgtatgcggcctccagctccggcgtaccggttaatctgctggttcgcggaatgtgttcgctgatccccaatctggaaggcattagcgacaacattcgtgccatcagtattgttgaccgttaccttgaacatgaccgggtttatatttttgaaaatggcggcgataaaaaggtctacctttcttccgccgactggatgacgcgcaatattgattatcgtattgaagtggcgacgccgctgctcgatccgcgcctgaagcagcgggtactggacatcatcgacatattgttcagcgatacggtcaaagcacgttatatcgataaagaactcagtaatcgctacgttccccgcggcaatcgccgcaaagtacgggcgcagttggcgatttatgactacatcaaatcactcgaacaacctgaataaccctatgccaatacacgataaatcccctcgtccgcaggagtttgctgcggtcgatcttggttcaaacagttttcacatggtcatagcccgtgtggtagatggtgccatgcagattattggccgcctgaaacagcgggtgcatctggcggacggcctggggccagataatatgttgagtgaagaggcaatgacgcgcggtttaaactgtctgtcgctgtttgccgaacggctacaagggttttctcctgccagcgtctgtatagttggtacccatacgctgcgtcaggcgctgaacgccactgactttctgaaacgcgcggaaaaggtcattccctacccgattgaaattatttccggtaatgaagaagcccgtctgatttttatgggcgtggaacatacccaaccggaaaaaggtcgcaaactggttattgatattggcggcggatctacggaactggtgattggtgaaaatttcgaacctattctcgttgaaagccgccggatgggttgtgtcagctttgcccagctttattttcctggcggggtcatcaataaagagaattttcagcgcgctcgcatggcggcagcacaaaaactggaaactttaacctggcaattccgtattcagggctggaacgttgcaatgggcgcttccggtaccataaaagccgcccatgaagtgttaatggaaatgggcgagaaagacgggataattaccccggaacgtctggaaaaactggtaaaagaagttttacgtcaccgtaatttcgcatcgctgagtttaccgggtctttccgaagagcggaaaacagtcttcgttccgggactggcgattttatgcggtgtgtttgatgctttagccatccgtgaactgcgcctttctgacggggcgttacgcgaaggcgtactgtatgaaatggaaggacgtttccgtcatcaggatgtgcgtagtcgcaccgccagcagcctcgccaaccagtatcacatcgacagcgaacaggcccgacgggtgctggataccactatgcaaatgtacgaacagtggcgggaacagcaaccgaagctggcgcatccgcaactggaggcgctactgcgatgggccgccatgctgcatgaggtcgggttgaatatcaaccacagcggtttgcatcgccactccgcttatattctgcaaaacagtgacttgccgggttttaatctggaacagcagctgatgatggcgacactggtgcgctatcaccgtaaagcgattaagctcgacgatctaccgcgctttaccttgtttaagaagaaacagttcctgccactgatacagctattgcgccttggcgtattactcaacaatcaacgtcaggcaaccaccacaccgccaacattgacgctgattactgatgacagtcactggacactgcgtttcccgcatgactggtttagtcagaatgcgctgggtgaagaagggattgtggaagctgacagcgctgacggtagtcttatggatgaactgctaacgctgatggcagcacaccgcgtgtggtcacgcattcctaagattgacaaaattcctgcctga

SEQ ID NO: 142895 - DNA, 2316 bp, Homo sapiens
acaaacaaacgacacttttgctgaagcagggctacggctttgttcgtgagcatggcgacgataaagtgctggtcgtctgggcagggcaacagtaacttttccggcttcccgttcgtcagtacctcgggaagccgccaaccaggataaaatgtcagccctaatcagcgttgcaggataaagcaccgctcactcttcaacagaccgatttgcaccccagcaaatgtagcgttattgttaccttccttgctacagagttcgacagatatcccgctatgacattctccctttttggtgacaaatttacccgccactccggcattacgctgttgatggaagatctgaacgacggtttacgcacgcctggcgcgattatgctcggcggcggtaatccggcgcagatcccggaaatgcaggactacttccagacgctactgaccgacatgctggaaagtggcaaagcgactgatgcactgtgtaactacgacggtccacaggggaaaacggagctactcacactgcttgccggaatgctgcgcgagaagttgggttgggatatcgaaccacagaatattgcactaacaaacggcagccagagcgcgtttttctacttatttaacctgtttgccggacgccgtgccgatggtcgggtcaaaaaagtgctgttcccgcttgcaccggaatacattggctatgctgacgccggactggaagaagatctgtttgtctctgcgcctgccatgcttgtgatgagtgaaagccgcgcccatgaattaggtcttaagccgcgcgctcgtgtgcgttcgatggcggtcgttggttgtgacccatcgattatgggttacggcccggttccggcctcgaaactggcgctgaaaaaagcggggctttctgccagcgatatcggcgtgtttgaaatgaacgaagcctttgccgcgcagatcctgccatgtattaaagatctgggactaattgagcagattgacgagaagatcaacctcaacggtggcgcgatcgcgctgggtcatccgctgggttgttccggtgcgcgtatcagcaccacgctgctgaatctgatggaacgcaaagacgttcagtttggtctggcgacgatgtgtatcggtctgggtcagggactggagattggtaccgcgaaggttgccgctttagtaggggaagttctgcccgacggtatggtcaatatcattggcgtgggcagctgcccgtcgcgtggtatggataaaggcggggtgaacgacctcgaatccgtggtcaagtgcgtacaacgcgccattgaccaggcagaattgatggcagattgtcagatctcttcggtatatctggcgctttctggtaagcacatcagctgccagaatgaaattggtatggtgcctatttctgaagaagaagtgacgcaagaagatgtgccggaatctcgtaaccccagcttcagcgttaagtgccgtatcggtgccaacatgatttgggatgccgaaaagcgcggcgtgctgaaaccaggcgttgaactggttgaaccgaccagcgacatccccgagaaaaatggtcagccgtggcgcattgaactttggtgcatcggcaccgatgcgttaagcaaatcgatggcggaaatcattcacgctgatatgcgccagattggcgcagatgtctcgctgtattggcgaagaagagagcagtatctatgctcgtcagcgcgacggtcgttttggcatgattttccaccgcacctggggcgcgccatatgatccacacgccttcctcagttcaatgcgcgtaccgtcacacgctgacttccaggcacagcaaggattagccgacaaaccgctgattgataaagagatcggcgaagtgctggcgacccatgacgaaacgcaacgtcaggcgctgtatcgcgacattctgacccgtctgcatgacgaggcggtttatctgcctatcagttacatctcaatgatggtggtatcaaaaccggagctgggtaacatcccctacgcgccgatcgccaccgaaattccgttcgaacagattaaaccgatgctggcctctacccgcaccatgctgggactggatcagccgctgtacgtccagtacggcacctggttgtggaaggcgctgcatcttgactttggtatcccattcggcggtcggcgcggtcacaccgaggccaaggaaagacatccccgcgacgtgcagcatcatatggccgacatccagcgttgccagcaccagcaccgaagggatcaccgcgcctgccagatgatcgacaaacacccgcacatggcccgcaccggaaagccgtga

SEQ ID NO: 142896 - DNA, 3378 bp, Homo sapiens
atgcctgcgagtgttacgggatcgcgcgagtctgcgtcccgtccgcgtcggtcccatacccggtggggttcacaaagctcaggcggtcccctttttgactggctggtcagccagaacgaactcaaagctaacccggcgaaaggtgtttcggcaccgaaagcgccgcgtcatctgccgaaaaacatcgacgtcgacgatatgaatcggctgctggatattgatatcaatgatcccctcgctgtacgcgaccgtgcaatgctggaagtgatgtacggcgcgggtctgcgtctttctgagctggtggggctggatattaaacacctcgacctggagtctggtgaagtgtgggttatggggaaaggcagcaaagagcgccgcctgccgattggtcgcaacgctgtggcgtggattgagcactggcttgatttgcgcgacctgtttggtagcgaagacgacgcgctttttctgtcgaaactgggcaagcgtatctccgcgcgtaatgtgcagaaacgctttgccgaatggggcataaaacaagggctgaataatcacgttcatccgcataaattacgtcactcgttcgccacgcatatgctggagtcgagcggcgatcttcgtgcgagaggcgcttacctttgtgccaaattattatccggggctgcgcaggttccagaatggagatctgcattcgcctggtttgcccgctgtgccgaacaggcaaggcaaaaccagtacttacaggtcagctcttgcgtacccgccctggaaggctgcgatgttaacggtgccagttttacccttgaacagatgctcgcctggcgggaccatccgcaggttaccggccttgcagaaatgatggactaccctggcgtaattagcgggcagaatgcgctgctcgataaactggatgcatttcgccacctgacgctggacggtcactgcccgggtttgggtggtaaagaacttaacgcctatattactgcgggtattgaaaactgccacgaaagttatcagctggaagaaggacgccggaaattacaactcggcatgtcgttgatgatccgcgaagggtccgctgcccgcaatctcaacgcgctggcaccgttgatcaacgaatttaacagcccgcaatgcatgctctgtaccgatgaccgtaacccgtgggagatcggccatgaaggacacatcgatgccttaattcgccggctgaaatgcattaccgagtttatcgagcaggataccgaagaagcccgccagcaggctacgcgcccgattgaagtgattgaaggcccgttgatggacggcatgaatgtggtcggcgacctgtttggcgaagggaaaatgttcctgccacaggtggtcaaatcggcgcgcgtcatgaaacaggcggtggcctacctcgaaccgtttattgaagccagcaaagagcagggcaaaaccaacggcaagatggtgatcgccaccgtgaagggcgacgtccacgacatcggtaaaaatatcgttggtgtggtgctgcaatgtaacaactacgaaattgtcgatctcggcgttatggtgcctgcggaaaaaattctccgtaccgctaaagaagtgaatgctgatctgattggcctttcggggcttatcacgccgtcgctggacgagatggttaacgtggcgaaagagatggagcgtcagggcttcactattccgttactgattggcggcgcgacgacctcaaaagcgcacacggcggtgaaaatcgagcagaactacagcggcccgacggtgtatgtgcagaatgcctcgcgtaccgttggtgtggtggcggcgctgctttccgatacccagcgtgatgattttgtcgctcgtacccgcaagagtcgaaacccaggcggtacagctaacgcacaatctaccttcgagcaaaaagcggcaaatccctttgataataacaatgatggtctgccggatttaggcatggctcccgaaaatcatgatggggaaaaacactttgctgaaattgtgaaagatttcggcgaaaccagtatgaatgataacgggctggatactggcgagcaggcaaaagctttcgcattgggaaaagtccgcgaatggtggtcgatgccggacaatgacattcgccgccgaagaaccgcaaggcattcacgcctgaaagagaatctgccgctgattacgctaatcgtgatgatggcaatcagctggggtctggagcagttcaatcatccgttcgggcaactggcgtttatcgcgaccacgctggttgggctgtacccgattgctcgtcaggcattacggttgatcaaatccggcagctacttcgccattgaaaccttaatgagcgtagccgctattggtgcactgtttattggcgcaacggctgaagctgcgatggtgttgctgctgtttttgattggtgaacgactggaaggctgggccgccagccgcgcgctgtggcgattaacagccatagcgccacccttgggacagcaactggttggcactctcgcacacgttccgccgttcttcctgatgatggcaggtctggcggtttacgcggtgctgtttgcgggctggtcaagtaacaacaaatactcgttgctgggtgcgatgcgtgcttctgcgcagaccctgagctacgaagtgttcctcgggctttccttgatgggcgtggtggcgcaggccggttcattcaacatgaccgacatcgtcaacagccaggcgcatgtgtggaacgttatcccgcaattctttggttttattacctttgccatcgcgggcgtggcggtatgtcaccgtcacccgtttgaccagccggaagccgagcaggaactggcggatggttaccacattgaatattccggtatgaagttcggtctgttcttcgtgggtgagtacatcgggattgtgaccatctctgcattgatggtgacgctgttcttcggtggctggcaaggcccgttgttaccgccattcatctggttcgcgctgaaaaccgcgttctttatgatgatgttcattttgattcgtaatgtccttcggctggaaaatctgcctgccgctgacgctgatcaacttgctggtaacggcggctgtcattctctggcaggcgcaataaggggcaataagaccatgaccttaaaagaattgttagtaggtttcggcacccaggttcgtagtatctggatgatcggcctgcacgcgttcgccaaacgcgaaacgcgaatgtacccggaagagccggtctatctgccgccccgttatcgtggtcgtatcgttctgacccgcgacccggacggcgaagagcgttgcgtagcctgtaacctctgcgcggtagcctgcccgtcggctgtatctcgatgcaaaagcagaggatag

SEQ ID NO: 142897 - DNA, 3117 bp, Homo sapiens; identical to SEQ ID NO: 123281

SEQ ID NO: 142898 - DNA, 3069 bp, Homo sapiens
atggtggcgatgcactttcagtcaccgactggtgtggaagcgtcattcgcgcatttgtggaatgacggcggctggttcccgaaagggttaagtgggttctttgccggattccagatagcgggtttcgctttcgtggggattgagctggtaggtacaacagctgcggaaaccaaagatccagagaaatcactggcacgcgcgattaactccattccgatccgtatcattatgttctacgtcttcgcgctgattgtgattatgtccgtgacgccgtggagttcggtagtcccggagaaaagcccgtttgttgaactgttcgtgttggtagggctgcctgctgccgcaagcgtgatcaactttgtggtgctgacctctgcggcgtcttccgctaacagcggcgtcttctctaccagccgtatgctgtttggtctggcgcaggaaggtgtggcaccgaaagcgttcgctaaactttctaagcgcgcagtacccgcgaaagggctgacgttctcgtgtatctgtctgctcggcggcgtggtgatgttgtatgtgaatcctagtgtgattggcgcgttcacgatgattacaaccgtttccgcgatatctgtttatgttcgtctggacgattatcctttggtcgtaacttttgtatctgaaacaggcgtcctcatctacatgagaagtcgcactacaagatgccgatcggcaagcagatgtgctggacggcatcgcgaaaacggcgggaccgggaaaacgcacacagcgaggggagcccggagttacacccccaccggcaataagagagggggtccaagtaacgaatatccgtggcacgaacgttttattacctttgccatcgcgggcgtggcggtatgtcaccgtcacccgtttgaccagccggaagccgagcaggaactggcggatggttaccacattgaatattccggtatgaagttcggtctgttcttcgtgggtaatgtccttcggctggaaaatctgcctgccgctgacgctgatcaacttgctggtaacggcggctgtcattctctggcaggcgcaataaggggcaataagaccatgaccttaaaagaattgttagtaggtttcggcacccaggttcgtagtatctggatgatcggcctgcacgcgttcgccaaacgcgaaacgcgaatgtacccggaagagccggtctatctgccgccccgttatcgtggtcgtatcgttctgacccgcgacccggacggcgaagagcgttgcgtagcctgtaacctctgcgcggcactaaccccaaggcgggacacagactcactgagcataccagcatcaagctgtgcacaagaaatctacaagcgacattcagcggaaattcgcccttctgtgggaacttccaatgccgagccacacacatctagtctggtgttctctcctatctttctgtcgcgcaactatctctttctgtgtgtgtatcacgatcaagaagaaccgcgcgaagagagacgaacgaatgagaacaaagaagaggagagagagaaaagggggacaggcatgcagagaagagaacgaaagcggcagacagcggaacacagccgagacgaggagggagcaataggagagcgaagagcagaggcgcagcgagagaaggcgaggagacgcaggacagccgcaagagacagcgggacgcacaagacagcgaaagaagaccacaggagaggggaaggacgcgcagcccagaacgaacgagaagaagaggagagagggcgaaaagacgaagcagagagaaacggagggaagaggagcgaacgagagagaaggcagagacagatgctgagacaaaagagcagagaagaacaccgaaacccctccactctgggttcgcctctcccggaggatccaacaaaggaccggtccatcaactgcaactcccacgcagtgaccacggctcctcaggacccacctggctacccaccccacggaaggttacgggaattcggtcacgagggaattaccattttagaagaccaaataagagctcgagatcaggcggccacaggaactaactttgcagtacacgagataaacatcaaacacctacaaggagttggagatcttcgaggaagagtagccagaacacaccgcaccaccgccacaacccgcatcccaccccacccacaccaagacacagacagcacacgcaaatatcgaccggtccaccttcattatgaactgagacaacagcgttcacacctttccagagcctactacatcgtattaatcagtttcaaaggcaaccctggtgaccctgctcttaggtctctgttgtctcgagttgttgcacagtatgctcaacgaaatgcaaagattcaagatcaacaagaagctattgactggcttctcggtctagctgtgaggcttgaatatggagataatgctgaaaaatacaaggacttagtacctgattatgcaaaaactgctgacaatgcaactaaaaatgcagaaccattgatcaatttggatgtaaataatcctgatgttaaggctgatgtcaatcatggaaaatgtgagagagaagagaagagcaatactgaaaaagtttccccgtgccacacctactcgcaggtgtcttggcagggaatccaggagcaaatgccttcaaaacgccaagaactttggccatcaaatgaatgtgcaggtgtctactatagtgttaaaaatgttataaaggtattgatccacaccaatttccatcttgccattagatgtgattcaagcattgtgaagctttctggagacattcacttattcaggcaagagcaccagcaaattgagaaagccattcaagaattcgtgcccgccctggaaactctttccaagaacttggacatgaagggaaggggcctgccccaacctgatgaatccagaaccacaccacaacaggcctgtcacggatgcccgatcccactcaaagaaccatactcctcaagccgtgagaacaccaaagaacgtcaggctgaagctgatctccgctctcctgcagcacagacggaacccccaaacaacatctgggccctctga

SEQ ID NO: 142899 - DNA, 2229 bp, Homo sapiens; identical to SEQ ID NO: 131800

SEQ ID NO: 142900 - DNA, 2265 bp, Homo sapiens
tcagttgattagatctcttttttctgcgccgacatctacgccacgggtaggttcatcaaggatcaacactttggggcgtgtcatcagaccgcgggcaatcgccactttttgctgattgccaccggaaagcagaccaattgcctgttccatcgacggagttttcacattaaacagacgaatgaaatcactcacagcctgctgttcatcggcatgcttcaaactgccgccagcgcggctgaagtagcgcagcgctgtcagcgacatgttctcttttactgacatgcccaacactaaaccgtcacgtttacggtcttcggagatatacacaatgccgtttgccaggccatcctgcggtgaacgggtaacgacttcatgcccatccagggtgacgtaaccgctggtgcgcggtagtgcgccgtagagcactttcatcagttcggtacgacctgcgcccatcaaaccagagacgccaagaatttcgcctttgcgtaaagtaaaagagacatcgttaacgccaggtccgcagagattatcgactttcaggcggatatctcccggcgctttgtccaggtgcggatattgatcttccagcttgcgaaccaccatcatctcaatcagcgaatcttcggtcagtgatgccacttcgcgctcagcaataaattggccatcacgaaaaacggtaacgtcatcgcaaatctcgaagatttctttcatgcggggggagatatcgaccataccgcgggcttgcgaattcagtccgcggataagcggaccaggatccggtcgcgataggccagggcatcgtcgggtcacccatagaaaactcgagtcaagcacacgcgtccgcgttatgaccaggtaatgtccttcggctggaaaatctgcctgccgctgacgctgatcaacttgctggtaacggcggctgtcattctccaggttcgtagtatctggatgatcggcctgcacgcgttcgccaaacgcgaaacgcgaatgtacccggaagagccggtctatctgccgccccgttatcgtggtcgtatcgttctgacccgcgacccggacggcgaagagcgttgcgtagcctgtaacctctgcgcggtagcctggccggtcggctgtatctcgctggtgagttagctcgtgtaccgctactttgtgctggatttggcccgcccgataaaacggtttatccccaaggatcgtcgcccgatgcattatccgtcgctgtggcaggtaatcggcattggcatagtgctgggtcacgcggttatcccaaatcgcaatatcatttggttgccagcgccagcgcacctgaaactccggtttggtgatatgggcaaacaaaaaacttaacaaggcttcgctctctttctcgctcacatcaacaattcgcgtagtaaagccttcattcacaaacagcgcctgtttaccgctcaccggatgcgttcgcaccaccggatgtagcaacggcgggtttttcgcgaccgcctcgcgccagcgttgatgttccggccaaggccccaactcaggcagctggcggaagggaacagagagcgcctcataggccgcaataccgctggtccagagcgtatcacggcggtcgaaggtactctttagctgcagaatcgccctgcgggtggcgttcataatgtccatcggatgcagtgtcgtatctggcgaaatcgtatggtacagccgatgattcgtaaccagttgtgatgccacttcatgggctttttcacgcccaaccaacaggtcgataattttcagaccaaagtcgatagctgtacccggcccctggctggtcagcaattttacccgtgcatcccagacgacgcgcttgtccagccattgttcggcgggaattttgtctttcagcgtcgggaagccggtcatattaccaatcgggaagatatcgtgcggcaccagcacggtggctggcgcggcgcaaatagccgcgacgatacgcccggaacggtggaactgtttaacggtttcaaccagcagagtgctatcgcgaaaacactccgcgcctttaatgccaccaggcagcacgatcacgtcatattcgccatcagccacttcgaccagcggcgcatccgccagcagcttcacgccgcgcgagcaggtaatcgccaggttaccatcgctggcgacgctggcagtggtgactttgataccgccgcgaaccagcagatcgatagtggtgacggcttcagtctcttcactaccaggggcgaggcaaaccagtgccgatgcgctcat

SEQ ID NO: 142901 - DNA, 1538 bp, Homo sapiens
atgacgaccacgttgcgctggagattgcgacgggggctgaaaccgcggggaactcggtggagcgagggtctgatgaccttccgggatctgcgccataatggtttcaacgtcttcgatgaagcccatgcgcagcatttcgtcagcttcatccagaaccagaccgctcagtttagagaggtccagagtgccacgtttcaggtggtccagcagacggcccggaggcgcgtaattctggaaaatctgcctgccgctgacgctgatcaacttgctggtaacggcggctgtcattctctggcaggcgcaataaggggcaataagaccatgaccttaaaagaattgttagtaggtttcggcacccaggttcgtagtatctggatgatcggcctgcacgcgttcgccaaacgcgaaacgcgaatgtacccggaagagccggtctatctgccgccccgttatcgtggtcgtatcgttctgacccgcgacccggacggcgaagagcgttgcgtagcctgtaacctctgcgcggtaacccttgccccgggtctcggcttgttattcttcgccttgacaaaaaaagccagaaaaaaccaaagaacggttcgcttggttacccgggaattttttccgcaatcaactttctcacgcttgcatttccgtggtctgtgcgaagaagcctgtccgaccacggcgattcagttaaccccggatttcgaaatgggggaatacaagcgccaggatctggtttacgagaaagaggatctgctgatctccggtccgggcaaatacccggaatataacttctaccggatggcaggtatggcaatcgacggcaaagataagggcgaagcagagaacgaagccaagcctatcgacgtcaagagcctgttaccgtaaggagaggggcaatggagttcgctttttatatctgtggcttgatagccatacttgcgaccttgcgagtgatcacccataccaatccggtacacgcactgctgtacctgattatttcgctgctggcgatttccggggtgttcttctcactgggcgcttacttcgccggtgcgctggaaattatcgtctacgcgggtgccattatggtgctgttcgtgttcgtggtgatgatgctcaacctgggcggttcagaaatcgaacaggaacgccagtggctgaaaccgcaggtgtggattggtccggcaattttgtcgccaatcaagtaggtggggtatggccaggccatcctcggtcttaacgatcagggtatcgacggtacgccaatcagtgctaaagcagtgggtattacgctgttcgggccttacgtactggcggtggaactggcttctatgctgctgctcgcagagcgttctgcgctggctccgtgcgctatcggtgcctgggttggtaacagctttggtgcgggcttctttggtgcactgatcgccgggattatcggcggcatcgtggtgcattacctgaagaaaattccggtgcataaagttctgcgctcggtgatagctgtcagctggtaccatttattcatttag

SEQ ID NO: 142902 - DNA, 3255 bp, Homo sapiens; identical to SEQ ID NO: 129878

SEQ ID NO: 142903 - DNA, 1247 bp, Homo sapiens; identical to SEQ ID NO: 139782

SEQ ID NO: 142904 - DNA, 1413 bp, Homo sapiens
tcaggccagtgtcctaaggacactcagagaacagcagcagcccgacacgagaccgttggtgtctgtctgccgcatggggtgcggacctcggtggtggcctgggtcctggctgggcgagggtgcgccctgccatctcagtgtgaccaccttcatgctgtcactgcatctcctctggcccaggaagctgcccctcggttgagaatcacaccgtgtggtcttctgtaacaggcacttgagccagacatacccatcaacacgcggggctgagtctggtgtttgtaaacgaccgctgtagcaatgtaccgacaaggttgccggtaacattaggatgagctgacaacgcctacctgccatgtggacatgtgttcctgcttttaatcctttcgccgacatgtaatcggccagcggactcccctgaatcaaatcgccgttatcaaccagtacgctgtttttcacttcattgcgggcatcgttaatcaggcttgccgtacgtaccagtccgaatttttccgtggcggtgtctttgtaataatcgaaatccatcatgttgctatgcagatcagtggtttccatgatacgcagatcgaccgtcgctgcattcacactggcggcaatcagcgtggccaggagcgttgcgctaaacttaatcatcagggacatcggaatgcaggcgatgccattatgcaggtctacgacgggacgaaaccgatggacgtcgtcagcaaagcggacaattctccggtaacggcagcggatattgccgctcacaccgtgctgacaccggatgttccggtcctttctgaagaagatcctttcggatgggaagtccgtcacacttggagcgttactggctgatgtgacgcagtcggatgaaccactttgaggatcccccgctgggtccaaggccaaatgcccgcaatccagcccgcgcagaaaacccatcatgtcaaagcgcattccttctgcagttaaccagcgcaatcctcgccagtgaacccggacgatataatcagcttctccaaaagcaagtgagcggatacattcgggacgcgaaccgaatccccggtcagcaatgcgtatctcgtctgccgtttgcgcaaatcggtccagccgttcagcgtctctgctgtcggttagctcaaaatcagtgaactgacaggtatgaggatcatatcccatatgtagtcgccattcagcgctgccgcccccgggcgcactgattgctgttccatcgacaagacgcaatctctttccgcttgtacaacccgtaactgcggcgcgtacagcaagtgtttgtgcggcaagtatgccaaaccagtcggcggcattccgcagccgcttcaggagagccacgtcagataatgttgcaacgtcatggagctgagcccatgcagtgacttcacgtaatgacat

SEQ ID NO: 142905 - DNA, 1479 bp, Homo sapiens
ctacatcgtcaacgttatattttgatagtttgacggtgtaatgtctggtaattcggtggtcttgtccttgccatttcgcaatctgcagattcggatacatctgtcaacgccgctaatcaggttgtttctgttggtgctgatattgcttttgatgccgaccctaaattttttgcctgtctggttcgctttgagtcttcttcggttccgactaccctcccgactgcctatgatgtttatcctttggatggtcgccatgatggtggttattataccgtcaaggactgtgtgactattgacgtccttccccgtacgccgggcaataatgtttatgttggtttcatggtttggtctaactttaccgctactaaatgccgcggattggtttcgctgagtgagggtccgacatttagtctccgtttctcgtcgtctggcgaaaaatatgggcggcgatattacggttaccagcgaacagggcaaaggttcaacctttacgttgacgatccacgcaccgtcggtagcagaagaggtcgatgatgcgtttgatgaagacgatatgcctttaccggcgctgaatgtgtggcgtgtggcatcgtgatcggctttgagtgtttctaccagcttgctgtcttccgccgcgagggattttttattagcgatgtcgtaaatcggtcgtgcttccgctttcgcctgcgtcacctgccatttaccgctgtcattactgagttgtaagtcgaccacaccaagatgatcgccccacatgcctggcattaccgccggaacaccattcagcgtgcctttggcgatatcagccccttcgatatcagcaaaatctttacctgggaaaacggcgtgagcatggccaaacataatggcgttaacgcccggaatttcactgaggtaataaactgagttttccgccatcactttatacggatcggcagatagcccggaatgtgccagaacgacaacaacatcggcacctttctcgcgcatttcaggcacgtatttgcgcacggtttcggtaatatcattcaccgtcactttcccggataaattagctttatcccagcccatgatttgtggtggcacgacgccaatatagccaatcttcagcgtctgtttttttccgtctttatcgaccacttcggtgtctttaattaaatacggtgtaaacattggctgtttggttctggcgtcaatgacgttggcatttacataagggaatttcgctcctgccagcgcatttttcaggtaatccagaccgtagttaaactcctggttgccaagcgttccgacggtatagtccagcgtatcagtcagaatttttccgtgtcggtgtactttgtaataatcgaaatccatcatgttgcaaagcagatcagtggtttccatgataagcagatcgaccgtcgctgcattcacactggcggcaatcagcgtggccaggagcgttgcgctaaacttaatcatcagggacat

SEQ ID NO: 142906 - DNA, 907 bp, Homo sapiens
atgacgcagagccgtttacggtgcttatcgtccctgacagatgtcgcttatgcctcatcagacaccatggacacaacgttgatgaagcacccacttgttgtcatacagacctgtttaacgcctgctccgtataggagtgggggcagtgacgaccattccgttctggcattctatggaagggaactgggtaaagaggtggattctctggcccaacgttttaacgccgaaaaccggattacaaaattgtaccgacctataaaggcaactacgaacagaattaagcgcggggattgccgcatttcgtaccggcaacgcgccggctattttgaggtttatgaagttggcaccgccaccatgatggcgtcgaaagccattaaccggtgtatgacgtgtttaaagaggcagggattcagttcgatgagtcgcgtttgtgccgacggtttcagccattcaacagctcgacccccgttctctattacaacaagacgccttcaagaaagcaggattagacccggaacagccgccgaaaacctgcaggatctggcggactatgccgcgaaactgaaagcctccggcatgaagtgcggctacgccagcggctggcagggctggatccaactggaaaactttaggcctggaacggcatgatgccttacgacgccgatgcgaaagatgcgccacaaaagccattatcggcggagccagcctgtgggtgatgcagggtaaagataaagaacgtataccggtgtggcgaagttcctcgatttcctcgcgaagccagaaacgctgccgagtggcatcagaaaaccggttatctgccaatcaccaaagcgcgtatgacctgacccgtgagcagggcttttatgagaaaaacccaggggggataccgcgacgcgtcagatgctga

SEQ ID NO: 142907 - DNA, 3266 bp, Homo sapiens
tgtagagtttgattcagaccttctatattttcccgcttatccgtgccccatctcccattttccctcacccacgccgtcaccgccttgtcatctttctgacaccttactatcttacaaatgtaacaaaaaagttatttttctgtaattcgagcatgtcatgttaccccgcgagcataaaacgcgtgaattcgcgcattcggtacaacaagagagataaacgatgaaaccgttacattatacagcttcagcactggcgctcggactggcgttaatggggaatgcacaggcagtgacgaccattccgttctggcattctatggaaggggaaccgggtaaagaggtggattctctggcccaacgttttaacgccgaaaacccggattacaaaattgtaccgacctataaaggcaactacgaacagaatttaagcgcggggattgccgcatttcgtaccggcaacgcgccggctattttgcaggtttatgaagttggcaccgccaccatgatggcgtcgaaagccattaaaccggtgtatgacgtgtttaaagaggcagggattcagttcgatgagtcgcagtttgtgccgacggtttcaggttactactccgacagcaaaacgggccacttactctcccagccattcaacagctcgacccccgttctctattacaacaaagacgccttcaagaaagcaggattagacccggaacagcccgccgtaaacgctggcaggatctggcggactatgccgcgaaactgaaagcctccggcatgaagtgcggctacgcacgcggactggcagggctggatccaactggcaaactttagcgcctggaacggtctgccgtttgccagcaaaaacaacggctttgacggcacggacgcggtgctggagttcaataagccggagcaggtgaaacacatcgccatgctcgaggagatgaacaagaagggcgacttcagctacgtcgaggatgcgcttgtggaaaaagccaaacaagttacctggcggctgttggctgccggtgtctgtctgctgacggtcagcagcgtggcgcgagccgactcactggatgagcagcgtagtcgttacgcgcaaatcaagcaggcctgggataatcgacaaatggatgtggtcgaacaaatgatgcctggactgaaggattatccgctttatccctacctggaataccgccagatcaccgatgatctgatgaatcaaccggcggtgacggtcactaactttgttcgcgctaaccccacgcttcctcccgctcgcacgctgcaatctcgtttcgtcaatgaactggcgcggcgtgaagactggcgtggcttgttagcctttagcccggaaaagcccggaactaccgaagcgcaatgtaattactactatgcgaaatggaacaccgggcagagtgaagaagcctggcaaggggcgaaagagctgtggctaaccggcaagagccagcctaacgcctgtgacaagttatttagcgtctggcgtgcgtcaggtaaacaagatccgctggcgtatttagagcgtatccgtctggcgatgaaagcgggtaacacaggcctggtaacagtgctggcagggcagatgcctgccgattaccagactatcgcctcggcaatcatttcactggcgaacaaccctaatacggtactgaccttcgcgcgtacaactggcgcgaacgattttacccgtcaaatggcggcggtggcgtttgccagtgtggcgcggcaggatgctgagaatgcacggctgatgatcccatcgcttgcccaggcgcagcagcttaatgaagatcagattcaggagctgcgcgatatcgtcgcctggcgtctgatgggcaacgatgtcaccgacgagcaggcgaactggcgcgatgacgccattatgcgctcgcaatctacttcgcttattgaacgccgtgtatatcagcacaacattacgtttgcgctggatgactttggtacgggttatgcgacctatcgttacttgcaggcgttcccggtcgattttattaagaatcgatttagcgcaacgctcctggccacgctgattgccgccagtgtgaatgcagcgacggtcgatctgcgtatcatggaaaccactgatctgcatagcaacatgatggatttcgattattacaaagacaccgccacggaaaaattcggactggtacgtacggcaagcctgattaacgatgcccgcaatgaagtgaaaaacagcgtactggttgataacggcgatttgattcaggggagtccgctggccgattacatgtcggcgaaaggattaaaagcaggtgatattcacccggtctataaggcattaaatacgctggactataccgtcggaacgcttggcaaccacgagtttaactacggtctggattacctgaaaaatgcgctggcaggagcgaaattcccttatgtaaatgccaacgtcattgacgccagaaccaaacagccaatgtttacaccgtatttaattaaagacaccgaagtggtcgataaagacggaaaaaaacagacgctgaagattggctatattggcgtcgtgccaccacaaatcatgggctgggataaagctaatttatccgggaaagtgacggtgaatgatattaccgaaaccgtgcgcaaatacgtgcctgaaatgcgcgagaaaggtgccgatggtgttggcgtttcgggcacattccgggctatctgccgatccgtataaagtgatggcggaaaactcagtttattacctcagtgaaattccgggcgttaacgccattatgtttggccatgctcacgccgttttcccaggtaaagattttgctgatatcgaaggggctgatatcgccaaaggcacgctgaatggtgttccggcggtcatgcccggcatgtggggcgatcatcttggtgtggtcgacttaccactcagttatgcaccgcggtcaatggccgctacccaggctaaagcgcgagcccgaacgctctccgccttcgctctctccactccctcgcggcgcaaaccacccgcggcttacacctctccacccatcccgtcgcccacacaaatgccccaacacacccgacactccccacacttcaaccaacacccacacaacaccacccacacaaccaccacccccatcactctttctccatctaagcaccgtcaccacaacactaaccaccccccacacctgcaccacaccacctccatgaagcaaccctcccttggtagacttaccaggactccttactga

SEQ ID NO: 142908 - DNA, 2746 bp, Homo sapiens
ctgtgcccaggtgagattcatccgcatcaatgtatgcaccaggcgaatgccttgtgcattcccctcaaaatgacataagtcctgacgaatcttgcgccgcagctcgttaagcggttcttccccgtcccgtaaacgtagtgccgccacgctgcagcgatcgtcagtcagaggctggctttcggcatcttccgggtgcaaacgttggcgaaaccagtcatttatcgccgcttcgccaaaatgaccaaacggcggattgccgatatcgtgcatcaggcatgacatctcaacaatgctttcaaagggaccggtcagttcatccaggccgtatgcttccagtaatttaagctctttcagacggcttaaaatttctttggcgatgtagcgccccacctgctggacttccatcgagtgggtaagacgcgtgcgcacggcggcattgcgctccagtggaaaaacctgggtcttttgttgcagacgacgaattgccggagagttgatgctgactaaccgacacacgggaggcgtcatggttaccacatttcgggcaagtgaagcctttgctggtgcactcgaactcaccggtaaagccacactcgtagcactcatcaatcggtgtattggtgccgtaatacggtacatgctgatagctgtaatcccagacatcttccagcgccttcaggttgtgctgaatgtttggatactcgccgtagcaaatgaaaccaccgttcgccagcggcgggtaaggcgcttcaaagtcgatcttgtcgtacgggttcaccttcttctccacatcgaggtggaaactgttggtgtagtaacctttatcggtcacgcccggcaccacgccaaactcagcagtatcgagacggcagaagcgatcgcacaggttttcactcggcgtgctgtagagactgaaaccataacccgtttcttctttccactgatccactgcctgacgcagacgttcaacaatggcgatacctttcgcgcgaagctgctcgttgtcgtaaacatgctcgccgccgaacagcgcgttaatggtttcgtggatgccgatgtaacccagcgaaatagacgcacgaccgtttttgaagatttcagaaacatcatcgtcagcattgagacgcacgccacaagcacccggtacgggtaatgcgttggtccgcctgcaatgcgggcatgttctggcgcggtccagccagttcaatggcttcatccgggaaaacttcggcagggtgaaccaagtcgagatctggtgcgtcaaaggccagcagctctttgtctgccacgccgccacaggattctgcgagggtataacggcaatatccagcgccgcctgtacagtacgggcaatggcctgcgggcttaaatcggtggatgatgcgctacctttgcggttctggtgataaacagtgatccccagcgcgccatcgctattgaattcaacattctccacttcaccataacgcgtgcttacgctaatgccggtggtcttgctgacggcaacttccgcaccgtccgatttgcctgaggccaactccagcgcagtggaaactgcttcttccagaatcttgcgctgcgcttcaacttgagagattactttcattgcaagtgccataatgtagagagtttctctgaagtctaacagagaaccgtttttcagtgcgcatcttaactgtcgcagatattgattgatggtcattccagtctgctggcgaaattgctgacgcaaaacgcgctcactgcacgatgcctcatcacaaaatttatccagcgcaaagggacttttcaggctagccgccagccgggtaatcagcttatccagcaacgtttcgctggatgttggcggcaacgaatcactggtgtaacgatggcgattcagcaacatcaccaactgcccgaacagcaactcagccatttcgttagcaaacggcacatgctgactactttcatgctcaagctgaccgataacctgccgcgcctgcgccatccccatgctacctaagcgccagtgtggttgccctgcgctggcgttaaatcccggaatcgccccctgccagtcaagattcagcttcagacgctccgggcaataaataatattctgcaaaaccagatcgttaacggaagcgtaggagtgtttatcgtcagcatgaatgtaaaagagatcgccacgggtaatgcgataagggcgatcgttgagtacatgcaggccattaccgcgccagacaatcaccagctcacaaaaatcatgtgtatgttcagcaaagacatccaatatgatggcggcgttttctaaaacgttggcgctggtgacagcatggtcggcgcgatgacactgaaactggcagaaaatgcctctcttgaagagatggttcgttttggcgtagcagcgtttgtaaacgtgcgccggagcggtattttcaaagccgccgatatcgtggctccagaagccaaaacctgaaaggccaatagacaaaccaccgcgcaggctttccgccattgattcgtagttagcgtaacaatcgccaccccagtgtaccgggaatttctgcgcaccgacggaggccgagcgggcaaacaagacagcttcttcctcaccaacggtgtccttgagcacgttccacaccagttcgttgtagatgtacgcataatggttatgcattttctgcggatcggaaccgtcaaaccactgaacatcagttgggatacgttcgccaaagtcggtcttaaagcaatcaacgcccat

SEQ ID NO: 142909 - DNA, 1510 bp, Homo sapiens
atggctgtgggagggaacttgggagacaacggccagggggctggctacagcggcggagagagaagagagagtaagggagtgaaatggggatgcctggggtgcaggagtagagaaatgccgactaggcgacaagatggaagaacgtgtgtagaagaaatgacactggaggcgggagtgatgaaggggagtcgtgtaaagctggttcaggcgacagatacgagattcggacaaggggaaagtgtaatcctgaaggacgggattgcgggagaacaaagcccgagagactgtaggggaataggccgggagagtcccgccgacacacgtctacccttttcatttacacgttcccttgccacatcggcatccacgaaaccattaacgcgctgttcggcggcgagcatgttacgacaacgagcagcttcgcgcgaaagtttccacctcgatgtggagaagaaggtgaacccgtacgacaagtcgactttgaagcgccttacccgccgctggcgaacggtggtttcatttgtacggcgagtatccaaacattcagcacaacctgaaggcgctggaagatgctgggattacagctatcagcatgtaccgtattacggcaccaatacaccgttgatgagtgctacgagtgtggctttaccgatcttgacccgctgctgtaccagtgccaaactggctcgccgacgctccccagtcggatacggacccctagtgtccattagggcgtccaacccaccctacacggttgatttctgggcacattacaccgtgttttcacccccacacattcacttcatttctgatttatggcaagtttattaccacggatgtcggtacagacaacgcactaccgtgctgcacctgtctagtgtcgccagagctcagctgtgcatccaggaagccgcgcttcacttagtgcttgcacataccgtcgtcgtagaggagatcagacggatcatcgaaatcctggaaactaaagagccttggctagtctccgacacgattgtccctttaacccctccgggaatccgctgttcgtacccagtagccctgtacattcactgtagcgctttagaagttttcttggtacgtgtggaagagccacggtccgaaaacgcgcggaaatacattcatgcgtttcatcgtaacaccataggcggcggttaccaagactggttgaaattcccgaagcaacagtcatgtgctcagtggaacagcgaaaaccagaacgaatactattatggcgtatcgcgcaaagagtccgctcgcatcggtctgcgtggctataacccgaacgacagctggagcccttacctggagctgagcgaccagctgacaagctatctcggcgactggagtgtttacggtaccgcacgctacacccgtctgtctgatgaagttactgacagcccgatggtggataaatcctggactggcctgatttctaccgggatcacctacaaattctgataatgcatctttccagggcatttgtgcataa

SEQ ID NO: 142910 - DNA, 1306 bp, Homo sapiens
atcgggcttatcgcgagtaaatctatgaaaatcggcatcattggtgcaatggaagaagaagttacgctgctgcgtgacaaaatcgaaaaccgtcaaactatcagtctcggcggttgcgaaatctataccggccaactgaatggaaccgagtttgcgcttctgaaatcgggcatcgctaaagtcgctgcggcgctgggtcccactttgctgttggaacactgcaagccagatgtgattattaacaccggttctgccggtggcctggcaccaacgttgaaagtgggcgatatcgttgtctcggacgaagcacgttatcacgacgcggatgtcacggcatttggttatgaatacggtcagttaccaggctgtccggcaggctttaaagctgacgataaactgatcgctgccgctgaggcctgcattgccgaactgaatcttaacgctgtacgtggcctgattgttagcggcgacgctttcatcaacggttctgttggtctggcgaaaatccgccacaacttcccacaggccattgctgtagagatggaagcgacggcaatcgcccatgtctgccacaatttcaacgtcccgtttgttgtcgtacgcgccatctccgacgtggccgatcaacagtctcatcttagcttcgatgagttcctggctgttgccgctaaacagtccagcctgatggttgagtcactgtcactgttcagggcgctggtcgccctgtcttttcttgcgccactgtggctcaaccccggcgccgcgcgtcatcacgctttctcccgccaacactgaacttgcctttgccgccgggatcacgccggttggggtcagcagctattccgactatcctccacaagcgcaaaagattgagcaggtttccacctggcaggggatgaatctggaacgcattgtcgcgctgaaacccgatctggtgattgcctggcgtggaggtaatgccgagcggcaggttgaccagctggcttcgctgggaataaaagtgatgtgggtcgatgcgacaagcattgaacaaattgccaatgcgttacgtcaactggccccctggagtccgcaaccagacaaggccgaacaagccgcgcaatccctgctggatcagtacgcgcaattgaaagcgcaatatgctgataaacctaaaaaacgtgtttttctgcaattcggcattaatccgccatttaccagtggaaaagagtcgattcagaaccaggtactcgaagtttgtggcggagaaaacatctttaaagacagccgggttcctgtccgcaagttagccgcgaacaggtgttag

SEQ ID NO: 142911 - DNA, 1023 bp, Homo sapiens
atgcgtactcgagagaatatcgtcggcaacctgcggatcgttaatccggtttgtggttaccagcggcagcgagacgtggcctttcagtttgcgcgtgacccagctaaatgcgccgcgcggcacgggcgtggcaatggtcggaatacgtgcttcatgccagccaatgccggtgttgataatggtcgcgcccgccgcttcaactgcctgcgccagctctaccgtttcggcaaaagtcccgccgtcttcgaccaggtcgagcatcgacagtcggtagataataatgaagtcgttgccgacggttcgcgcaccgcacgcactacttctacggcaaatcgcatccggttgcggctggccaaaatccgtgacagcattcagggtcatataatccggcgagctgacagaaagtacattgccgagcgtcaaaattgccatcaggaaaatcatagcacatacgacgggcacgaagagcaaatcacccgcacatcggcctgtggacggttcttcgcaagccagcgacgcatcgacatacactgcgtgacgccgcagcctgccgccagcaacaggaatttatcttctgctttatcgtcgcagaggatcccgcgggtactcgaggcgagaattcatctgccactgacgccgcgaacctgcgcaaaatcgtgcctccaccactatgacgtacaaagtgcagctgatgacaccggtttaccaatgctggtcgtacgcgggccgttcaatgtggtttggcaacgtctgccagcggcgctggaaaaagtgggcatgaaagtgaccgacagcacccgttcgcagggcaacatggccgtaacttataagccgctgtctgacagcgactggcaggaactgggcgcgagcgatccaggcctggcatccggtgactataaactgcaggttggcgatttagataaccgcagcagcctacagttcatcgatccgaaaggtcatactctgactcagagtcagaacgacgcgctggtagctgtcttccaggctgcgtttagcaagtaa

SEQ ID NO: 142912 - DNA, 1525 bp, Homo sapiens
  misc_feature (1)...(1525): n = a,t,c or g
tcagcaggggatggcgcgcgcattgagcagtttgatcgcaaaggtatggtgaacaacaagttcaactacttcattatgagcaaactggctgaagcgggtatcccgactcaaatggagcgtttgcttctccgataccgaatgtctggtgaaaaagctggatatggtgccggttgagtgtgtcgtgcgtaaccgtgctgctggctctctggtgaaacgtcttggaatcgaagaaggtatttgagctgaacccgccgctgttcgatctgttcctgaaaaacgacgccatgcacgatccgatggtcaacgaattcttactgcgaaacctttggctgggtgagcaaagagaacctggcgcgtatgaaagagctgacctacaaagcgaacgacgtgctgaaaaaactgttcgatgatgctggtctgattctggtcgacttcaagctggaatttggtcctgtacaaggcgaagtggtactgggtgatgagttctcccggacggtagccgcctgtgggnacaagaaacgctggagaaaatggacaaagacggtttccgccagagccttcggtgggctgatcggagcctatgaagccgtcgcccgccgcttgggttacacttgacttattttcctgtccacatcttgcgtgcactggcacggaaacaacggtctcggatatatcatgacagtcatcttcgcatttatcagttcctgtgtacttctctgacatgtcagctgcagggccaaaatgcagccgcgctaaagctgcggtcagcgccggaaggatcttcacggcgtcgccaacaatgccgtaatccgcgtactggaagatcggcgcatttttatctttattgatggcgaaaatggtttgcgacgcgttagcgccaaccatgtgctggatctgcccggagatccccaccgccaggtacagttcaggtttcagcatcaggttggagataccgacatagcgttcgtgctccatccatttttcgttttccgccaccggacgagaacaggccaactccgcacctatcgccttgcaaagctgttctgccagcgcaatgttctctttgctgccaataccgcgaccgacgctgaccaccagacgggctttgtcgagatcgacgctgttgctctggcgcgcctgggttgccgtgcgggtaatcgccacagccggagcctgccactccacggtgtgcgtttcgccagtgcgtgacgcgtctggctgagccgcatcgaacgtgccgctgctgatggtcagtaccgcatacggcgtggcaatgcgttcttcgccaatcgccagaccaccgtaaaccatgtgtttcactgtcgctttaccgtcctgtacgctgacggtgctggcatcgttagacaccgccgctttaaggcgataacccagttttgccgccagtaatttgccgcgacgggtgtttggcagcagcaccaggccgtctgcgccgtgctggcgaatagtgtcagccatgacaccggcgtaatcttcgatcatccgatcgtccgggttgccggttaat

SEQ ID NO: 142913 - DNA, 1005 bp, Homo sapiens
atgtgtctgaaccggccagtcaaagggttgcgcaagtgcgcaacggcgctggaaaaatggcaagaagtgaccgacagcacccgttcgcagggcaacatggccgtaacttataagccgctgtctgacagcgactgccaggaactgggcgcgagcgatccaggcctggcatccggtgactataaactgcaggttggcgatttagataaccgcagcagcctacagttcatcgatccgaaaggagtgataaagatgcaaaagcaagctgagttgtatcgtggtaaagcgaaaaccgtatacagcacggaaaacccggacctgttggtgctcgaattccgcaatgatacgtcagcaggggatggcgcgcgcattgagcagtttgatcgcaaaggtatggtgaacaacaagttcaactacttcattatgagcaaactggctgaagcgggtatcccgactcaaatggagcgtctgctctccgataccgaatgtctggtgaaaaagctggatatggtgccggttgagtgtgtcgtgcgtaaccgtgctgctggctctctggtgaaacgtcttggaatcgaagaagccgaggcagccgctgcggcactgaagaagaaagcggaagcggcagaagcagctgcagctgaagcaagaaagaaagcggcaactgaaactgctgaaaaagccaaagcacaagctgataaaaaagcggctgctgaaaaggctgcagctgataagaaagcggcagcagagaaagctgcgaccgacaaaaaagcagcagaaaaagcggatgctgaaaaggcagcagctgataatatagcagcggctgaaaaagccgccgcagacaaaaaagtcaacaactcgttgcgattcatgcgatcgataaacgagtccgcgctgtttgtgcgccgggcgctggtcgcctttttggggattttgctgctgaccggcgtgcttatcgccaacctgtataatctgcaaattgttcgctttaccgactaccagacccgctaa

SEQ ID NO: 142914 - DNA, 422 bp, Homo sapiens
ttaaacgtagaaatcctcggcgagtttgatgatgccgctttgatgaaagcttttggtgcgatgcacaatgcaatcttcgttgccccaacgctttatgcatatgacttttatgccgataaaacactggtaccgttgaccgatgcactggcgaatacgtggcaaaagcagttcccgcttgattacggcaaagggcgactgtggggctcggtggcgtttgtcattggctcggcgctgacgggcaaactggtcactatgtttgattatcgggtgatcctcgcgctgttgacgttgggcgtggcatccatgctgctcggctttctcatccgtccgacgattcagccacaaggggcaagtctccagcaggagagcaccggttggtctgcgtggttggcgctggttcgccagaactggcgctttctggc

SEQ ID NO: 142915 - DNA, 1740 bp, Homo sapiens; identical to SEQ ID NO: 138521

SEQ ID NO: 142916 - DNA, 1452 bp, Homo sapiens; identical to SEQ ID NO: 129927

SEQ ID NO: 142917 - DNA, 298 bp, Homo sapiens
ctgaaacaaccacagaccccgccggaacgcgaccgtagtggatttcgccggttcacggtcgtaaatacgggtgctctgaccattgtatacgcccatggaaatgaccggaacttcttcgaaaatccagccgcggtaatacggagggtgcaagcgttaatcggaattactgggaactgcatctgatactggcaagcttgagtctcgtagaggggggtagaattccaggtgtagcggtgaaatgcgtagagatctggaggaataccggtggcgaaggcggccccctggacgaagactgacg

SEQ ID NO: 142918 - DNA, 870 bp, Homo sapiens
ctaggcgcacgtgtcgcgtaaatagcaccggagcccacctcggtacactgttaggatcgcccccaacgcaatcgagctaccctgatgcaactctactctagaggatcccccggaatcagaaggctggaacatcgcttcgagaaggtgcagggcaaaccaggctttgaggtattcatcccaggctttaagcagggtaaactcggtagaccattgggtgttaaagcactcgtcttcggcatcgatacagggcttttccagctccaggcggtcaagaatttggacggtttttagttcgatgaagcgtccgccagtcagccaggaagtgacaatattttgcgcgagctgcgtgtgcgggccaccggcagggccgacgggagtggcacaggtttcaccgaagacgctaacagttttacctcttacaggtgagtaaaactgttgctcgggaataccaaagattgaaccgtgttggtggtattcatcaaatatgcgcggcaaaaggttctgagcactaatgttatggtacctttgtaggctcctgacctgtaacatttcagcctcttttgtaaatgccatcgacgaaatggtgtgcatggtgttcagatgaccaataacccgctgtaaatgctgctccagcgtacctgccgcgccttcgtgcggctgcatctccggcgcatccatgatattggcatcgccagaactacccggttcgtcatactccagtcgctgctgacaacgctgaatggcgatttcacaagactgtaaatactcttgtgccagttcaggtggcaatgcccggtgttcccgcgccagcgtggtcatggcattaatatgctcaacaataaactggctgtgcgttacccacagtttcat

SEQ ID NO: 142919 - DNA, 2343 bp, Homo sapiens
atggtccttttcggcaatgtgttcggtactgggggcttggcccttgtgtattaccgcatacaaaagactttttccagggctttgtattaccagttggcattggagcaggtgcatagccatcccaaggcacagggagctctgggccctcttctcaacattcactgtctcaaactcaccaagcacaactttgtggacattgctgatgccaagttgaagattcctagctctggatccaagtcagagggccatctccattcttccttttttcatcaacatgggtgttccaccaatgacaccaatgccaagtacaacagtcgtgctgctcagctctatagggagaaaatcaaatcgctcgcctctcaagcaacacggaagcatggcactgatgtgagtgacacagcgtgggcatcagcaatagcagaaccatcttctttaacatcaaggcctgtggaaaccactttggaaaataatgaagtcgaagtatttattaccgtaacccgcgatgaaaagcttatcgcgtgcggtggaattgccggaaatattattaaatgcgttgctatcagtgaatccgtccgcggtgaaggactggcgctgacattagccactgaattgataaacctcgcctatgagcggcacagcacgcatctgtttatttataccaaaaccgaatacgaggcgctgttccgccagtgcggtttttccacgctgaccagcgtacccggcgtgatggtgctgatggaaaacagcgccacgcgactgaaacgctatgccgaatcgctgaaaaaatttcgtcatccagggaacaagattggctgcattgtgatgaacgccaatccctttacgaatggtcaccgttatctgattcaacaggctgcggcacagtgcgactggttgcatctgtttttagtcaaagaagattcttcacgcttcccctatgaagaccggctggatttggtgttaaaaggcaccgccgatattccacgcctgactgtgcatcgtggctccgaatacatcatctcccgcgctacgttcccttgctacttcattaaagaacagagcgtcattaaccattgttacaccgaaatcgatctgaagattttccgtcagtacctcgctcccgcgctgggtgtaactcaccgctttgtcggtactgaacccttttgtcgcgttaccgcccagtacaaccaggatatgcgctactggctggaaacgccgactatctccgcaccgcccatcgaactggttgaaattgagcggctgcgttaccaggagatgccgatatccgcttcccgggtacgtcaactgctggcgaaaaacgatctcacggctatcgcgccgctggtccctgcagtcacgctgcattatttgcagaacctgcttgagcactcccgccaggacgcggcagctcgcacccttgagtctggggatgtgatgatacgcatcgccccactcgatacgcaggatatcgacctgcaaatcaatagcagcgttgagaaacagtttggcgatgcaattcgcaccaccattctggacgttctcgcccgctacaacgtgcgcggcgtacagctgaatgtcgatgacaaaggcgcactggactgcattttacgtgcacgactggaagccctgctggcacgcgccagcggattgccaatgatttccgcttcgctgcaacaacgtaaaactcgcacccgccgcagcatgttgtttgtgcctggtgccaatgccgcgatggtcagcaactccttcatctacccggctgatgccctgatgtttgacctcgaagactccgtagcattgcgtgaaaaagacaccgcccgccgcatggtttaccacgcgctgcaacatccgctgtatcgcgatattgaaaccattgtgcgtgtcaacgcgctggattccgaatggggtgttaacgacctggaagccgtcgttcgcggtggtgcggacgttgtgcgtctgccgaaaaccgataccgctcaggatgttctggatattgaaaaaaagatcctgcgtatcgaaaaagcctgtggtcgtgaacccggcagcaccggcctgctggcggcgattgaatctccgctggggattacccgcgcagtggaaatcgctcacgcttccgagcgtttgatcggtatcgccctcggtgcagaagactatgtgcgcaacctgcgtacagaacgctccccggaaggaactgaactgctgtccgcacgctgtcccatttggcaggccgcgcgctctgcgggtattcaggcgttcgataccgtctattccgacgctaacaacgaagccggatttctgcagaagccgcccacatcatacagctgggctttgacggcaaatcgctga

SEQ ID NO: 142920 - DNA, 1040 bp, Homo sapiens
ctagctgacgaacgttatctctctctggggcatgcgatcattggggttgttgacgtagtcagtgtatgcgcacatgtgggggtgcgatcctttctttgtattgtcaacatgcgtgtgtggcttcagcagagggaagctggagataagactcgagtcaagctcttccacgtagtagaaaagttccaccaggtgaatgtcagcccagctcagcttgttgccaacaaggtagtcttgtctgtggctctttaagacccttggcaccccttgggatgggtaattctttgggttcaggggctgtccttcgaggttgtaaccgacgctcatattaaagatgaacgatttaccggaatcagaaggctggaacatcgcttcgagaaggtgcagggcaaaccaggctttgaggtattcatcccaggctttaagcagggtaaactcggtagaccattcggtgttaaagcactcgtcttcggcatcgatacagggcttttccagctccaggcggtcaagaatttggacggtttttagttcgatgaagcgtccgccagtcagccaggaagtgacaatattttgcgcgactgcgtgtgcgggccagcggagggccgacgggagtggcacaggtttcaccgaagacgctaacagttttaccttcagcagagggaagctggagataagactcgagtcaagctcttccacgtagtagaaaagttccaccaggtgaatgtcagcccagctcagcttgttgccaacaaggtagtcttgtctgtggctctttaagacctgggtgaacctggaatcatcatggttcgtacagcatcgactctggttctgaactggcactctgattataatttgcaagctgcagctggcgtacggagctcggacttcgtcatcatgggtcatagcgtacagggctctctcctttatgtctttcccgtagaggttgtatttgctggcaatgtagttgagaatggctctggtctgtaccaacttcatcccatcaatctcaaccattggtacttgctggaacatcaaactcccat

SEQ ID NO: 142921 - DNA, 2163 bp, Homo sapiens
atgggcagcggggacaagttgggcttgggagactataagaccttgagaatgggttcaagctgccagacggaaatccgccttttcggtgaatcgagccatgaagaacacaatcatgaaaagattcagcgagcaactagacagccggctcgttggtctaggggacctgagtttccatctcctggaccctcctctccttcccctcagcttttgcttttccctctgggaatatcgtggtcccaccccctgcccggtccccttcctccaggtgtgaagagctttatctgttcgggcaatacgatgcccattgtacttgttgactggtctgatatccgtgagcaaaaacggcttatggtattgcgagcttcagtcgcactacacggtcgttctgttactctttatgagaaagcgttcccgctttcagagcaatgttcaaagaaagctcatgaccaatttctagccgaccttgcgagcattctaccgagtaacaccacaccgctcattgtcagtgatgctggctttaaagtgccatggtataaatccgttgagaagctgggttggtactggttaagtcgagtaagaggaaaagtacaatatgcagacctaggagcggaaaactggaaacctatcagcaacttacatgatatgtcatctagtcactcaaagactttaggctataagaggctgactaaaagcaatccaatctcatgccaaattctattgtataaatctcgctctaaaggccgaaaaaatcagcgctcgacacggactcattgtcaccacccgtcacctaaaatctactcagcgtcggcaaaggagccatggattctagcaactaacttacctgttgaaattcgaacacccaaacaacttgttaatatctattcgaagcgaatgcagattgaagaaaccttccgagacttgaaaagtcctgcctacggactaggcctacgccatagccgaacgagcagctcagagcgttttgatatcatgctgctaatcgccctgatgcttcaactaacatgttggcttgcgggcgttcatgctcagaaacaaggttgggacaagcacttccaggctaacacagtcagaaatcgaaacgtactctcaacagttcgcttaggcatggaagttttgcggcattctggctacacaataacaagggaagactcactcgtggctgcaaccctgcttactcaaaatctattcacacatgaagaagcaccggctaactccgtgccagcagccgcggtaatacggagggtgcaagcgttaatcggaattactgggcgtaaagcgcacgcaggcggttcatggaacgggactgcatcaagtgataattttccgaacatctttattcttcctcaaaacgatttcatggcgctggcggcggcggttgctccgccagaactggaagcactgctggcggcggggaaagtctccgttaagatccaggaaccttgcgatgaaatcctcttctcacgcgccaaagtctggaacggtgagaagtgggcgtgtgtcaccatcgtcggcgggcataccaacattgtgcatatcgagacgcacgatggtgtggtgtttacccagcaggcgtgtgtggcagagggcgagcaagagtctccgctgacggtgctttccagaacgacgctggctgagatcctgaagttcgtcaatgaagtcccgtttgcggcgatccgctttattctcgattccgcgaagctaaattgtgcgttatcgcaggaaggtttgagcggtaagtgggggctgcatattggcgcgacgctggaaaaacagtgcgagcgcggtttgctggcgaaagatctctcttcatccattgtgattcgtaccagcgcggcatccgatgcgcgtatgggcggcgctacgcttccggctatgagtaactccggctcgggtaaccaggggattggtaccgagctgaatgtatcatgtagattcccagccaccaacttgtttgtgcatgatccgacccagcaggctatgcagcgcaatcagcgccggttcgctgtccagacgttccccgtatggcgggttgctcaacactgtgccgtacggccctttcggcagcggattggtcagttgcgcgacatctttcacctcaaaggtgatcagttcaccaatcgccctgcaaagatcgtggcgttttaa

SEQ ID NO: 142922 - DNA, 4084 bp, Homo sapiens
  misc_feature (1)...(4084): n = a,t,c or g
atggcagccgattatgaaaatcagctcgacgagttttccctcgatgcgcccattgtcgcacatgaaaactatcaatgggctaactacgttcgtggcgtggtgaaacatctgcaactgcgtaacaacagcttcggcggcgtggacatggtgatcagcggcaatgtgccgcagggtgccgggttaagttcttccgcttcactggaagtcgcggtcggaaccgtattgcagcagctttatcatctgccgctggacggcgcacaaatcgcgcttaacggtcaggaagcagaaaaccagtttgtaggctgtaactgcgggatcatggatcagctaatttccgcgctcggcaagaaagatcatgccttgctgatcgattgccgctcactggggaccaaagcagtttccatgcccaaaggtgtggctgtcgtcatcatcaacagtaacttcaaacgtaccctggttggcagcgaatacaacacccgtcgtgaacaatgcgaaaaccaggtatccccccaacgtatcacgacggctaaactggccgcctctgtcggcgtttccgaagcggcactgtttcgccacttccccagtaagacccgcatgttcgatagcctgattgagtttatcgaagatagcctgattactcgcatcaacctgattctgaaagatgagaaagacaccacagcgcgcctgcgtctgattgagttgctgcttctcggttttggtgagcgtaatcctggcctgacccgcatcctcactggtcatgcgctaatgtttgaacaggatcgcctgcaagggcgcatcaaccagctgttcgagcgtattgaagcgcatctgcgccaggtattgcgtgaaaagagaatgcgtgagggtgaaggttacaccaccgatgaaaccctgctggcaagccagatcctggccttctgtgaaggtaagcaatcaaggctttcgggtgatgatagagatcactttgcagccgtaatcacgctcaacttcctgaatcggcggaatttgccccgcccgcgtcctgacgatcgatcgaaatcaacaacgccgcaatgcaatgttgtaggtctctttgacatgcgcttcgaggcgatccagttcttcggcaacgtcaattcgttgtgccagcagaaccagatcctgctccagacggatgttttccagttgcacctgagcatcttccagcttcgcgaccagacgctcacgctgccattgcaggatttccggcatatgggagcggactttgaccacttcggcgacgctgctcgatcaatgctttcagtgcctgaccttcgggttccgcgcgacaataaagtgttcagcgtaccattcaacgccgcgagaatttcaacggcaatggcgttaaagatcctgctccttggcttgcaggtcgactctagaggatccccctgtgaattcaatcggctgtggttcaccggtcagcagacgcgcacgttcgcgcatcctctcaatggaaaccactttaatgcccgcttcctgcagacgttctgccagttccggacgtgccgggttaactgcgataccgtggtctgtgaccagaatatcgacactggagcctggggtgatgcaggtcagtacgttatccaccagagtcggaatacgaccgcgtaccagcggcgcgacgatgatggaaagcgcagaggcaatcgcggtatcgcagtgaccaccggaagcaccacgcagtacgccgtcagagccggtcagcacgttaacgttgaactgggtgtcaatttccagcgcgctcagtaccaccacgtcgagacgatcaaccgatgcgcctttcgaaccccagttagcgtactggttggcgctgatttcgatgtgattggggttacgggccagcgattgcgcagcatggctgtcaaagctctgcacatccagcagtttgcggatcagacctttttcgtgcaggtcaaccatcgtcgcggtaataccgccaagggcgaagtcggcgcgaatatcgcggctacgcattttgtcttccaggaaacgggttaccgccagcgatgcgccgccggtgccggtttgcatggagataccttctttggagtagccagagttgacaatcacatncgcagcgctacgggcaataagcaggtcgcgccgggtaatggtcatacgggtcgcgccagcgccgattttttgagcatcggccacgcgggcaactttgacgaacaaaacaacctgatcttgctcaatgcttgccggattatgcggtttaagcgacagatcttcggctttgagctcggtaccccgctggtccctgcagacacgctgcattatttgcagaacctgcttgagcactcccgccaggacgcggcagctcgcacccttgagtctggggatgtgatgatacgcatcgccccactcgatacgcaggatatcgacctgcaaatcaatagcagcgttgagaaacagtttggcgatgcaattcgcaccaccattctggacgttctcgcccgctacaacgtgcgcggcgtacagctgaatgtcgatgacaaaggcgcactggactgcattttacgtgcacgactggaagccctgctggcacgcgccagcggtatcccggctctggcatgggagggattgccaatgatttccgcttcgctgcaacaacgtaaaactcgcacccgccgcagcatgttgtttgtgcctgaggcccaatgccgggatgggcagcaacttctttatctacccggctgatgccctgatgtttgacctcgaagactccggaacatttgcgtgaaaaagacaccggccgccggaatggtttaccacgccgctggaacaatccgttggttggggaatattgaaaccattgtgcgtgtcaacgcccctggattccgaatggggtgttaacgacctggaagccgtcgttcgcggtggtgcggacgttgtgcgtctgccgaaaaccgataccgctcaagatgttctggatattgaaaaagaagacctgcgtatcgaaaaagcctgtggtcgtgaacccggcagcaccggcctgctggcggcgattgaatctccgctggnggatacccgcgcagtggaaatcgctcacgccttcgagcgtttgatcggtatcgccagcagtacgtatacgaccgcgtaccaccggagcgacgatgatggaatgcgcataggcactgggggactcgcagggaccaccggatgcaccacacaattccccgccggagccggtcagcacgttaacgttgaactgggttgtaatttgcagcgcgctcagtaccaccacgtcgagacgatcaaccgatgcgcctttcgaaccccagttagcgtactggttggcgctgatttcgatgtgattgggggtacgggccagcgattgcgcagcatggctgtcaaagctctgcacatccaacaggtggcggatcaaacctttttcgtgcaggtcaaccattgtcgcggggattccggctatggcgaaatcagaccgaatatcgcggctacgcatttttgtcttcaggaaacgggttaccgccagcgatgcgccgccgaaggaccaacaatccaggaggcgattttcgccagaacacccagcaacagcagtgcggagatcacgcgaaccggccactcaatttctggtgccacatgggacatcagaacggtaaaggtttgcattacccctgcggagaggttggatttattaccccgaatgaccatcgcaatagacaaaccaccaacagagcttaagcagattgccggccacctcagcaggtacatagcccacgatcagacaccgcctattcgtgaacggcacgacgccgcaccgtgcgctaacgaaacccgctgtgtctgcacttcgaaggattacatgctggaactgctgctggcaggcgggatggatatcatccgcgccatgcgtgtattagtaccacccggcttgcagaacaacccggatatggacccggaactgcgtgccttctttgaccttaactccatgcatatggagcccggggatggccccgccggcattgtgatgttcgacgggccgtttgccgcctgtaaactcgaccgtaacggcttggttcggcggcgcttcgtataa

SEQ ID NO: 142923 - DNA, 2510 bp, Homo sapiens
atggtggttgcgaattgcatcgccaaactgtttctcaacgctgctattgatttgcaggtcgatatcttgcgtatcgagtggggcgatgcgtatcatcacatcccagactcaaaggacccacggcgcgatagcggtgaagacgttttttcgccacaagtgaccgagccgggaaccggatatcggcatctccttggtaaagcgaccgttcaatttccaaccaatccgattgggcggttccgggaggcatatcctggtttgatcattgggggggaaacggaccagagagggttcgatgtcccggaaaaacggggtgattcacaccgagtgcggggaggaatggcaatgccgggaaaaacttctgagtctaatcttgggggacactccgtgccagcagccgcggtaatacggagggtgcaagcgttaatcggaattactgggcgtaaagcgcacgcaggcgtcagatgtgaaatccccgggctcaacctgggaactgcatctgatactggcaagggtgagtctcgaagaggggggtatttttccaggtgtagcggtgatatgcgtagagatctggaggaataccggtggcgaaggcggccccctggacgaagactgacgctcagcggtccggccgggaactcaaaggagactgccagtgataaactggaggaaggtggggatgacgtcaagtcatcatggcccttacgaccagggctacacacgtgctacaatggcgcatacaaagagaagtgtttacaacgggactctcccgctgaatattcgcgcgttaattaaaatcaggaatgaaaatgaaaaggagcactcttgcattagtgtggatgggcattgtggcatctgcatctgtacaggctgcagaaatatataataaagacggtaataaactggatgtctatggcaaagttaaagccatgcattatatgagtgataacgccagtaaagatggcgaccagagttatatccgttttggtttcaaaggcgaaacacaaattaacgatcaactgactggttatggtcgttgggaagcagagtttgccggtaataaagcagagagtgatactgcacagcaaaaaacgcgtctcgcttttgccgggttgaaatataaagatttgggttctctcgattatggtcgtaacctgggggcgttgtatgacgtggaagcctggaccgatatgttcccggaatttggtggcgattcctcggcgcagaccgacaactttatgaccaaacgcgccagcggtctggcgacgtatcggaacaccgacttcttcggcgttatcgatggcctgaacttaaccctgcaatatcaagggaaaaacgaaaaccgcgacgttaaaaagcaaaacggcgatggcttcggcacgtcattgacatatgactttggcggcagcgatttcgccattagtggggcctataccaactcagatcgcaccaacgagcagaacctgcaaagccgtggcacaggcaagcgtgcagaagcatgggcaacaggtctgaaatacgatgccaataatatttatctggcaactttctattctgaaacacgcaaaatgacgccaataactggcggctttgccaataagacacagaactttgaagcggtcgctcaataccagtttgactttggtctgcgtccatcgctgggttatgtcttatcgaaagggaaagatattgaaggtatcggtgatgaagatctggtcaattatatcgacgtcggtgctacgtattatttcaacaaaatatttcatcaagggctaaaaaaaggtcgaaaaggccagtacctgtccaatgctgatctgcctagagaatcttcggatcagctcgcgcaaaatattgtcacttcctggctgactggcggacgcttcatcgaactaaaaaccgtccaaattcttgaccgcctggagctggaaaagccctgtatcgatgccgaagacgagtgctttaacaccgaatggtctaccgagtttaccctgcttaaagcctgggatgtatacctcaaagcctggtttgcctgcaccttctcgaagcttttactggtatactgcgtgtcttgcgctttgttgcggtgccaaaacctgcccgtgcgaagtgatttgtttttaaatcatatggttagagatatgaaacatactgtagaagtaatgatccccgaagcggagattaaagcgcgtatcgccgaactgggtcgtcagattactgagcgttacaaagacagcggcagcgatatggtgctggtgggtctgctgcgtggctcatttatgtttatggcggacctgtgccgtgaagttcaggtatctcatgaagtcgactttatgaccgcctccagctacggtagcggcatgtccaccacccgtgatgtgaaaatcctcaaagatgaccgcaggcagcgagttccagggggacttaagctttggcgcttctgccctggccctctgttggccactccgcgggtgctgtgcctgggcgcctccgtgctctcggccaactgcctttga

SEQ ID NO: 142924 - DNA, 1122 bp, Homo sapiens
atgcgctataatcgggacttcttatatttaagtgcattatccgtgaacatggatgatgttcgtgggacccccaagatccccacggtatactgcagggagcaggaaaagaagactcgcaggcacagaaaaccacagccagacaaaagagaaagacgcgaaaaacagccacaagacaaaagaaacacgagaaacagagcgaagaaagcacgaacgaagacacgtaagcaagaaaagttgaagagactcaacacaagcacgacgccgaaagcacgagcggttcagttattcaaggctgtgtacaactctttactcaatcgtttaccgccacccccgctgcatctgcgaccaccgcaactcgtccaaccatactatgctcgtcccgcgcgcgggctgggtacccatcaacaactggcgtttctcgccgcgaaagcccgctttgacaagctcatggctggcaacaatgctctcttcgccaatgaccgcgccatcccaaactcacgactggttcatcccgtcccaactgcatcgcgaccaagtcaaaaaccatgcagagctcgcatccgatgcccgagtcgccatcgtctcctattgcgctttcatcgttttggtattcgggtcacccggcagctattcttcatttttcattaccgccgcccccaccccccccatatgcatacgcgcgcgccccccccccccccatatgaatacgccagcgcacgtggatttaccgctgccaaacgcgccgcgtacccgagaagcaagtaccggacgaggcatatgcgcctttatcaaacaaccatgatcggtatcaccggagataacatgcacgtcctgcggtgggcagtgagcacttctgctgccagtttcgtcaacatacagtatccagaccagtaccataatcgaaacgccagaatgaacgataaaggtgccgtgcgattccagttgatcatgcagattagactgatcgatatccgggataccgatttctggcatataatggcgacgcgagatcgatgtgcagtacccaaaggggatacggggaaacatggatcattcgaacctgaagcggatcttcatgacactgcgaggagaagcggcgacttaattccgatggcaaattag

SEQ ID NO: 142925 - DNA, 3732 bp, Homo sapiens; identical to SEQ ID NO: 124456

SEQ ID NO: 142926 - DNA, 3090 bp, Homo sapiens
  misc_feature (1)...(3090): n = a,t,c or g
gccactgcacccgctctgatgtacgtaggtttgctgatgttaagtaacgtctcgaagctggatttcaatgattttattgacgctatggctggcctggtgtgtgccgtgttcatcgttctgacttgtaatatcgttaccggtattatgctgggctttgtgacactggtcgtaggccgcgtctttgcacgcgaatggcaaaagctgaatattggtacggtgatcattactgccgcactggtcgcattttccgccggggtgggtggggcaatttaatagatttctccgcgcccttaaggggggcagttttctttcaaagaggattctcaccgctgacaacaatacgctgctggcggactcgcctgagttttctttcagtaagcaactgcagcgcctgtgttgggcaagattcaacgcaggctggcccctcttcccgctgttcacagagatcgcatttcacaatttgttgtcgggtatcccccggcaacgactgaatggtgatcattccaaacgggcacgcactgacgcaactctgacagccaatacaacgggcagaattggtctgcaccacctgctcgcccatcgtcagcgcccccacggggcaagcgccaacacaaggggcgttttcacactgatggcacatcaccggcgcactgatgctgtccagtcgctgtaccttcagccggggtaaaaagacatcggcattcaactcctgttctgaagggtgagcgaccacacaggctacttcacaagtacggcagccaatacagtcagccggattaacgataattaacgatttcatcacgatgccttcgtatcaaacagagttaacatatcgcgcgccgcctgccttcctgcggccattgcagtgacaaccagatccgcgccatgaactgcatcaccaccagcaaagacttttttcagatgcgtctgggtaggtaaatacccgacgtcaccggtttgaatcaggccccatttatcgagtttaattccgctgccctgcaaccacggcattgcatgcgcctggaaaccaaaggccataatcagaacatcggcgggcaattcaaactctgaacccgctaccggaggaggacgacggcgaccatccggccccggctcacccatggcggtacgaatcaggcccaccgcagttaaacgcccatcttcgtcacaagcgatatattgcggttgaaaattgaactgaaactcgacaccttcctcgcgcgcattaaccacctctttgcgcgagcccggcatactgatttgatcacgacgatacgcgcaggtcacgctggcggcattgaggcggatggaagtccgcaaacaatccattgtcgtatcgccaccgcccaatacggggatccttctgatgagtggcgtgaagctccccggctgataaatcgtctggatgcgggttctgtcgttctgtattgtggtcagccggtcgccgtcccagccgtaccaggtcacttgcggtttccgtgacagcgacatccagcccgtcaggtcccgttcacgccgccacacccgttttgccacctgcggccccagcgggtcgtaaagatagcgactttcgaccagcggctcttcatattgtgtccgcgtgtagntcaccagccggtgctgactgtcgtaatggtaccggtgagtccgctcatcatccgtgcggataacccattccgggatgaggtcggttttctctgtcagcctgccgtgacggtcataccggtaaagatagtgcgcgtcacgggcgatacggttatccggccacatgctgagggtgctgtccgggtgcagctccgggtcgggcaggcggttacctgccgggtctgtggcatacgggatgcggatatccagattcgctgcggtggtgtgaacgccggtcagcctgccggtggtgctgtagctgtaactccgggtctggcgcgggctgctgatgcggatgagttcgccgttgtcgttccaggtgtaatcgcggtcagacagcaggctgttcaggtgctggctctgtaactgcccggcaggggtataagcggtggtgagttcataacggccgaagtgcgcagcgtttcccggtgcaggcggtcgcgggtgtactccaccagggggatcctctagagtgagcccactcctgagcatgtgctctgtgtgtgtcccattagactgagaggaacaagtgccgaaggcagggacaaggtgtggagtacagatccccaatgatgggatggaggctgggtagaagagggaggcgtttgggtgacagccttgttcttggtaagctagaagtaggatgttttctcgctgggggcagtttctcaaattgcggacaataatttctgagcctgcttggacagcgaggtgcaggggggtcaacttggaggcatcctggactcttgaattcacattagcgtggacactgatcaggaacagcacactttcaatatcagagttctgaactgccacatgaaggaaattccggcccttgttatccaccttcttctctggggcacttggctgggggtgggcaattgggccctgcccttggccacctgggtcggccttctctgggaagcccttggcatagagtgtagctgcaagctgtcctgtgccccacaggtccagtccttgatggcacagcttggctgacagcgtccatctgcagacgccactgcacatgcgatcgcctataaccatccggatgtggtgtctgtcatcctgtagcagaaaggtaagtaagtgggaatactgtccatccttttgactgtgggacagcagtttaggatccttagttacagagttgatgttttttctgttggtgagtttcatatggctagtttcttcgccgacagtgaattcagcagtaagcgccgtcagaccagaaaagagattttcttgtcccgcatggagcagattctgccatggcaaaacatggtggaagtcatcgggggatcctctagagtcgacctgcagcatacgaacaattcgagctcggtacctcccctgatctataaggactgagtgccagctcctctgctgcgtgccacacgagccccttctgtgccctctctcctctaggcctggtaccttccccat

SEQ ID NO: 142927 - DNA, 1674 bp, Homo sapiens
caacgttattttgaacaataagcgtggcggctgcccaatgaaaattgacttgaacgccgatctgggcgaaggctgcgccagcgacgcagagctattaacgctggtttcctctgccaatattgcctgtggatttcatgcaggcgatgcgcaaatcatgcaggcttgcgtgcgtgaagcaataaaaaatggtgtcgcgattggcgctcacccgagttttcccgacagggaaaattttggtcgcagcgccatgcagctgccgccagaaaccgtttacgcccagacgctgtatcaaattggcgcgctggcaacgattgcccgtgcgcaaggcggcgtaatgcgtcatgtcaaaccgcacgccccgttgtacaaccaggcggcgaaagaagcacaactgggagacgccctcgccagagcgggatacgcttgcgatccagcattgattctcgtcgggctggcgggaagcgagctgattcgtgcaggcaagcaatatggtctgacaacgcgcgaggaagtgtttgccgatcgcggttatcaggctgacggctcgctggtgccgcgaagccaattttccgctgccaaacgcgccgcgttacccgagaacaagtaccggacgaggcatatgcgcctttatcaaacaacgcatgatcggatcaccggagataacatgcacgtcctgcggatctcttccagtgcacagctggcggggaagtaacggaggtcggcgctttaccttcaccgattgcatttcacaattgttgtcgggtatcccccggcaacgactgaatgcgcccccacggggcaagcgccaaccaaggggcgttttcacactgatggcacatcaccggcgcactgatgctgtcagtcgctgtaccttcaaccggggtgacaaccagatccgcgccatgaactgcatcaccaccagcaaaacttttttcagatgcgtctgggtaaatacccgacgtcaccggtttaatcaggccccatttatcgagtttaattccgctgccctgcaaccacggctggcatgcgcctggaaaccaaaggccataatcagaacatcggcgggcaatcaaactctgaacccgctaccggacgaggacgacggcgaccatccggcccggctcacccatggcggtacgaatcaggcccctcgacacctttcaaaacataatcccggtgcggcgtgtaaggtgtgggaaccgtttagtcacagacaccgtcccgtctacctcccccgagtccagccttgggtgggtgctgcacagcgacttgcggccttaggtcttctcgctgtgccttcctttcctcctgagagatgctctccgcctaagaccgctaacagctcaattgggtctcattgatcccactcaccatctagagccctgttgcctcattaatccgttgtgccaccagctcacgggctgcaactgggaagagacgagacctgtttatccatcgccgacactgggatacgcagcaatctgcaaaatggggtagaaaccacaggaagaaagtggtaggcgacggcgcaggcacggtagaaaggcgaggccggccccaagctgggggagtattctagactgcaacaccgttcacacgctactagcaacagacgggtgtcatccggaccatgaggttcgctgtgtacgactccggaagttccggcgacaatag

SEQ ID NO: 142928 - DNA, 611 bp, Homo sapiens
  misc_feature (1)...(611): n = a,t,c or g
tggtttccaccggtgccacgctggaagctaacggcctgcgcgaagtcgaagttatctatcgctcgaaagcctgcctgattcaacgcgatggcgaaatggaagaatccaaacagcaactgatcgacaaactgctgacccgtattcagggtgtgatccaggcgcgcgaatcaaaatacatcatgatgcacgcaccgaccgaacgtctggatgaagtcatcgccctgctgccaggtgccgaacgcccaactattctngcgctggcgggtgaccaacagcgcgtagcgatgcacatggtcagcagcgaaaccctgttctgggaaaccatggaaaaactgaaagcgctgggtgccagttcaattctggtcctgccgattgagaagatgatggagtgatcgnnnnnnnnnnnnnnnnnnnnnnnnnnnnnnnnnnnnnnnnnnnnnnnnnnnnnnnnnnnnnnnnnnnnnnnnnnnnnnnnnnnnnnnnnnnnnnnnnnnnnnnnnnnnnnnnnnnnnnnnnnnnnnnnnnnnnnnnnnnnnnnnnnnnnnnnnnnnnnnnnnnnnnnnnnnnnnnnnnnnnnncacggttaccgcgctgaaggtgtctgcagagga

SEQ ID NO: 142929 - DNA, 1317 bp, Homo sapiens
tcaggtgatggcaacgggctttacctgggatacacaaaaccgcgagtctgataccggcggctgacgcgaagtctgggaacatgcaaagcggatgcttggtgattcctcactggatatgggaatggatgatgaactgacgtatatggtggcgtatgagtatattggcaggttggggaaaacggccactatacactggaaggtgaagagttcaccgtcaatggtatggtcggccagcgtctggaaaaagatggcgttgcgctgactatcgcggacattaaggccaaaccaggaacacagtttgtcctgagccagcgtacccgaactgaagtgcgcagcgagctggaccaagcggaagaaaaactcaacgtttatcgccagcagcgcgattcggttgaccttaacctggaagccaaagccgttcttgagcagattgtgaacgttgataatcaactcaatgagctgacgttttttcagctccatagaccccgcctggtcgcggtcaatcacgcggccctgacgttcactggtggtggaaaccagcatctcttcgatgatttccggcagtgtttgtgcatttgactccaccgcaccggtcagcggccagcagcccagcgtacggaaacgcaccatccgttttttaatcacttcgcccggttgcaggtcgatacggttgtcatcaatcatcatcaacataccgtcgcgttccagaaccggacgttccgcagcgagatatagcggaacaatgtcgatattttccagccagatgtattgccagatatcctgctcggtccagttagagagcgggaagacgcggatgctttcgcccttggttaatttgcccgttgtagttgtgccacagctccgggcgctgatttttcggatcccagcgatggaagcggtcacggaaagagtaaattcgctctttagcgcgggatgtcgtaatttgttcagcgcctgtttcaggccttcagttttcataatatcggtatgtttcgcgctgccgtgcacgaatggattaatccccatcgccacgccttccgggtttttatgcaccagcagttcgcagccgtaggctttagcagtacgatcgcggaactcatacatttcgcggaatttccagccggtatcgacatgcagcaacgggaaaggcagcgtacctggataatacgccttgcgcgccagatgcagcatgacgctggaatctttaccgatagagtagagcatcaccggatttgagtattctgccgccacctcgcgaataatgtggatgctttccgcctccagttgccgcaggtgagtaagtcgtatttgatccat

SEQ ID NO: 142930 - DNA, 648 bp, Homo sapiens
ttagccggacgttcgcagcgagatatagcggaacaatgtcgatattttccagccagatgtatgccagatatcctgctcggtccagttagagagcgggaagacgcggatgctttcgcctttgttaatttgcccgttgtagttgtgccacagctccgggcgctgatttttcggatcccagcgatggaagcggtcacggaaagagtaaattcgctctttagcgcgggatttctcttcgtcacggcgcgcaccaccgaaggcggcatcaaaaccgtatttgttcagcgcctgtttcaggccttcagttttcataatatcggtatgtttcgcgctgccgtgcacgaatggattaatccccatcgccacgccttccgggtttttatgcaccagcagttcgcagccgtaggctttagcagtacgatcgcggaactcatacatctcgcggaatttccagccggtatcgacatgcagcaacgggaaaggcagcgtacctggataaaacgccttgcgcgccagatgcagcatgacgctggaatctttaccgatagagtagagcatcaccggatttgagaattctgccgccacctcgcgaataatgtggatgctttccgcctccagttgccgcaggtgagtaagtcgtatttgatccat

SEQ ID NO: 142931 - DNA, 2046 bp, Homo sapiens
atgtcgcctttctctgcaaccagttgcggcgatcttccgagcgtttcttcgccagcagcatatcatcatcgcgtcagtacgctgatcgtcttcatcatcgatagtcaactgcccagacggcgagtgttcggatcaagcgtgagcggtggcagtgcgactaaacgtgaccgtgtttcaccaacgcgcggaaatgttttacgaacaaaggcagagcagcgtggcaatgtgcagaccatcagagtccgcatccgcgaggatgataccgatcgctaccgaaatatcgtgcacttcctgcgaagccagcactcgtcggaagagacttcccaggtgttaaggatcttacctttcagtggcatatcgcctgatattcgcgatcgcgcgcctgcttggcagatccgcctgcgggtcaccttccacaaggaacagctcgcacataggcgcagcgatcccagatatcttccgccgacagctttacacgcgcggcagaatattgcggtattcacagaactcacgcatcgcgtccaaaggtcactgacgcagaccattaacatgggtaccgccctgcatcgttggctcgttgccgatgattaccgccaatacgctggcgggcggcattaccggcgtctggtgatcgctttcggaatcaaacgtctggcacctggtttgggttgtggttacgccgcaaagcgaaagccgcgcaacaggagcttgtccatgacattgagttactgcaacagttgtgcgaagccagcgccgtcagcggcgagaacaggaagttcgcgacattctgataaacacgctggaaccttgcgtgatgaaatcaccttcgatggtctgggcagctttgttgcccgtaaggggaataaggtccaaaagttgccgttgtcggacatatggatgaagtcggctttatgtcacccacatcgacgagagcggttttctgcgttttaccaccattggcgctggtggaatcagtcgatgctcaaccaccgggaagcggaggagtggtatcgcgggcggatgtttacccgcaagccgcgccagtggcggatgatgtattggttacttccagcatcaaccgattggtttagccaaacggattggttcgcgattgaaaacagctatccgcgtgaactggtgcgcgatgggaaactttttaccggcgaacactctgtcctttaccgtacccgttacgatcaacaatctgatgctggattatgcgtcttgcctgatccaaaaagaacccgtcggcatggcggttatttgtcctggttattcccccgttgtaaaatctctcctaaacttaacgtgttgcaaccgtggcaactcgatctctcttacgatgaaagtgccatgctggcaatcctctccggcgtcagttggggggcgagcgcgatgtcgctaaacgtctgtatgcccgtcatccgcgcgtggatttattgtcgtaacatcctggcagatgctgtatgcggcgctggtgatgagtgtggtcgcttactgtgttatggcgctggcctacagtgcgattctggcgacggcactggcgtggagcttaatgttgttcgtattgaaaaacttgcctgccagtattgccagcttaagcacatggccgttaccgtttacggcgtactcttttcctggtggctgctcggcgaaatccgggggccgttgaagcaaaatcttcgccatatcttcgtgaaccagtttctgcaaatcgaccttctggctcgcaatgcgcggatcaccacatcggaacatacaccgcgttcttgcggaaatcaccgccaggataacttgcgccacagccagcggttgcagttcgatatgatcgcgcaagcctttgttgtcgacattcagcattcgcgggtattcgtcgcgcagggcaaatgtacagcacatcaaggccgagaatcggctctcgatgccgttacgttccgctaccagtccgccactaaagaaactgccgctgggagaaccgcgaaacgtggacgtagcgggaatatcggtggaccacctcactcatcttccatcccctataaaaattga

SEQ ID NO: 142932 - DNA, 1338 bp, Homo sapiens; identical to SEQ ID NO: 132028

SEQ ID NO: 142933 - DNA, 1353 bp, Homo sapiens
atggaagcgccgccgatcgaagacgtttcgagccgtgacctgaaccggcgaaggaattacggccacccggcggatctgttttggttctactccgtcctgcgtgcgttgccggaagtttacgccagtagcgatgcccacgagaagtttgttaaagacttcgtggcggcatggtcgctgaacgttctttaccagcgtatagtgggcgaacgaaaactacacactggatctctcatgtctgccgcaggaaagagcaacccactggcaatcagtggcctggttgtgctcacacttatctggagttatagctggattttcatgaagcaagtcaccagttacatcggtgccttcgactttaccgccttacgctgcattttcggcgctctcgttttattcatcgtccttttattacgtggtcgcggaatgcgcccgacaccgtttaaatacaccttagccattgccctgttacaaacctgcgggatggttggtctggcgcagtgggcgttggtcagcggaggtgcggggaaggtggcgatcctgagctataccatgccgttctgggtggtgattttcgccgcgttgtttctcggtgaacgcctgcgacgtgggcaatatttcgcgattctgattgccgctttcggcttatttttggtgttgcagccgtggcaactcgatttctcttcgatgaaaagtgccatgctggcaatcctctccggcgtcagttggggggcgagcgcgattgttgctaaacgtctgtatgcccgtcatccgcgcgtggatttattagtcgttaacatccatggcaaatgcatgtatgcaggcagctggccagccagcttccactctcccacggtgccatgcctcgctgcaggcgtcccggacacagttcgaacccagataggctcgcaaacgtcatcgcccggagggtcctccggggaatgtcaaatcgccagcctgtcagcccgtgttgtccgtgaaggtgacgagtttagcttcgaatttggccttgatgaaaagttaatacaccgcccgggagaaaacgaagatgccccggttacccacgtctatgctgtcgcaagactgaaagacggaggtactcagtttgaagttatgacgcgcaaacagattgagctggtgcgcagcctgagtaaagctggtaataacgggccgtgggtaactcactgggaagaaatggcaaagaaaacggctattcgtcgcctgttcaaatatttgcccgtatcaattgagatccagcgtgcagtatcaatggatgaaaaggaaccactgacaatcgatcctgcagattcctctgtattaaccggggaatacagtgtaatcgataattcagaggaataa

SEQ ID NO: 142934 - DNA, 2110 bp, Homo sapiens
tcacccctttgacgcccagccgttcagttcactgatggcagttgcagcatcggcgcgcagggtatcctgtaacgcaatgacaccaagcacgtcatcgttacgtactaccagcactaccgtttgcccggcgctttccagttcgttaattaaaccagtaaatgcatcagcgggatgtttcccggcagcgcaaatcaatacgcgctcaccgttaacctgcgcttcaatgccagacccgaccagcgcccgctgtgattcggcggtgggaatggcgagttcagcaacctgtgcttcgcgtacgatggcttgcgccagtggatgcgtcgcgccttgctcgaccgccgccgccagtgtcagcagttcagattcaccctttgacgcccagcgcgttcagttcactgatggcagttgcagcatcggcgcgcagggtatcctgtaacgcaatgacaccaagcacgtcatcgttacgtactaccagcactaccgtttgcccggcgctttccagttcgttaattaaaccagtaaatgcatcagcgggatgtttcccggcagcgcaaatcaatacgcgctcaccgttaacctgcgcttcaatgccagacccgaccagcgcccgctgtgattcggcggtgggaatggcgagttcagcaacctgtgcttcgcgtacgatggcttgcgccagtggatgcgtcgcgccttgctcgaccgccgccgccagtgtcagcagttcagattcactaatacccgttgccggatgaatcgcggtaacgcgcggtttaccgacggtcagcgtaccggttttatcaaacgccacctgagtaacacgacccagctgttccagcgccgctccgcctttaatcaacgccccacgacgcgctgccgccgccagcccggaggtaatcgccgcaggcgttgagataactaacgcacacgggcagccaatcagcagcagcgtcagccctttataaatccactcctgccagctggcggcaaacagcagcggtggcaccagcgtcaccagcagagcgacggccataaatcgcgggcgtatagataacggctgaaacggtcgataaaccgctcaatgggagcgcgacgctcttcggcttcttcgatcagtttcagaatccggtcaatggcgctggctcccggttctgacagcacttccaacgtcaccagacggtctacgctggtggcaccagcagggactttatcgcccgttgcgcgctccaccggaatggattcgccggtcagggcgctttcatcaaaactggcaaacggtgagagcagtttaccgtcggcaggcaaacgcccacctgcggcgacttcaatcacatcgccagggcgcaggctgttaatcgccacctcttcccgctcacccttacgcaggcgcgtggcggtttctggtttcagcgccattaacgcgctaacgccctgacgcgcgcggctggcggcccagccttccagtcgttcaccaatcaaaaacagcagcaacaccatcgcagcttcagccgttgcgccaataaacagtgcaccaatagcggctacgctcattaaggtttcaatggcgaagtagctgccggatttgatcaaccgtaatgcctgatcgagcaatcgggtacagcccaaccagcgtggtcgcgataaacgccagttgcccgaacggatgattgaatttttcgtgggatgagctaaggctttcagcttttttagatacataagccgcgtttcaagaaatcgaacttgcctttcaagatcctcaatgcgtcggtcttttgacagctccaatgctgatgccgctttttctggatcaactgatattgcaatgtttcttttggtgccaatcttgagcgcgcgtaaaccagcttctccgcgctcttcatagaccttcagccacctggctacagaaccactaccagcaagcataaagtgagcagcagcctgattaagggacatgtgctgctcgatcacagctttcacgaccttaatacgcaactctggatcagcactaacgcctttaggtttgggaattaaacctttttctccatgtttttcatagagggcaacccatgtcctgacctgggttcgggggacaccaaaacgtgccgagatgatc

SEQ ID NO: 142935 - DNA, 1131 bp, Homo sapiens
  misc_feature (1)...(1131): n = a,t,c or g
gtaaaggatctccttttcacacccgttcagcgcggtaacgtggnnnnnnnnnnnnnnnnnnnnnnnnnnnnnnnnnnnnnnnnnnnnnnnnnnnnnnnnnnnnnnnnnnnnnnnnnnnnnnnnnnnnnnnnnnnnnnnnnnnnnnnnnnnnnnnnnnnnnnnnnnnnnnnnnnnnnnnnnnnnnnnnnnnnnnnnnnnnnnnnnnnnnnnnnnnnnnnnnnnnnnnncgatcactccatcatcttctcaatcggcagcaccagaattgaactggcacccagcgctatcagtttttccatggtttcccagaacagggtttcgctgctgaccatgtgcatcgctacgcgctgttggtcacccgccagcggcagaatagttgggcgttcggcacctggcagcagggcgatgacttcatccagacgttcggtcggtgcgtgcatcatgatgtattttgattcgcgcgcctggatcacaccctgaatacgggtcagcagtttgtcgatcagttgctgtttggattcttccatttcgccatcgcgttgaatcaggcaggctttcgagcgatagataacttcgacttcgcgcaggccgttagcttccagcgtggcaccggtggaaaccagatcgcaaatcgcatccgccagtccggcacgcggggcgacttcaacagaaccgttcagtaagcaggatttaaaagagatgcctttctggtcgagataacgcttgagcaggtgaggataagaggtggcaatacgtttccggtttaagaagagcgggacggtcccaggcttcatcaaccggcgttgccagcgaaagacgacagccgccgaaatccagacgacgcagggtaaagtagcgtggatcttcaccctgggcgcggcggttaagcagctcttcttccagcacgttttcgccgataatcccaaggtctaccacgccatccattaccagaccgggaatgtcgtcgtcacgcacgcgcagaatatcaatcggcatgttttctgccatcgcgatcaggcgctgggtgtgaagattaattttaatgccacagcgcgccagcaattcgcgtgagtcatcacttaaacggccggatttctgcatagctatgcgtaaacgagtgttgtctgtcat

SEQ ID NO: 142936 - DNA, 3094 bp, Homo sapiens
  misc_feature (1)...(3094): n = a,t,c or g
atggtggaacgctatatagcgctggccatgacaaangcattatgcgcacagcacaagatctgccgcagccattgtttggccgcagttgcagcactagagacacggttgtctatcaaatacgacttactcacctgcggcaactggaggcggaaagcatcacattattcgcgaggtggcggcagaattctcaaatccggtgatgctctctctatcggtaaagattccagcgtcatgctgcatctggcgcgcaaggcgtttatccagcgattgcggtacgtgtgccaaccataaatgtgacggcaatcgatttaagcgtgacggtgaagaaacctgtaaaagccaatgaagtcaacctgttgctgcaaaaagagcacaagattttaaccacgatccgcacagtgccattgtcgatggcaccaaacccgggtcagtggcgcacacctgatcaaaacgttggtctggtgcgtaacgaatggggctttgctaaccgaatgctcgacacgacgttagctatgctactgttgctttcaggctttcgagcgatagataacttcgacttcgcgcaggccgttagctccagcgtggcaccggtggaaaccagatcgcaaatcgcatccgccagtcggcacgcggggcgacttcaacagaaccgttcagagagcggaccgtcccaggcttcatcaacggcgttgccagcgaaagacgacagccgccgaaatccagacgacgcaggtctaccacgccatccattacagaccgggaatgtcgtcgtcacgcacgcgcagaatatcaatcggcatgtttctgccatcgcgatcaggcgctggcgcatgttgattcagctcggtcaccgctttgacttatcttccggcaacaggcccgctttaaactccagccccagctccccggcattgcgcccgctgcgcgtggattatcgccgttcgttaattaaaccagtaaatcatcagcgggatgtttcccgcagcgcaaatcaatacgcgctcaccgttacctgcgcttcaatgccagacccgaccagcgcccgctgtggattcggcgggggaatggcgagttcagcaacctgtgcttcgcgtacgatggcttgcggcgtggatgcgtcgcgccttgctcgaccgccgccgccagtgtcagcagttcgattcactaatacccgttgccggatgaatcgcggtaacgcgcggtttacgacgcgccgctccgcctttaatcaacgccccacgacgcgctgcgccgccagcccggaggtaatcgccgcaggcgttgagataactaacgcaccgggcagccaatcagcagcagcgtcagccctttataaatccactcctgcagctggcggcaaacagcagcggtggcaccagcgtcaccagcagagcgacgccataatcgcgggctttcagaatccggcaatggcgctggctcccggttctgacagcacttccaacgtcaccagacgtctacgctggtggcaccagcagggactttatcgcccgttgcgcgctccacggaatggattcgccggccagggcgctttcatcaaagagcgaccagcagattcacacagttgccccccccccccttgcgccccttcaccgccgcaagctcccttttctggctactattcggcccggttctttcaccccccaatccaggccttcccttacccgacgatcacccggagaactatcggcaagcggaatagcttccgtaccgacgtattcattggtccacggctaaataacccagctttactgccaaaagccgccgtagaggctcggggggtaagacagttctcatcctcggtggcagtcgtggtatcggtgccgctatcgtacgtcgtttcgtcaccgatggggccaatgtacgattcacctatgcggggtcgaaagatgccgctaaacgcctggcacaagagactggagcgacagcagtattcacagatagtgctgacagagacgctgtcattgatgtcgttcgtaagagcggcgcattggatatcctggtggtaaatgcaggtattggcgtctttggcgaggccctggaattaaatgccgacgatattgatcgccttttcaaaatcaatattcatgctccttatcatgcctctgttgaagccgcccggcagatgcccgaaggcgggcgcatcttaatcatcggctccgtgaatggcgatcgaaagagcaacccactggcaatcagtggcctggttgtgctcacacttatctggagttatagctggattttcatgaagcaagtcaccagttacatcggtgccttcgactttaccgccttacgctgcatnttcggcgctctcgttttattcatcgtccttttattacgtggtcgcggaatgcgcccgacaccgtttaaatacaccttagccattgccctgttacaaacctgcgggatggttggtctggcgcagtgggcgttggtcagcggaggtgcggggaaggtggcgatcctgagctataccatgccgttctgggaagagattttcgccgcgttgtttctcggtgaacgcctgcgacgtgggcaatatttcgcgattctgattgccgctttcggcttatttttggtgttgcagccgtggcaactcgatttctcttcgatgaaaagtgccatgctggcaatcctctccggcgtcagttggggggcgagcgcgattgttgctaaacgtctaattctttcggacctaattgtcggcggtgggcacaaaccttccttgcttgcccggtgggaagtccccaaaaaagttaacccccccattttggcggcattcccaagggaaccacctttcgttggaaccccgaaggcccaggctttgcggaaaaattcctttccccaggaaccccttgctctggggcccccccgccacccaagtggccggaaatatcccctcgggaccccaaagaaagccaacccgggtttttggcccttggggaggtgcttagtccttgccacctggcttattctctccagaacaaggactaaggtacaaagaatacagtatgctgagagcagcggagaagacaaagatgacaccattcctgtcttcaaaggacgtaaaaactag

SEQ ID NO: 142937 - DNA, 1209 bp, Homo sapiens
atgaaagccggccgcggccagcggcccggcccgcgggcggcgcacgccgccggggcccgcgcgcggatgctgcgcggggcgggcgcctgggtgccgcggtggcccttacccacacccgttaaccttgccccgctacctattaattgcgttcctgccatgtatccccttatgactgtgaaatttaccaaacgcggaagtttatttgctgctacctttacttatatagtatacgcggctgctacgacttgtaaaacaatatttgctcatgggcctacccaaacggaaggcctatgcaatttgccgcggaatacgcgtctacataatgtgccacctggccgggcgagtcctcgcatgaaatacattggagcgcacgttagtgctgctggcggtctggcaaatgccgcaattcgcgccgccgaaatcgacgcaaccgcgtttgccttgttcaccaaaaaccaacgtcagtggcgtgccgcaccgctcacgacgcaaaccatcgatgaattcaaagccgcctgtgaaaaatatcactacacatcggcgcaaattcttccccacgacagttatctgattaacctcggacatccggtcactgaagctctggaaaaatcgcgcgatgcctttatagatgaaatgcagcgttgcgaacagctggggctttctttgctcaacttccaccctggcagccatctgatgcagatttcagaagaggattgccttgcgcgtattgccgaatccatcaacattgcgctggataaaactcaaggtgtgacagcggtgatagaaaacaccgccggtcagggcagtaacttagggtttaaattcgaacatctcgcggcgattatcgacggcgtggaagataaatcccgcgtcggcgtctgcattgatacctgccatgctttcgctgccgggtatgatttgcgtactccagccgaatgcgagaaaacattcgcggattttgcccgtactgtcggctttaagtatctgcgcgggatgcaccttaacgatgcgaaaagcacctttggcagccgcgttgaccgccatcatagcctcggtgaaggcaatatcggtcatgatgcgttccgctggatcatgcaggacgaccgtttcgacggcattccgctgatcctcgaaaccatcaacccggatatctgggcagaagagatcgcctggctgaaagcgcaacaaactgaaaaagcggtagcctga

SEQ ID NO: 142938 - DNA, 822 bp, Homo sapiens
atgtcagggagttatagcagtgtctgggctgaagacgacattcagtttgattcccgttttctggaattaaaaggcgacacaaaaattgatctgaagcgtttttccagccaggggtatgttgagcccggaaaatacaatttacaggttcaactaaataaacagccattggcggaagagtacgatatttactggtatgctggtgaagatgacgttagcaaaagctatgcttgtctgacaccggaactggtggcgcagtttggtttaaaagaagacgtggcgaaaaatctgcaatggagccacgatggtaaatgcctgaagcccggtcaactggaaggcgtggaaattaaggctgatttaagccagtccgcattagtcatttcactaccgcaggcttacctcgaatatacctggcccgactgggatccaccttctcgttgggatgatggcatctccgggatcattgcggactacagcatcactgcgcaaacacaacacgcaaaactaaacacagaggatgacgcaatgaaagcactggctcggtttggcaaggcctttggcggctacaagatgattgatgtcccacaacccatgtgtggcccggaagatgtagtgattgaaattaaagccgcggcaatctgcggcgcagacatgaagcactacaatgtcgatagcggttctgatgagtttaactctatccgcggccatgagttcgcaggttgtattgcgcaggttggtgaaaaagtcaaagactggaaagtggggcaacgcgtcgtatcggataacagcggtcacgtttgcggtgtttgtccggcctgtgaacag

SEQ ID NO: 142939 - DNA, 718 bp, Homo sapiens
atgtcagggagttatagcagtgtctgggctgaagacgacattcagtttgattcccgttttctggaattaaaaggcgacacaaaaattgatctgaagcgtttttccagccaggggtatgttgagcccggaaaatacaatttacaggttcaactaaataaacagccattggcggaagagtacgatatttactggtatgctggtgaagatgacgttagcaaaagctatgcttgtctgacaccggaactggtggcgcagtttggtttaaaagaagacgtggcgaaaaatctgcaatggagccacgatggtaaatgcctgaagcccggtcaactggaaggcgtggaaattaaggctgatttaagccagtccgcattagtcatttcactaccgcaggcttacctcgaatatacctggcccgactgggatccaccttctcgttgggatgatggcatctccgggatcattgcggactacagcatcactgcgcaaacacgacacgaagaaaatggcggcgatgacagtaacgagatcagaggcaacgggacgtcgatgtctccatggctcgttcagccattgctacaatgtcatgctcggtgccctaacactggctacgcagtcctacctatcgacctgggtctgaacttttgtggtaatattcttgatgttacgatgacctgtggtgtcttgcatcgcaatttgtctagcgcacatgtgtctgtgg

SEQ ID NO: 142940 - DNA, 1956 bp, Homo sapiens
atgttgctgaaagagtgccggatgcggcgtgaacgccttatccggcctacaaatgctatcaacgcgctcggtcagtcccctcgccccaccggggaagagggttacggggggatattggacaaatttttaaaatttcttgggtccctggcatcccagcagatgtctttgtggttgatgaatggcggcgactggtttattgcgctggcagataatcaacagaaacaagcgaaaacggcgctggaaaaatgtcagcatttgccctttattcttgaagtacacagtcgcaccggcaagcatgttattgctcatgccgattatccagatgatgtttatgaatggcaaaaggacgttgatttgcatcaggtcttgtggagccgctcgcgattaggtgaacgccaaaaagggcagggaattacaggtgctgatcatttctggtttggtcatacaccgttgcgacatcgcgtggatattggccacctgcattatattgataccggtgtgcgtgccgggcgcagtattccgctgaagaaaaacgttgatgacgcgctgaaaaacccgaacgtcaccagcgtagagcatgtggtggtactgaagcgtactggcgggaaaattgactggcaggaagggcgcgacctgtggtggcacgacctgcgagatagcccgctaatcagtcccaaaatcaaccccagcgatccgccaattgaaaagccaatcagcgcccgccaggagctgatcgccagatgctgccacagttcgccgctggcggagagcgtccagaacgccgtcaccactccttccggtgaaggcaaaatacgcgtcgacagccagccaaccgaggaggccagttgccacaccgccacgatgcccaccggtaaaaaccaaggggcaacgcgcaataaccacttcttcactggcgttgccattatttcttccttagctttgcgcgactttacgggggataaaatcattcgccaccgcttcgccttgcggattcagcggctgcggctggggaatttccgggatggcgacatccagaagcgggaacagcaactcgccaacccgatacgcttcttccagatgcggatagcccgaaagcacaaaactgtcgatgccaagcgcggcatattcgttgattcgcgcagcgacctttttgagttctgcctcgagtttatcgatagccccacaaaaggtgtcatattcacgactgccaataccgattgcgccaaagcggactgcagaaagatcgggcttctgttcctgcaatgcttcatagaaaggagaaaggttgtccggaatatctccggcaccgtgggtggagctgataaccagccagatcccctgaggcagaggcagcagctgcatgcttcaggtcatgggagtggagtcgctattatgcctggcgggcggttaccgtcattaaaagccaaactggcgctgggcgaagattacctcaattccgatattttcgacggttttaattatgttggtggcagtgtcagcactgacgatcaaatgttgcctcccaatctgcgcggctacgcgccagacatttccggcgtggcacacaccacagcaaaagtgaccgtcagccagatggggcgtgtgatttacgaaacgcaggttccggctggaccgtttcgtattcaggatcttggtgattccgtctccggtacgttgcatattcgcattgaagaacagaacggccaggtgcaggaatatgacatcagcaccgcctcgatgccatacctcactcgcccaggccaggttcgctataagatcatgatgggacgtccgcaagagtggggccaccatgtcgaggggggatttttctctggtgctgaagcctcctggggcatcgctaacggctggtcgttatatggcggtgcgctgggtgatgaaaactatcagtctgcggcgctgggcgtcggtcgcgatttgtctaccttcgaggcttaa

SEQ ID NO: 142941 - DNA, 681 bp, Homo sapiens
atgaatgcagcatttgtaaggcaagcccagggtgacatcagagagaagctgcaaaagctagagggttttgcaggcatgaatgccacccagcttatagaagtggccaccgaggtgtacattaactgtgaccaagaggcaaaaaaggaaacagagcagaggcttaggaaaaaggccaacctgttagcggcagccctcacaaaaaggaaaattaacattgtaaagggacgcgaatgttcacatgggtgtgggcatggaagaggccaagttgaacagcgagccaagagatggctgaggctaaggggaggatgggtcaaggctttccccgtcaggactgagaaagcacgagaagtaactaaagtactgttaagagacattatccccggatttggactgcccctgactctagcgtcagacaatggaccagcattcatagccaagatagttcaagaactaacacagttattgaaaataaagtggaagttacacatagcctactggccacagagctcagaaaaagtggaacacatgaaccagacactcaaacagctactaaaaaaattttgccaagaaactcatctaaggtgggatcaggtcctgcccatggtcctcctccgagtgaggtacacccccaccaaacaaactgggtattcacctatgagatcttgttcggccaatttaaag

SEQ ID NO: 142942 - DNA, 966 bp, Homo sapiens
atgttcgacgccattagctatctggtgctggcagggctgtgcgcctcactgctgggcgatgcgctaaccctgttgccacgtcaacgtctgattgcgattaaggacgttttccgtccaggccatgccgattacacctacgaacaaaaatacggtctgcgcgattatcgcggcggtggacgttcttccgcccgcgaaaccgccatgcgcgtggcggcaggagctattgccaaaaaatatctcgccgagaaatttggtattgaaatccgtggctgcctgatgcgttgcactggcggcagcacagttaacggcgaggtttcaccccagccagatagacactaccgtcatcatcgacaactaaataaacagccattggcggaagagtacgatatttactggtatgctggtgaagatgacgttagcaaaagctatgcttgtctgacaccggaactggtggcgcagtttggtttaaaagaagacgtggcgaaaaatctgcaatggagccacgatggtaaatgcctgaagcccggtcaactggaaggcgtggaaattaaggctgatttaagccagtccgcattagtcatttcactaccgcaggcttacctcgaatatacctggcccgactgggatccaccttctcgttgggatgatggcatctccgggatcattgcggactacagcatcactgcgcaaacacgacacgaagaaaatggcggcgatgacagtaacgagatcagcggcaacgggacggtcggggttaacctggggccatggcgtatgcgcgctgactggcagaccaactatcaacatacgcgcagtaatgatgatgacgatgaatttggcggcgatgacacacaaaaaaaatgggagtggagtcgctattatgcctggcgggcgttaccgtcattaaaagccaaactggcgctgggcgaagattacctcaattccgatattttcgacggtttatga

SEQ ID NO: 142943 - DNA, 593 bp, Homo sapiens
tgagtttcatgtcggtatcgtgggcttagggtcaatgggaatgggaccagccctgtcatatgtccgcgcaggtctttctacttggggcgcagacctgaacagcaatgcctgcgttacgttgaaagaggcaggtgcttgcggggtttctgataacgccgcgacgtttgccgaaaaactggacgcactgctggtgctggtggtcaatgcggcccaggttaaacaggtgctgtttggtgaaacaggcgttgcacaacatctgaaacccggtacggcagtaatggtttcttccactatcgctagtgctgatgcgcaagaaattgctaccgctctggctggattcgatctggaaatgctggatgcgccagtttctggtggtgcagtaaaagccgctaacggtgaaatgactgtcatggcctccggtagcgatattgcctttgaacgactggcacccgtgctggaagccgttgccggaaaagtttatcgcataggtgcagaaccgggactaggttcgaccgtaaaaattattcaccagttgttagcgggcgtacatattgctgccggagccgaagcgatggcacttgcagcccgtgcgg

SEQ ID NO: 142944 - DNA, 1384 bp, Homo sapiens
atggccaatggggcccccccccgagtgctgcagcagctggttgaggaggatcgaatgagaagggcacacagtgggcatccaggatctccccgaggtagcctgagccgccaccccagctcccagttggcaggtcctggggtggaggggggtgaaggcacccagaaacctcgggactacatcatccttgccatcctgtcctgcttctgccccatgtggcctgtcaacatcgtggccttcgcttatgctgtcatgatgccgttgactccagagccgccctctgggcgcgtggaggggccccccgcatgggaagcagccccatggccctcactgccctgtgggccctgcatccccatcatgctggtcctggccaccctggctgcgctcttcatcctcaccaccgctgtgttggctgaacgcctgttccgccgtgctctccgcccagaccccagccaccgtgcacccaccctgagtatcccaggtcgcatgctcaacctgaatgcctttgaatccggcatgctgtttgagcagcagctgattgaagatgagtctctgctacgctaccaggcctgcgccgatttctggcgtcgccactgctacccgctgccgcgtgaaatagcccaggtcgtctttgaaacctggaaagggccgcaggcgttgctgcgcgatattaatcgttatctgcaaggcgaagcgccggttatcaaagcaccgccgcccgatgatgaaacgctggcttcccgtcacgcgcaaattgtggcgcgtattgatacggtaaaacagcagtggcgcgacgcagtgggtgaactggatgcgctgatcgaatcttctggtattgatcgacgcaagtttaaccgtagcaatcaggctaaatggatcgacaagatcagcgcctgggcagaagaagagaccaaacagttatcagttgccggagtcgctggaaaaattctcccagcgtttcttagaagatcgcacgaaggccgggggggcgatcgatcaactgcttgcagaaccattgtcgatccgcgatctggtgatcacccgcgcattggctgagatccgcgaaacagtagcgcgtgaaaaacgccgccgtggcgaattgggttttgatgacatgttaagtcggctcgattccgcgctgcgtagcgaaagcggtgaggtgttggcagcggcgatccgtacgcgattcccggtggcaatgatcgatgaatttcaggataccgacccccagcagtaccgaatttttcgccgtatctggcaccatcagccggaaaccgcattgttgctaattggcgacccgaagcaggccatatatgcattccggggtgcggatatcttcacttatatgaaggcgcgtagcgaagttcacgcccaactacacatttag

SEQ ID NO: 142945 - DNA, 1986 bp, Homo sapiens
atgaaaaagatcctgacaaccccgatcaaagctgaagatctgcaagatattcgcgtcggcgatgtgatctacctgaccggtacgctggtgacctgccgcgacgtttgtcaccgccgtttgatcgaactgaaacgtccgatcccttacgatctcaacggcaaagcgattttcgtccgctgcattcttgatgctgatgcccagcgcgaaggtatcaatgcctcgacacgctacccgaaaaactgggtgcagtcgggggatccggcgcgcgaatccaccatgattcagtcacaaattaaccgcaatattcgtcttgatcttgccgatgccattttgctcagcaaagctaaaaaagatctctcatttgccgagattgccgacggcaccggtctggcagaagcctttgtaaccgcggctttgctgggtcagcaggcgcttcctgccgacgccgcccgcctgaatattgcatgccagcgcggcgcgtcgaagaggcggttatcaaaggaccgcgtggatgcaggcggcagctatgtgtttgtccagcgttgggaacacaacctgaagcagctcaaccggatgagcgttcacgatcaggagatggtgatcgggcgcaccaaagaggccaacgaagagatcgacggcgacgaacgtccggaaacctctcacctcacccgcgttgatctgaaagaagatggcaaagggctgaagattgttcgccagagcctgccgtacggcactgccagtggcactcacggtctgtacttctgcgcctactgcgcgcgtctgcataacattgagcagcaactgctgagcatgtttggcgataccgatgctgtagcgcgtaccatctcgggcaaccacgcgaatgacttcgcaaagacgatcagcaatacgcgtgcgcccgacggagataaagtcgtagtaaggagaaaggcgtttgaaatcggtatagataagcgatggcagagaatcaacaatgtaatcgccattaagcgtgaacggttcaatccatttagcctgattgctacggttaaacttgcgtcgatcaataccagaagattcgatcagcgcatccagttcacccactgcgtcgcgccactgctgttttaccgtatcaatacgcgccacaatttgcgcataacgattaatatcgcgcagcaacgcctgcggccctttccaggtttcaaagacgacctgggctatttcacgcggcagcttaagcaggtggcgacgcagcaaatcggcgcaggctcattcaacatgtctgcagccttcctctctacacagggcttccacgtggaccacacggccgagctgcggggaatccggtggaccagcagtttgcggcgggagacctcggactatcaccgcacgctgacgcccaccctggaggcactgatgatgtacgttggtgtctcatctccacttaaaaacgttgggactcaggtgtataagctggcgcagggcaatattctggttggcggcgcaggagcctccgctggcggtagcagtgttcaggttaaccaactgaacggtggacggatcaccaatggtgcggttattgaacgtgaattgcccagccagtttggcgtcgggaatacccttaatttgcaacttaacgacgaagatttcagcatggcgcagcaaatcgctgacaccatcaaccgcgtgcgtggatatggcagcgccaccgcgttagatgcgcggactattcaggtgcgcgtaccgagtggcaacagttcccaggtccgcttccttgccgatattcagaatatgcaggttaatgtcaccccgcaggacgctaaagtagtgattaactcgcgcaccggttcggtggtgatgaatcgcgaagtgaccctcgacagctgcgcggtagcgcaggggaatctctcagtaacagttaatcgtcaggccaatgtcagccagccagatacaccgtttggtggtggacagactgtggttactccacaaacgcagatcgatttgtag

SEQ ID NO: 142946 - DNA, 2118 bp, Homo sapiens; identical to SEQ ID NO: 131745

SEQ ID NO: 142947 - DNA, 8337 bp, Homo sapiens
  misc_feature (1)...(8337): n = a,t,c or g
atgaaaattaatcgtattgttaatgagggatttatgaaaacgatgctggcagcttatttaccaggaaattcgaccgtcgatctgcgggaagttgcggtgccgacgccggggattaaccaggtactgatcaaaatgaaatcctccgggatttgcggaagcgatgtccactatatctatcatcaacaccgtgccacagcggcggcacccgataaaccgttataccagggctttatcaacggtcatgaaccgtgcgggcagattgtggcgatggggcaaggctgccgccattttaaagagggcgaccgcgtgctggtgtatcacatttctggcttccgcattcggttattctggcgacaaacagtccgcagggtgccgtggtggctgctcggttggtgtgagcgggtgccggaagcggatgaggtgctgcctgcgccgctgccgccgtaccgggtactgaccgggctggtggaccgcttcgggcgcacacagacgttccaccgcgaagccgccggtgaattcagcggcgaaatcaccggcgtgacggatggtgcctggcgtcacttccggctggtactgaccacgcaggcgcagcgggcagaagaagcccggcagcaggccatttccggcgggacggaaccgtccgcttttcctgataccctgccgggttacaccgaatatggccgggacaacggcatccgtctgtctgccgtgtggctgacgcacgacccggaatacccggagaatttacctgccgcgccgctggtgcgctatggctggacgccacgcggcgaactggcggtggtgtatgaccgtagtggcaaacaggtgcgcagctttacttacgatgataaataccggggccggatggtggcgcaccgtcacacgggccggccggaaatccgttaccgttacgacagcgacgggcgggtgacagaacagctaaacccggcaggcttaagctacacgtatcagtatgagacagaccgcatcaccatcaccgacagacttgaacgccgtgaagtgctgaaacgcaggcagagccgggatgatgacctttacccttatgtaatctcctcctctcnaaagtgtattcacacaaacctagatctgcgcagacggcgtattgaccgtttcagtccactcacacagtaccgcttcacgcaggcgcgccatctcttcttccagatgtgcgttcagccccagtttgtcgtcaatgatcactgctttcagtttgtcggcagtacggatgtagaacatcatgaagcggtcgagatatttgatcagcgtttcgcgatcgatatccgccgccagcagatccgcatgacgcggtttcatgccgccgttaccgcaaacacttcatcaacagcgacaagcgtgacccgaacgtgcagatggtgccagagcgcgaacagcaccgtccggcaacgccgtatgaacgtatcccataactctggtggaggacaacgcatgagccagtggaaagacatctgcaaaatcgatgacatcctgcctgaaaccggcgtctgcgcgctgttaggtgacgagcaggtcgcgattttccgcccgtatcacagcgatcaggtgtttgcgatcagcaacatcgacccgttcttcgagtccagcgtgctgtcacgcggactgattgcggaacaccagggcgagctgtgggtcgccagcccgctgaaaaaacagcgttttcgcttaagcgacggcttgtgcatggaagacgaacagttttccgtcaaacattacgaagcgcagagtgaaagacggcgtggtggtaccgagtcagattggccggaaagtagtggtcacttccgcttaaatcttgcgcaaacatttaactcgtttggcgcaattatcgcggttgtctttgggcaaagtcttattttgtctaacgtgccacatcaatcgcaagacgttctcgataaaatgtctccagagcaattgagtgcgtataaacacagcctggtattatcggtacagacaccttatatgatcatcgtggctatcgtgttactggtcgccctgctgatcatgctgacgaaattcccggcattgcagagtgataatcacagtgacgccaaacaaggatcgttctccgcatcgctttctcgcctggcgcgtattcgccactggggctgggggcgcaattctgctatgtcggggcacaacgggctgtggggctattggaatcgtaagtgtgaaaaaatccagagatacactcgatctcgtacccgtgctgtcgatcacatcaacgtcgtattcatcaacgtgaactttcagtgcgcctgccagcttctgcccttcagtcttcggtacagaaatgtagttttcgatatcaacggtatcgaggatctgaccaccaaaacgttcgcccatcagaccggtacggatgcctttacgtgcggactcttctgccgcacgtttttccgcgccagtatcaattttggcaacgatttcagtcaacgtcatgcggccctgaccaaactctttcccgtttacgaacactgccggaacgcccatcacgttgcgatcggtgatttcgttctggaaggtgccgccgtcaattgcagtgtgcttgatgcgcgggttcagtacgctcatcaggttcagcgcctgcaccacgtccgggcagttgtggcaagagagcgagtaataggtttcgaattcaaaatcaccgtcaatatggcgaatctgctccagcagagactgcgcttctttcgacggatgaccaccggtccacagcaacgccagtaccagcgaggtgaactcgtggcccagcggggagcctgcaaaacgtggcccctggttggaacctgggttggtgatcaggaaagacggcttacgcaccggcaagctgttatcttctttaaaggtgcagtcgctgttcctcttatgattggtgaccgactgggcctctcaaaagaagctattgcgatgctcattagctcggatctcttttgctgcgggatcgtcacattattgcaatgtatcggtatcggccgctttatggggatccgcctgccggtgattatgtcggtgacctttgctgctgtaacaccaatgatagccattgggatgaacccggatatcggcctgctggggatatttggtgccactatcgccgcgggttttatcaccacattattagcgccacttatcggtcgcttgatgcctttattcccgccactggttaccggtgtggttattacttctatcgggcttagcatcattcaggtgggtattgactgggccgccggaggtatctcctttgccgtcttaatttttatcttgctcattactcgctatgcgaaaggatttatgtccaacgtcgccgtattactggggattgtatttggctttttactttcgtggatgatgaatgaagtcaatttatccgggctacatgatgcttcatggtttgcgattgttacgccgatgtcgtttggatccggcaaaccaggcatcgttgatgcgctgaaagcagacaagaaagatccgtccgggccttatgtctggatcacctacgcggcggtgcaatctctggcgactgcccttgagcgtaccggcagcgatgagccgctggcgctggtgaaagatttaaaagctaacggtgcaaacaccgtgattgggccgctgaactgggatgaaaaaggcgatcttaagggatttgattttggtgtcttccagtggcacgccgacggttcatccacggcagccaatacctacgcgctgatagccatcggctacaccatggtttacggcattatcggcatgatcaacttcgcccacggcgaggtttatatgattggcagctacgtctcatttatgatcatcgccgcgctgatgatgatgggcattgataccggctggctgctggtagctgcgggattcgtcggcgcaatcgtcattgccagcgcctacggctggagtatcgaacgggtggcttaccgcccggtgcgtaactctaagcgcctgattgcactcatctctgcaatcgccattaaccccaggaatccgcacatgcgtattgaagaagatctgaagttaggttttaaagacgttctcatccgccctaaacgctccactcttaaaagccgttccgatgttgaactggaacgtcaattcaccttcaaacattcaggtcagagctggtccggcgtgccgattatcgccgcaaatatggacaccgtaggcacattttctatggcctctgcgctggcttcttttgatattttgactgctgtgcataaacactattctgtcgaagagtggcaagcgtttatcaacaattcttccgctgatgtgctgaaacatgtgatggtttctaccggtacgtctgatgcggatttcgaaaaaactaaacagattctcgacctgaacccggcattaaacttcgtttgtattgacgtggcgaatggttattccgaacacttcgtgcagttcgttgcgaaagcgcgtgaagcgtggccgaccaaaaccattgtgctggccaccaatatggtcggttgctatagcggtaaaccgctgaatacgcaaaatattgatagtctggcggcggaaggtattcgctttaattccgcctacacctgttcaccggtttgtacgcctgcacgggccggactatttaccggtatctacgctaaccagtccggcccgtggaccaacaacgtcgcgccaggcaaaaacatctccactatggggcgctactttaaggatgccggctatcacacctgttacatcggcaaatggcatctcgacggtcatgactatttcggcactggcgagtgtccgccggagtgggacgctgattactggttcgatggggcgaactatcttagcgaactgacggaaaaagagattagcctgtggcgcaatggcctaaacagcgtcgaagatttacaggcgaaccatatcgacgaaaccttcacctgggcgcatcgtatcagcaatcgggcggtggattttctgcaacagcctgcgcgcgcagacgagcctttcctgatggtggtttcgtatgatgagccgcatcacccgttcacctgtccggtggagtatttagagaaatacgctgatttttactacgagctgggcgagaaagcacaggatgacctggctaacaaaccggaacatcaccgcttatgggcgcaggcgatgccatcgccagtcggtgatgacgggctttatcaccatccgctctattttgcctgtaatgactttgttgatgaccaaatcggacgggtcatcaatgccttaacgccagagcaacgtgaaaatacgtgggttatttatacctccgatcacggcgaaatgatgggcgcacataagctgatcagtaaaggggcggcgatgtatgacgacatcacccgcattccgctgatcatccgttcgccgcaaggggagcggcgacaggtcgatacgccagtcagtcatatcgatttactgccgacaatgatggcgctggcagatattgaaaaaccagagattctgccgggggaaaatatccttgccgtgaaagagccacgcggcgtgatggtggaatttaaccgctacgagattgagcatgacagctttggcggttttattccggttcaactaaataaacagccattggcggaagagtacgatatttactggtatgctggtgaagatgacgttagcaaaagctatgcttgtctgacaccggaactggtggcgcagtttggtttaaaagaagacgtggcgaaaaatctgcaatggagccacgatggtaaatgcctgaagcccggtcaactggaaggcgtggaaattaaggctgatttaagccagtccgcattagtcatttcactaccgcaggcttacctcgaatatacctggcccgactgggatccaccttctcgttgggatgatggcatctccgggatcattgcggactacagcatcactgcgcaaacacgacacgaagaaaatggcggcgatgacagtaacgagatcagcggcaacgggacggtcggggttaacctggggccatggcgtatgcgcgctgactggcagaccaactatcaacatacgcgcagtaatgatgatgacgatgaatttggcggcgatgacacacaaaaaaaatgggagtggagtcgctattatgcgatctacggtaccagtcacctgaaagctcgtttgcccggcgcttaccaacgcactgacatccgcatggttcaaagactgatgatcggccagcggtacacatttttccggttgtacgccacacatcttcagcgtggcaaaaaagcgcggcggatgcccaatccccgccatcgccactacatgttcaagctgagcaacgtcacaacgcgtaccgggtgttgcgccagaatggcttttaccgcatcagaacgaacgggagaaatgtttattggttttgattacggtacagcaaactgttcagtggcggtcatgcgtgacggtaaaccgcatttgctaaaaatggaaaacgacagcacgctgctgccttcaatgctttgcgcgccaacgcgtgaagcggtaagcgaatggctgtaccgccatcatgatgttccggcagacgacgatgaaacgcaggcgctgttacgtcgggcgattcgttataaccgcgaagaagatatcgatgttacggcgaaaagcgtgcagttcggtctttcctcactggcacagtacattgatgatccagaagaagtgtggtttgtgaaatcaccaaaatcgttcctcggtgccagcggcttaaaaccgcagcaggtagcgctgtttgaggatctggtctgcgcaatgatgttgcacattcgccagcaggcgcaggcacagctgccagaagcgattactcaggcggtgattggtcgtccgatcaacttccaggggctgggcggtgatgaagcaaacacccaggcgcaagggattctggaacgcgcggcgaagcgtgccggattcacggacgtggtattccagtacgagccggtcgcggctgggctggattacgaagccaccttgcacgaagaaaaacgggtgctggtggtggatatcggcggtggtacgactgactgttcattgctgctgatggggccgcagtggcgttcgcgtctcgatcgtgaagccagcctgctgggtcacagtggttgccgtattggcggtaacgatctggatatcgcgctggcgtttaaaaacctgatgccactgctgggtatgggtggcgaaaccgaaaaaggcatcgccctgccgatcctgccgtggtggaatgcggttgccatcaacgacgtacctgcgcagagtgatttctacagtagtgccaacggtcgtctgcttaacgatctggtacgcgatgcccgcgaaccggaaaaagtggccctgttacagaaagtctggcgtcagcgtttaagctatcgcctggtgcgtagcgcagaagagtgcaaaattgctctttcaagcgtagcggaaacccgcgcctcactgccgtttatcagcaatgaactggctacgctgattagccagcgagggctggaaagcgccctcagccagccactgacgcggattctggaacaggcgcaactggcctggataacgcccaggaaaaaccggacgtatctacctgaccggcgctttaacgataactgcgaaggcgtcagctttcagagaagcaccaccaaccggcgcgccgtcgatatccggctgagcaaacagttctgcagcgttagacgcgtttacagagccgccgtactgaatgatcacttgttcagcgatgttagcgtcaactttagcgatgtggtcacggatgaatttgtgaacagcctgtgcctgagccggagttgcagatttgccagtaccgattgcccatacaggttcgtaagcgataaccgcaccttcgaatgccgcagcaccctgagttttcagtaccgcgtcgatctgacgtgcgcaaacttcttcagttttgcccgcttcattttcagcttcggtttcaccgatgcacagaaccggagtcaggccctgctctttcagcaccgcgaattttttcgcgatcagttcgtcagattctttgtggtaagtacgacgttcagagtgaccgatgatgatgtactgtgcgccgatgtctttcagcatagcagcagaggtttcaccggtgaatgcgccggacaggttcaggtccacgttttgcgcacccagcatgatgtggctgccttcagcttcgcgcttcgccatatcgatatacatttccggtggtgcgattgcaaccgcacagccagcaacacctgccagctctttacgcaggttagaaaccagctcgtgaaccatgtggcggctgccgttcagtttccagttacccatcactaa

SEQ ID NO: 142948 - DNA, 4762 bp, Homo sapiens
atgaatgcagcatttgtaaggcaagcccagggtgacatcagagagaagctgcaaaagctagagggttttgcaggcatgaatgccacccagcttatagaagtggccaccgaggtgtacattaactgtgaccaagaggcaaaaaaggaaacagagcagaggcttaggaaaaaggccaacctgttagcggcagccctcacaaaaaggaaaattaacattgtaaagggacgcgaatgttcacatggtggaacaaccccggttgatggaaaagatcccacgggtaccaaaatcgcgcgcaatatccgcattgtaaatctggatggtagccggactgttacagacggtgcgcatgaggtcgagaacattggtgacaacggcacggttaacaacaaaggagatattgttgtttccgatactggatcgattggcgtgctcatcaacggtgagggggcaacagtatccaatacgggtgatgttaacgttagccatgaagcgacagggttcagcatcactaccaacagtgggaagttttcgctggcagacagtatgcagattggcgatttctcgaccggggtagatcttaatggcaacaataacagcgtgacactggcggcaaaagatctaaaagtggtcgggcagaaagcgacgggcataaacgtttctggcgatgcgaatacagtgaatatcactggtaacgttctggttgataaggataaaaccgcagacaatgcggcggaatatttcttcgatccatccgtgggtatcaacgtttacggcagtgataataacgtgacgctggatggaaagttaactgttgtatcagacagtgaggttacttctcgtcagagtaatttatttgatggcagcgcagagaaaacgacttttgttggcggtaactgtaccgtaagcctgatgttgatgtcgttgggtggtttattcgccaatgatcttgttgattgggtgtccgttgcaacctaccaggccgcttccggcggtggtgcgcgacatatgcgtgagttattaacccagatgggccatctgtatggccatgtggcagatggacttgcggaccccgtcctctgctattctcgatatcgaacgcaaagtcacaaccttaacccgtagcggtgagctgccggtggataactttggcgtgccgctggcgggtagcctgattccgtggatcgacaaacagctcgataacggtcagagccgcgaagagtggaaagggcaggcggaaaccgacaagatcctcaacacatcttccgtaattccggtagatggtttatgtgtgcgtgtcggggcattgcgctgccacagccaggcattcactattaaattgaaaaaagatgtgtctattccgaccgtggaagaactgctggctgcgcacaatccgtgggcgaaagtcgttccgaacgatcgggaaatcactatgcgtgagctaaccccagctgccgttaccggcacgctgaccacgccggtaggccgcctgcgtaagctgaatatgggaccagagttcctgtcagcctttaccgtgggcgaccagctgctgtggggggccgcggagccgctgcgtcggatgcggcttttactgcaccaccagaaactggcgcatccagcatttccagatcgaatccagccagagcggtagcaatttcttgcgcatcagcactagcgatagtggaagaaaccattactgccgtaccgggtttcagatgttgtgcaacgcctgtttcaccaaacagcacctgtttaacctgggccgcattgaccaccagcaccagcagtgcgtccagtttttcggcaaacgtcgcggcgttatcagaaaccccgcaagcacctgcctctttcaacgtagcgcaggcattgctgttcaggtctgcgccccagtgatcggacatgattcggcgccacaaaatgccactcttagggatgatgaaacgctggcttcccgtcacgcgcaaattgtggcgcgtattgatacggtaaaacagcagtggcgcgacgcagtgggtgaactggatgcgctgatcgaatcttctggtattgatcgacgcaagtttaaccgtagcaatcaggctaaatggatcgacaagatcagcgcctgggcagaagaagagacaaacagttatcatgttgccggagtcgctggaaaaattctcccagcgtttcttagaagatcgcacgaaggccgggggggaaaccccgcgacctccgctgtttgaggcgatcgatcaactgcttgcagacccattgtcgatccgcgatctggtatgcatccgcgcattggctgagatccgcgaaacagtagcgcgtgaaaaacgccgccgtggcgaattgggttttgatgacatgttaagtcggctcgattccgcgctgcgtagcgaaagcggtgaggtgttggcagcggcgatccgtacgcgattcccggtggcaatgatcgatgaatttcaggataccgacccccagcagtaccgaatttttcgccgtatctggcaccatcagccggaaaccgcattgttgctaattggcgaagaagacgtggcgaaaaatctgcaatggagccacgatggtaaatgcctgaagcccggtcaactggaaggcgtggaaattaaggctgatttaagccagtccgcattagtcatttcactaccgcaggcttacctcgaatatacctggcccgactgggatccaccttctcgttgggatgatggcatctccgggatcattgcggactacagcatcactgcgcaaacacgacacgaagaaaatggcggcgatgacagtaacgagatcagcggcaacgggacggtcggggttaacctggggccatggcgtatgcgcgctgactggcagaccaactatcaacatacgcgcagtaatgatgatgacgatgaatttggcggcgatgacacacaaaaaaaatgggagtggagtcgctattatgcctggcgggcgttaccgtcattaaaagccaaactggcgctgggcgaagattacctcaattccgatattttcgacggttttaattatgttggtggcagtgtcagcactgacgatcaaatgttgcctcccaatctgcgcggctacgcgccagacatttccggcgtggcacacaccagagcaaaagtgaccgtcagccagatggggcgtgtgatttacgaaacgcaggttccggctggaccgtttcgtattcaggatctcggtgattccgtctccgcatggctggtggcacataaggatgatatagagcgcaattaccggggaccactggtacaagttgttgggtggtgtgacgccattttcggcgcaggttaatgctatcaaaatgtcattgcgtaagctggaaattaatggcaaagacgagcagggtttactgacagtggggactgtgcactccttgcagggggcggaaagggcgattgttctcttttctcctgtctactcaaaacatgaagatggcaggtttcttgatagcaacagcactatcctcaatgttgctgtctcacgcgctaaagatagttttctggtatttggcgatatggaccttatcgagatgcagcccgcattttcgccgcgagggttattggcaaaatatctcttttcttcagataataatgcgttgcaatttgagtttcagaaacgacaggatttaatttccgcacatacacaaatttcaacgctgcatggtgtggagcagcatgatgaatttttgaacaagactcttgccggagctcaaaatcaagaagccgatccaaccagagacagatacataaataccttccctacatcaccgaagttttcaacgcaagggtcacactgcgtaccgcccgctggcgcgggggaagaagagctggaacagatgatccgccgtcgtgaatttggcgaaggtgaacaattaccgtctgaacgcgaactgatggcgttctttaacgtcgggcgtccttcggtgcgtgaagcgctggcagcgttaaaacgcaaaggtctggtgcaaataaacaacggcgaacgcgctcgcgtctcgcgtccttctgcggacactatcatcggtgagctttccggcatggcgaaagatttcctttctcatcccggtgggattgcccatttcgaacaattacgtctgttctttgaatccagtctggtgcgctatgcggctgaacatgccaccgatgagcaaatcgatttgctggcaaaagcactggaaatcaacagtcagtcgctggataacaacgcggcattcattcgttcagacgttgatttccaccgcgtgctggcggagatccccggtaacccaatcttcatggcgatccacgttgccctgctcgactggcttattgccgcacgcccaacggttaccgatcaggcactgcacgaacataacaacgttagttatcaacagcatattgcgatcgttgatgcgatccgccgtcatgatcctgacgaagccgatcaccaccaacaaaaagaaataatatcgttgctgacctgtgcggcggagtgcattaccgaagagggatttttctgcgtagtgctgccagagcagattggtaatggttttacggagctggcattaagcatgggctggcatttacgtttgcggacggatgtggcggaaaacgaagcgcgactgccgcatcgggtgctgctggcattctccccgcaggcgggagaatgctttagcgatcgcttagtcattcgtgggccagaccagaactattccgaagcgtatacggcgctgacccaggctttttatctgtttatgtaa

SEQ ID NO: 142949 - DNA, 1311 bp, Homo sapiens
tcagatatgcggcaacagtttaccggcatcaacgaatgccgcgtgaccgcccgcctgctggcagacaacgccaatctcttccagaccatcgaccagatactgtacctgcgcgatacgataagccagccagtcgagattcatgccgtcatacagacctaccgccagacgctccatcgcgccgccttccaggccgccatatgtcgggaagccttcctgcaccacgcaaagggttctgcactcggtgtacacatcaaagaagctgtcgtctttcatgcacagcaggccgcccatcggcaccatcgcatctttcttggcggacatcgccagcatatcggcatatttgtaggtttcgcgggtgatctgctcgatggtccagtctttgtattctgcttcacgctgcttgatgaaataggcgttttcagcaaagcgcgcggagtccattaccaccggaatatcgtatttcttcgcgatgctgtacatcgcttttaagtttgccagtgaaaccggctgaccacctgcagagttactggtgatggttgcaacgatatacggcacgttattcggaccaacttcttcaataccgcgttctaatccctcaaggtcaaagttgcctttaaagtcgtaacgcacgcccgtatcgaaggcttctttgatatagacgttacgcacggtacagccgttgatctggctatggccggccgtgatcgtgatcctggccggccgttgtggttggggtcggtcaagtcgaacatcggtcatacgcaagcggcggcgggtgtggctggtgtgatcaagatggtgatggcgatgcggcacgggcagctgccacgcacgttgcacgtggaatcgccgtcgccggaggtggattggtcggcggggacggttcaactccttacggagaacacgccctggcccaggagtggtcgtgttcgtcgggtgggggtgtcgtcgttcgggatcagtggtactaacgcgcacgtcatcctcgaacagcccccgggagtgccgagtcagtctgatgtctcctcgctggatgttgggtactcgctggcgttgacacggtcggcgctggatgagcgagcggtggtgctggggtcggaccgtgaaacattgttgtgcggtgtgaaagcgcttgtctgcccggtcatgaggcttctgggttggtgaccggatcttttggggcttgggggcgcatcgggtttgtgttttccggtcaaggtggtcaatggcttgggataggccgggggctttatcaggcttttccggtgttcgctgctgcctttgacgaacttgtgccgagctggatgacat

SEQ ID NO: 142950 - DNA, 284 bp, Homo sapiens
atggtgtacacacccagaacaccaattgctgtacgtgtcgatctccactatcccaaaatagttgataacggtgacaatatctgttgcttccctaacctggaacctggggtgatatcccggatgcgtgaatccctcagagctaagctggaggctgaccgtacccgtaagccttccaacctgggccaaaaaccttcccggcccttccgccaaaggtttccaaaagtggaatttttcccctggccctttaagcccttccgcggaagtaagcttggggaattaaccag

SEQ ID NO: 142951 - DNA, 1188 bp, Homo sapiens
atgaaggattatgtaatggaaaactttaaacatctccctgaaccgttccgcattcgtgttattgagccagtaaaacgtaccactcgcgcttatcgtgaagaggcaattattaaatccggtatgaacccgttcctgctggatagcgaagatgtttttatcgatttactgaccgacagcggcaccggggcggtgacgcagagcatgcaggctgcgatgatgcgcggcgacgaagcctacagcggcagtcgtagctactatgcgttagccgagtcagtgaaaaatatctttggttatcaatacaccattccgactcaccagggccgtggcgcagagcaaatctatattccggtactgattaaaaaacgcgagcatgaaaaaggcctggatcgcaccaaaatggtggcgttctctaactatctctttgataccacgcaaggccatagccatatcaacggctgtaccgtgcgtaacgtctatatcaaagaagccttcgatacgggcgtgcgttacgactttacaggatattgcgccaatacgagcgtcaacgctattgaagcggcttgccagctaaagcaacaggcagcagaggcgcaggtgacagccttaagtgtgggcggtaaagccctgaccaacgccaaagggcgtaaagatgtgctatcgcgcggcccggatgaactgattgtggtgattgatgaccagttcgagcaggcactggcgcaacaaacggcgagcgcactggctgcagccgcccagaaagcaggctttgatctgatcctctgtggcgatggttcttccgacctttatgcccagcaggttggtctgctggtgggcgaaatcctcaatattccggcagttaacggcgtcagcaaaattatctccctgacggcagataccctcaccgttgagcgcgaactggacgatgaaaccgaaaccttaagcattccgctgcctgcggtagttgctgtttccactgatatcaactccccacaaattccttcgatgaaagccattctcggcgcggcgaacaagcccgtccaggtatggtcggcggcggatatgggttcaaacgcagaggcagcctggtcagaacaacaggttgccgcgccgaaacagcgcgaacgtcagcgcatcgtgattgaaggcgacgtggaagaacagatcgccgcatttgctgaaaatcttcgcaaa

SEQ ID NO: 142952 - DNA, 878 bp, Homo sapiens; identical to SEQ ID NO: 138568

SEQ ID NO: 142953 - DNA, 2439 bp, Homo sapiens
ttattgatagtgttttatgttcagataatgcccgatgactttgtcatgcagctccaccgattttgagaacgacagcgacttccgtcccagccgtgccaggtgctgcctcagattcaggttatgccgctcaattcgctgcgtatatcgcttgctgattacgtgcagctttcccttcaggcgggattcatacagcggccagccatccgtcatccatatcaccacgtcaaagggtgacagcaggctcataagacgccccagcgtcgccatagtgcgttcaccgaatacgtgcgcaacaaccgtcttccggagactgtcatacgcgtaaaacagccagcgctggcgcgatttagccccgacatagccccactgttcgtccatttccgcgcagaggggatcctttctgggggggaaatccagcgatggctggattatgtcgtcaattaaaaatgcggcgagtagattagcaaatatccacgctttcgcgagttcaggttcctttgcacgcaaagcatccaggtgcagcaaacttttgagccgcttaaaagccagttcaatttgccatcgcagacggtaacaatcagccacttgctctgctgaatattcatcttccggtaatgatgttagcaatagcacatggcccgctgcttccagcgtttccgcctgaactactcgtccttttcgacgattctcgctgagcagtcgggttttactgattaatgactgcagtttgccacgtttggtgtaaagcaaattgtaataacgcgaccacatcggcgtatcttcatcatcaccgtcattaaattcgtagccatccatatgtttatacatggtgtcggaaagggtgtagaaacccgacgtcgaatagcgatagcccatcaattgaaagttagtgcccaagtggttgagcgttttggcatacagaaaacgatatgactgacctttatgttcgctttgatctgctagcgtactcttcgcctgggtcgcatcgaacgaaattgctccgaaatcgccgaggttaaatcccagaccaaacatggcggcacggtaatattcagcatattgtccaccaccataccaggtcgttccccacggtccgccccactgcaacgtggcctgggcaaatttgctctcctgctgttcattactattggttctgtatttcgccagtgtcaccgcgtatttgattcgcccctgacgctggagtaatggcacactggagaacggtacgctgtagctattgacgctgccgtccgcggcgaacgcgttacgtttaatgttgtcgtcggtgacggcagatggccagaggacatcttcaatacggaaagagccagatttgtaatatgccagttccgcgctgttctggtctgcggttacagccaggatgcccattgccgcgccagcatgagcaccatcccagacggtcagcttgccagaagtggcatccagcatgagcggcgtcatggccctccccaacatcaagccaagccagattttaatgtgtttacttattgtctgtcttccccagtgaaatgtacgcttcatttcctccagcaccttaagacggggatctctagagtcgattccagcgagttcaacacccagcgcgttgagtgcctggaactggataacctgatggaaacggcgtatgcaacggctgtttctgccaacttccgtaccgaaagccgtggcgcgcatagccgcttcgacttcccggatcgtgatgatgaaaactggctgtgccactccctgtatctgccagagtcggaatccatgacgcgccgaagcgtcaacatggaaccgaaactgcgcccggcattcccgccgaagattcgtacttataatgcggagacaggaaaatgagactcgagttttcaatttatcgctataacccggatgttgatgatgctccgcgtatgcaggattacacccgttctggcttaaatcgacacggttttgtacccatatccttgcgcctgcgacggcaatcagcccgaacacaacaattgatgcaccaccaataaccgcggccggaatggtatgaatcagcgcaccaaatttcggtgaaaagcccaacagcatggcgatgacggcagcagcaacaaacaccagcgtcgagtagactttggtcacggccatcacaccgatattttcagcataggtggtcacgccgctaccgccgacagagccggaaagcatcgttgccagaccatcgcctacgaatgcccgccccatatacgggtccatattgcgtccggtcatcccggcgactgccttgagatgacctaagttttccgccaccagaatcaccgccacgggcgcaatcagcatcattgcctgaccattaaaagcaggagtggaaaaatgtggcagaccgaaccaggcagcatggctgacgagagtaaaatcgacggcttttcccggggatcctctagagtgcga

SEQ ID NO: 142954 - DNA, 6231 bp, Homo sapiens; identical to SEQ ID NO: 127867

SEQ ID NO: 142955 - DNA, 2173 bp, Homo sapiens
aggggatccatcgcaggttcgggtgaccgtcgaaagtaatgccaaacagatcccaggtttcacgctcataccagttagcgttcgggaacagtttggtgaaggtcggtacgtgcaggtcgttttctgccagcgccaccttcagcatgatgtcgcggttacgatcgatagaaatcagatggtagaaaacggaaaaatccgcggcaggtaacccttcgcggtgtgtgcgcagacgttcgtccatgccgtgtaagtcaaacagcatgacgtaaggtttcggcagtttctttaagaaatcgccaacttccagtaattgttcacgcttgatccacacaacgggaaccccggtgcgagtcgcctgaacagtaaaggcatccggcccaaaacggttgcgcagttcgccaatcaccggatcatcaagatgatcgcgggtctgccaggcgggttcttgcgcggttaagtcggtcatattgttcaccattgcaaatggtccgtggtgactgtcggcgcagtaagcacgggagatctcttccgccagtggaccacgcaggccggaggtataaatgcgggtaaccacgccctggcgaatgtgttctaccagcggcgcatggcaatcactcagggagctggacgccagggtcaggtttttaaagcccatcttcgcgatgacgtccatcaccatattgacggtcaggtcaccgccacggaaagcgtgatggaaggaaaccgtcatgccgtcctgtaaaccagagcgacgaatcgcttcttccaggttggcgcacagtttgcgatcgcgcgctttttcagcctggtaggtttgctttggcgagttctggaaagcggcaagatcgcattcagcgcgacgattccaggccgctacccgttcttgtcgttgagattgttcaattttctgcgtcattttgattgccttattcttcgcggatgccggaaagttcagacgggcgcgatcgataaccggaccgtccaccatcttgccgttcagggaaaccacgccgaggccttcgcgagcggcggcttcagcggcttctacgacgcggcgggcgtgatccacttctttctgggtcggtgcgtagaggttgtgcagcagatcaatctgacgcgggttgatcagcgatttgccgtcaaagcccagctgtttgatgtgggcggcttcttgcagaaatccggcttcgttgttagcgtcggaatagacggtatcgaacgcctgaatacccgcagagcgcgcggcctgcaaaatggaacagcgtgcgaacagcagttcagttccttccggggagcgttctgtacgcaggttgcgcacatagtcttctgcaccgagggcgataccgatcaaacgctcggaagcgtgagcgatttccactgcgcgggtaatccccagcggagattcaatcgccgccagcaggccggtgctgccgggttcacgaccacaggctttttcgatacgcaggatctctttttcaatatccagaacatcctgagcggtatcggttttcggcagacgcacaacgtccgcaccaccgcgaacgacggcttccaggtcgttaacaccccattcggaatccagcgcgttgacacgcacaatggtttcaatatcgcgatacagcggatgttgcagcgcgtggtaaaccatgcggcgggcggtgtctttttcacgcaatgctacggagtcttcgaggtcaaacatcagggcatcagccgggtagatgaaggagttgctgaccatcgcggcattggcaccaggcacaaacaacatgccgatatagacatgaaagccagccagcgaaaaaccaacataaattgcagcgataatcacgacggctaagagacaatccagcagcgatgaccagccgaccataaatccgacgtgcgggttaatcgacttttgcgcgtaggtataggccgaaccggcctccggaaactggcgaaccagtttgccgtagctgatagcggtaaacagcacacccgccagcgccagcaaataggacgccggaacgtgaccgtcgctaatgccggagacaataccaaaagtatcaaatacggtcatcggcgtgagataggccagacccatcatcaccacctgccacaatttcagtgattttcgcagacgggttttgccgggttgcgcagcaatattcagtggtgaattaatagccat

SEQ ID NO: 142956 - DNA, 2919 bp, Homo sapiens
atggatggctacgaatttaatgacggtgatgatgaagatacgccgatgtggtcgcgttattacaatttgttttacaccaaacgtggcaaactgcaggtcaatatctcccagcaattaggcgagtacggttcgttttatttaagtggtagccagcaaacttactggcatacggatcaacaggatcggctattacagtttggctacaaggtgtatctgtatctctcctcgatgagaaatccttggggaaacgaaggaaactccgcccgtccaaaatgtgccccccccggtatacgtccggtcccggccctgaaacaagagttctcccaagaagagctcccctcaccaccaagaggttatatgcagccagagaaaaaaaaacttcgtccggactggaataaaaagggctccggaatgggtgggttctgggtctcactgacttcaaaaatgaagccgcggacccttgcgctctatggagcagataatataattatcccattttacagacaagaaaacctggaacctggggtgatatcccggatgcgtgaatccctcagagctaagctggaggctgaccgtacccgtaaggtgcgtgaggataaacgcatttaccgttgccctttatttattatatgggcgaaagagtattctgaatcagacgcttactaccacctcggggattacgatcaggacgataaccttagagggatgatcacaggagcctggtacagcgccctgagactggagagagacgatcaccctggtctggtccattttcctgaaaactgtaagtatgtgctagacaccaatagtactgacttccagcagaactaccaggcgctgttaacccgactggactacctgaccaaagttgaaagcaaagtgtttggtgaaggagaccgtaacttcggctgtagccaaatcgaactggccgtggcgcagagcaaatctatattcctggtactgattaaaaaacgcgagcaggaaaaaggcctggatcgcagcaaaatggtggcgttctctaactattactttgataccacgcagggccatagccagatcaacggctgtaccgtgcgtaacgtctatatcaaagaagccttcgatacgggcgtgcgttacgactttaaaggcaactttgcacttgagggcattagaacgcgcaagttggtccgaatcaacgtgccgtatatcgttgcaaccatcaccagtaactctgcaggtggtcagccggtttcactggcaaacttaaaagcgatgtacagcatcgcgaagaaatacgatattccggtggtaatggactccgcgcgctttgctgaaaacgcctatatcatcaagcagcgtgaagcagaatacaaagactggaccatcgagcagatcaaccgcgacaactaccaatatgccgatatgctggcgatgtccgacaagacagatgcgatggatgacgaatgggtgactcaaaacgcgaccagacataaccgaaataaaatccgacctacgaagcaaaaacgaaacagaacgcgacccgagttggaagcgttccgtaaacagcagaacgaagaagcggcgaaacgtaagctggatgtgaagatcaccccggttgtcttcatcatgaaagccgttgctgcagctcttgagcagatgcctcgcttcaatagttcgctgtcggaagacggtcagcgtctgaccctgaagaaatacatcaacatcggtgtggcggtggataccccgaacggtctggttgttccggtattcaaagacgtcaacaagaaaggcatcatcgagctgtctcgcgagctgatgactatttctaagaaagcgcgtgacggtaagctgactgcgggcgaaatgcagggcggttgcttcaccatctccagcatcggcggcctgggtactacccacttcgcgccgattgtgaacgcgccggaagtggctatcctcggcgtttccaagtccgcgatggagccggtgtggaatggtaaagagttcgtgccgcgtctgatgctgccgatttctctctccttcgaccaccgcgtgatcgacggtgctgatggtgcccgtttcattaccatcattaacaacacgctgtctgacattcgccgtctggtgatgcaaacgggaagccgacggtacatggataatcagcggtatccatcgccgccacaatcaggttgtaaccaccagattttcaatggatttaatgcgctcgacgttggcgatactcatggcatttttatcccatgcgtcaacatcataaccattggctgccaggtaaagactgttacgaccattgccacagcccagatccagcgttttacccggtttaaccacttttcacgcttccagtacttcagaaactcgccaaagcaaacctaccaggctgaaaaagcgcgcgatcgcaaactgtgcgccaacctggaagaagcgattcgtcgctctggtttacaggacggcatgacggtttccttccatcacgctttccgtggcggtgacctgaccgtcaatatggtgatggacgtcatcgcgaagatgggctttaaaaacctgaccctggcgtccagctccctgagtgattgccatgcgccgctggtagaacacattcgccagggcgtggttacccgcatttatacctccggcctgcgtggtccactggcggaagagatctcccgtggtctgctggcagaaccggtgcagatccactctcacggcggtcgtgtgcatctggtacagaacggcgaactgaatatcgacgtggctttcctcggcgtcccgtcctgtgatgaattcggtaatgccaacggatacaccggtaaagcctgctgcggatccctcggctatgcaatagtcgatgccgacaacgcaaaacaggtcgtgatgcttaccgaagaactgctgccttatacggataatccggaagcctga

SEQ ID NO: 142957 - DNA, 2004 bp, Homo sapiens
atgtccagagcaggaatgcttggggtggtgtgtgctttgctcgtctgggcttatctggccgtggggaagctggttgtgcggatgacgttcactgagctgtgcacgcatcatccatggagtctccgatcctcgacgttcgcgaacgccaggaacagcaagagcaggaagccgctgaattacaagccgttaccgctattgctgaaggtcgtcgttaatcacaaagcgggtcgcccttgtatctgtttgaaagccttgaaattgatgaccaaccacggcggcggcaactttaagaaacagtttgcccgtgctgataaatggggtgcccgcgttgctgtggtgctgggtgagtctgaagtggctaacggcacagcagtagtgaaggatttgcgctctgaacgtttcccaaatgacgtggatccgatcgaaactcgcgactggctccaggcgatcgaatcggtcatccgtgaagaaggtgttgagcgtgctcagtatctgatcgaccaactgcttgctgaagcccgcaaaggcggtgtaaacgtagccgcaggcacaggtatcagcaactacatcaacaccatccccgttgaagaacaaccggagtatccgggtaatctggaactggaacgccgtattcgttcagctatccgctggaacgccatcatgacggtgctgcgtgcgtcgaaaaaagacctcgaactgggcggccatatggcgtccttccagtcttccgcaaccatttatgatgtgtgctttaaccacttcttccgtgcacgcaacgagcaggatggcggcgacctgttttacttccagggccacatctacccgggcgtgtacgctcgtgctttcctggaaggtcgtctgactcaggagcagctggataacttccgtcaggaagttcacggcaatggcctctcttcctatccgcacccgaaactgatgccggaattctggcagttcccgaccgtatctatgggtctggcgagcaccctgaaacgtcgcgagcgcatctcggcccgtctgggggatattttaagccatctctacctcgcctctgtcgtgctgaagcgttatgactacgaaggccgtaatgaagccgacctggcgatagtgcactggggcgtacaacatgcgctgtatcacgctgaacaggcgatggatgatttactgcaaaacttccccaaccgcgtggttgccgggctgctgaatgtggtgatcttacctaccggacgtcattatctggcaccttctgacaagctggatcataaagtggcgaacattttacaagtgccgaacgccacccgttcccgcattggtcgcgggcagtacctgacgccgagcgagcataatccggttggcttgctggaacaaactctagtggatgtgattgccgacgacccaattcatcaaccggatctgaaaagagctggggaaaaacctgccgttacccgtctggatgaactggcgcacaacgcgcgaggatccccatccgcattgaaaccagagacacaaaacgcgcagctgacccactgcacgacctgcgtagcaagccgttttctgaacacatccagcccgttcggtatcggcatgaccttcgattacacggagtgctgggaaattggtgttcgtgacgactgcctggtaatgacacgcgttaagccggtgcatccagaatatgcgaagcactggaacatgaaaggcgtcatgaatgacaaaacccgcttccacgccgacaagtgggtagggtacagcaaggtgcttgcctgggtgagcttatcgcacaaagacaccttcacgggtgcgaaacggtttcaatacttccaaacgatgtacgacatggaacggcaaatcaacgcaaacctgccggttggcggcctttccaacgttgacacagagcgaactggcaaactgttccaacgcgatgacttttctgaggatagtcatgccaacgatccgaagttggttggtgatgattacgttccccaagcaccggagcaaaataactga

SEQ ID NO: 142958 - DNA, 638 bp, Homo sapiens; identical to SEQ ID NO: 138910

SEQ ID NO: 142959 - DNA, 2325 bp, Homo sapiens
ctaagtgtggtgacatacacatatggtcctagctattcgggaggctgagttgggaggagagacagagcatgggaggtcgaagaggcagtgagcttcagtaaaatcgacatctgcaatttgcggtgaagccaccagcaccagtgattgttcacccaactctcgtcgattcagagcatcatcattccctacacgataaaagacgccaacatcggcctcatcattcagtagcgcatcacggatcacgtaacagttcagcgactgcaacgataaacgcacttttggggcgcgttgccgaaaacgctgcaacacctgcggcattcggtaagagagcaacgtttcgcccgaaacaacgcgtagttccccgtccggatctgactcctttttggcagcctcacgaagcgtatccatcactcgggtaagttcataaatgtgcggcagcaacttttttccttcgcgggtaaggcacatccgtcggccaattttctcaaataactggactgaaaactcctgctcaagcgttttttccctggcgatatttgtggacttttggaaaatgtttcttggggcctgcggggggatattttttaacgaatttttctcccaataaggtccccaattaaaatcgggggttcccctgttgctggctattacgttaatccggaatttaaagccgatcctgttgtcgatatatacctgcgtggcttcaggtcgctgaatacacaaatctagcgcgctataggcaattagcatgagcatgagaacgaaaacgaccaggtagaagcggttaaacgcttttttgctgaaaatggcaaagtgctggctgttggggtgattttgggcgttggcgcactgattggctggcgctactggaacagccatcaggttgattctgcacgctccgcttctcttgcctatcaaaatgcggttaccgcagtgagcgaaggcaaaccggatagcatcccggcggcggaaaaatttgctgctgaaaataaaaatacttatggtgcgctggcttctttggaacttgcgcacattttgttgaccacaatgaactagagaagctgccgcccagttacaacaggggctggcaacacgacgatgaaatctcaagcgtgaaaatctgcgcttcaaacgtttctggcgatggtctactcggtcatcgtcgttccaggtatgttgggtaaagcaggcttcccgcctgcggcagttttcgttgcaacctgtctggttgccggactcggttctatcgtgatgggtctgtgggctaatctgccgttggcgattggttgcgccatctccctgacagcgtttaccgcattcagcctggtgctggggcaacatattagcgtacctgtcgcgctgggtgccgtgttcctgatgggtgtgctgtttacggtaatttctgccacgggtatccgtagctggattttgcgcaacttgcctcacggtgtggcgcacggcacggggattggtatcggtctgttcctgctgctcattgccgctaacggtgtcggtctggtgattaacaaccgcttgatggtctgcccgttgcgctgggtgatttcgcgaccagagatttttcagcgttgagatgaaatccgggcaaggggcgatgtttgccataattccgcgggaaagccccgagtaaaaatggttgtgcgagcagacaatccctggcatcacaatccggccatgcatctctttgaagctggcgtcggggtagcgttgcgtcagggcatcgccgatagcgacaatcacatcgttttcgatggcgatatcaacgccttcctgcacttttgccgggtgtagctccacgcggcccagcagataatgatgatgctggtggacatggctgatgatgcggcacatatcgttcagctccggtggtacgttgttaaactgacctttgctgtcgatgtttaacacccagctttggttattcagacgtactcgtacccggcaatcttccacaaggaagcctgggttgctgctgttatcaaagtcttgcgccaggctgaagacggtgattttgtctttgtacggtttaccgttccacggacagaactgagcgcagttgccgcattcgttacagtaagcgtcgaggtgcagcgtctggaaacggttctggaagcctgggaccgcaatggagacgttggcgcggttcgggcagacatccacacacttgctgcaaacgtatttacattcgaggcaacgagcggcttcagctgggtttcttgcacatccagacttcacatcccgccttgtgcatacagactgggagtcccttgggtagcgggggacaggaatgggattggctttggccat

SEQ ID NO: 142960 - DNA, 950 bp, Homo sapiens
atgaccaaccacggcggcggcaactttaagaaacagtttgcccgtgctgataaatggggtgcccgcgttgctgtggtgctgggtgagtctgaagtggctaacggcacagcagtagtgaaggatttgcgctctggtgagcaaacggcagttgcgcaggatagcgtaccgcgcatttgcgacgttactgggttaaggaaggagaaggacagcgtggaaatttacgagaacgaaaacgaccaggtagaagcggttaaacgcttttttgctgaaaatggcaaagcactggctgttggggtgattttgggcgttggcgcactgattggctggcgctactggaacagccatcaggttgattctgcacgctccgcttctcttgcctatcaaaatgcggttaccgcagtgagcgaaggcaaaccggatagcatcccggcggcggaaaaatttgctgctgaaaataaaaatacttatgtgtctttcgatgcgcatatcgcatctcgctgggcgaatgcacgagctagacgcacttatgagcgtggcactatcgtacgacgatcgatgagcactacgtgcgtgattttcacggcacggaatataaaacgttgcgcggcagcagctacaatagctacttcatccgcgaagaaaaaaacgtgctgatcgacaccgtcgaccataaattcagccgcgaatttgtgcagaacctgcgtaatgaaatcgatctggcggatatcgattacatcgtgattaaccatgcagaagaggaccacgctggggcgctgaccgaactgatggcacaaattcccgatacgccgatctactgtacagccaacgctatcgactcgataaatggtcatcaccatcatccggagtggaattttaatgtgggcaggaaaggaaacaaactcccagcccatggagaacccgacgtctcaggccgcctttcagtccactga

SEQ ID NO: 142961 - DNA, 500 bp, Homo sapiens
  misc_feature (1)...(500): n = a,t,c or g
agttacataggccaacttctccacacacaaagctgtcacatgattttatttcaggagaagctttcttctcctggaagttcagcctgtcatctggaacctgggtaaaagtttctccacaatgactgtcatctttaatttcattgactttctcttctatgagactcctgaagtttctcctggggttttggtactcatattcaatgttctggtctttccaactttttcctacagaggtcaggttcctgaaagtttccagcatcacttccttgtagagtttcctctgggaaatatccagcaaagcccactcctccatttcctggctttaagatgtcccggggtcctctatacacctcctgtgactacagcagggcatagcgtaggtgacagagtgacagaagcctgggcagaggaaccaggtccctctcggggctggaaagaccggatcccctcgtgccgaagtccgcagagggtcatttnnnnnnnnnctgncnncgtcccct

SEQ ID NO: 142962 - DNA, 407 bp, Homo sapiens
  misc_feature (1)...(407): n = a,t,c or g
ggtgcgtcatcgtcgtgacttgntatccctgcgttacccacttatcgcctttctcacaaanggnanaannngngggacaaagtggggggtgcccgccgacagaccagaggccatcgtcgacagttttaaggtgtcgtaagggcaagcctgaacacactgaccgcaacgcacacaggcactggcaaaggcgttctcgtttatggctccgggcgggcgcaaccgcacgccagatgcgcgtgcggtttgctgttgtaaccccagcgccacacccacggcagccagcccgcctgctgtgcgaacgacatcgcgcagaaagcggcggcgaccattttgaggtttcgctgaccgggacataatggcttacaccttctccagtttgaccgcgcacttcttgaagtccgtctctg

SEQ ID NO: 142963 - DNA, 3342 bp, Homo sapiens
atggagggggtcgctttcctcaccttcctcgctgcgcgggcggcggttggtaaccgccccgcgtctccccagattgtgcggaagcaacgggagggtcatggaggcatcctgactcgggacccagtggcctttgatgatgttgctgtgaacttcacccaggaggagtgggctttgctggatatttcccagaggaaactctacaaggaagtgatgctggaaactttcaagaacctgacctctgtaggaaaaagttggaaagaccagaacattgaatatgagtaccaaaaccccaggagaaacttcaggagtctcatagaaaagaaagtcaatgaaattaaagatgacagtcattgtggagaaacttttacccaggttccagatgacaggctgaacttccaggagaagaaagcttctcctgaagtaaaatcatgtgacagctttgtgtgtgcagaagttggcataggtaactcatcttttaatatgagcatcagaggtgacactggacacaaggcatatgagtatcaggaatatggaccaaagccatataagtgtcaacaacctaaaaataagaaagccttcaggtatcgcccatccattagaacacaagaaagggatcacactggagagaaaccctatgcttgtaaagtctgtggaaaaacctttattttccattcaagcattcgaagacacatgaactcacactgggagaagccctatgaatgtagcaaatgtgataaagcatttcatagttctagttcctatcatagacatgaaagaagtcacatgggagagaagccttatcaatgcaaagaatgtggaaaagcatttgcatataccagttctcttcgtagacatgaaaggacccactctgggaaaaaaccgtatgaatgtaagcaatatggggaaggcttatcctatcttataagttttcaaacacacataagaatgaactctggagaaagaccttataaatgtaagatatgtgggaaaggcttttattctgccaagtcatttcaaacacatgaaaaaactcacactggagagaaacgctataaatgcaagcaatgtggtaaagccttcaatctttccagttcctttggatatcatgaaaggattcacagtggagccaaaccctatgagtgtaagcagtgtgggaaagccttcagatctgcctcacagcttcgagtgcacggtgggactcacactggagagaaaccctatgaatgtaaggaatgtgggaaagccttcagatctacctcacaccttcgagtgcatggtaggactcatactggagagaaaccctatgaatgtaaggaatgtgggaaagccttcagatatgtgaagcaccttcaaattcatgaaaggacagaaaaacacataagaatgccctctggagaaagaccttataaatgtagtatatgtgagaaaggcttttattctgccaagtcatttcaaacacatgaaaaaactcacactggagagaaaccctatgaatgcaaccaatgtggtaaagccttcagatgttgcaattcccttcgatatcatgaaaggactcacactggagagaaaccctatgagtgtaagcaatgtgggaaagccttcagatctgcctcacaccttcgaatgcatgaaaggactcacactggagagaaaccctatgagtgtaagcaatgtgggaaagccttcagttgtgcctcaaaccttcgaaagcatggtaggactcacactggagagaaaccctatgagtgtaagcaatgtgggaaagccttcagatctgcctcaaaccttcagatgcatgaaaggactcacactggagagaaaccctatgaatgtaaggaatgcgaaaaagcattctgtaaattctcttcttttcaaatacatgaaaggaagcacagaggagagaagccctatgaatgtaagcattgtgggaatggattcacatctgccaagattcttcaaatacatgcaagaacacacattggagagaaacactatgaatgtaaggaatgcggaaaagcattcaattatttttcttccttgcatatacacgcaaggactcatatgggagagaagccatatgaatttcctttcagtatcatgaaaaaactcacactggagagaaaccctatgagtgtaagcaatgtgggaaagccttcagatgtgccccacaccttccgatatcatgaaagaactcacactggagagaaaccctatgagtgtaagcaatgtgggaaagccttcagatcttcctcactccttcaattgcatggtaggactcacactggagagaagccctatgaatgtcaggaatgtgggaaagctttcagatctatgaagaaccttcaaagtcatgaaaggacacaaacacacgtaagaatacactctggagaaagaccttataaatgtaagctatgtgggaaaggcttttattgtcccaaatcattgcaaagacatgaaaaaactcacactggagagaaactctatgaatgcaagcaatgtggtgaagccttcagtagttccagttcctttcgataccatgaaaggactcacactggagagaaaccctataaatgcaagcaatgtgggaaatcttttagttattctgctacccatcgaatacatgaaagaactcacattggacaaaagcattatgaatgtcaggaatgtgggaaagcattccatagtcccagatcctgtcacagacatgaaaggagtcacatgggagagaaggcttatcaatgtaaggaatgtggaaaagcattcatgtgtccccgttatgttcgtagacatgaaaggacccactctaggaaaaaactttatgaatgtaagcagtgtgggaaagcattatcctctcttacaagttttcaaacacacataagaatgcactctggagaaagaccttatgaatgtaagacatgtgggaaaggcttttattctgccaagtcatttcaaagacatgaaaaaactcacagtggagagaacccgtataaatgcaagcaatgtggtaaagccttcactcgttccggttcctttcgatatcatgaaaggactcacactggagagaaaccctatgagtgtaagcaatgtgggaaagccttcagatctgccccaaatcttcaattgcatggtaggactcacactggagagaaaccgtatcaatgtaaggaatgtgggaaagctttcagatctgcctcacaacttcgaatccattgtaggattcaccctggagagaaaccctatgaatgtaagaaatgtgggaaagccttcagatatgtccagaactttcgatttcatgaaaggacacaaacacataagaatgcactctggagaaagaccttataa

SEQ ID NO: 142964 - DNA, 534 bp, Homo sapiens
atgatggaagatgaaaggcttgccctgcacttcaaaggtacagctgagctcgggcagacaaaaggaaagcaagcccagtgccagagcagcacgaagagcaccttccagcgaggccggtcactcagaggtgtctcacctaccctttccccaacatcacaacagcctcggaatttggaccagcaactggcttcagagcaaggagaagtgggagaggctccactgtgtgctgtaatccagggtgttatccccgtgctaggccggagccggagccgcgaggaacaccccccagtgtcagcgctccccgggctgcacaggaagcgccagcgagacaaagaggccgggcctgtgctcgctgacacggtgcccttccggccccacgcgggaaaagggacatttctccgctgtttggaaacgctcactcggcgagccccaaaccctcgctggacctttgggctccccctccgtaagctgcagggcgccgtggcccacagcaggcctgagatccgaacacactcggtgccgaaccgaacctaa

SEQ ID NO: 142965 - DNA, 779 bp, Homo sapiens
gtcgcagactgattgagggcaaagcgcctgcgttttctgttcgctaagtcggcaatcgggttcagcgggcagacccagctgcaaaataatcgctttcccgccagggcgtatagcacggtgataatcaccgcaccggtcaacgccaccgtggcaggcagatgaccactggcaagactttgcagcgtcatcagcggatcggtcagcggaacggtgtcgaataacaggctactgctgtagttgccgtgcaagatccacacaccaaaccatggaccgctcaaaaacatccccagcacgaagaactgacaaaggcgacgtaacaccagccaacggtgactgcgccaccagccttttttctccagcgcctcgcgcccggggtcacgtttacgatttgccattggtccccttcaaccagccgaagcgggaatggtgacctaaatcccctttcgccagtgacaacgggaacaccttgattgccgggtgttccaagaacgcatactttttcgcacttaccgcaaccggtacaggcgtcgctgtgaaccgtcggcagaaagcgggcggtgcttaccggtacgcgtgttgcgctccagctccagggtgatggcctcatcaattttcgggcattcgcgataacaaacatcgcagcgcagcccctgaaagttgagacagttttcctggtccaccagtaccgccagccccatccgcgcgtcgtcgatcgattcaatctcacgatccagcgcaccgcttgggcacactttggcgcacggaatgtcctcacacat

SEQ ID NO: 142966 - DNA, 2123 bp, Homo sapiens
tcaaagaatcttgtcaggtctgaacgctttcccatactgcttacattcatagggtttttctccagtgtgagtccttccatgcatttgaaggtgcgaggctgatctgaaggctttcccacattgcttatattcatagggcttctctccagtgtgagtcctttcatgatattgaagggaactagaagaaatgaaggctttcccacttggcatacactcatagggtttctctcccatgtgagtcctttcatgatattgaaaagaagtggaagaaataaaggcttttgcacattgcttacattgatagggtttctccctagtgtgttctttcatgatattgaaaagaactggaagaagtgaaagctttgccacattgcttgcattcatagtgtttccttccagtgtgagtcttttcatgtattcacagggtttctctccagtgtgtgtccttttatgaaatcgaagatttttgacagatctgaaggctttcccaaattgcttacactcataggggttctctccagtgtgagtcctttcatgatatcgaaaggaagtgaaggaaacaaaggctttcccacattgcttacactcatagggtttctctccagtgtaagatttttcatgtatttgaaatgacttggcagaataaaagcccctcccacatatcttacatttataaggtctctctacagagtgcattatgtgtgtttgtgtcctttcatgaattcgaaggttctgggcagatccgaagggtttcccacattccttacatgcatagggcttctctccattgtgtgtcgctttcccacattgcttacactcatagggtttctctccagtgtgagtccttacatgatatcgaagggaactggaatgaggtaaggctttaccacactgcttacatttatagggtttctctccactgtgaattttttcatgtctttgaaatgaattcacagaacaaaagtcttttccacatatcttacattcataaggtctttctccagagtgcaatcttacgtgtgtttgaaaacttgtaagagaggataatgctttcccacactgcttacattcatagagatttttcctagagtgggtcctttcatgtatacgaacataacggggacacgtgaatgcttttccacattccttacattgataagccttttctcccatgtgaatcctttcatgtctacgataggatctgggactatgaaatgctttcccacactcctgatattcataaggcttttctccagtgtgagttcttttatgtattcgatgggtagcagaataactaaaggatttaccacactgtttacattcacatggtttctctccagtgtgaattctttcatggataagatataatctgagacaatggaatgctttcccacaaaacttacatttataaggtccatccccactgtgcattaccatgtgtcttcgaacacttgaatgggaaataaaggtttttccacatactttacaagcattgggtttctctccagtgtgatccctttcttgtgttctaaaggaggggcggtatctgaaggcttttttaggttgttgacacttacatggctttggtccatattcctgatactcatatgccttgtgtccaatgtcacctctgatgttcatattaaaagatgagttacctaggccaacttctccacacacaaagctttcacatgattttacttcaggagaagctttcttctcctggaagttcagtctgtcatctggaactggggtaaaagtttctccacaatgactgtcatctttaatttcattgactttttcttctatgagactcctgaagtttctcctggggttttggtgctcatattcaatgttctggtctttccacctttttcctatagaggtcaggttcctgaaagtttccagcatcacttccctgtagagtttcctctgggaaatatccagcaaagcccactcctcctgggtgaagttcacagccacatccttaaaagccactgggtccatttctcggcttccagggtgttccggcgtcctctgcgtggctcccgcgactagtgtaggtcacagtgcaggttacagagcgacagaagctatggtggaggcacctagtccctctcgaa

SEQ ID NO: 142967 - DNA, 1715 bp, Homo sapiens
gggccgctggatgtgggtgggccggcagcgggactccggcgtcctgtcccgtccctgcccgtcgactgcggccttgcccgaagcccttttgtgcagctccgcgcccgcagcccgacgccccagcttgtgcggggccacgggagggtcatgcgcggatttcgactcgggtgtggatttcgtccgtagaggaagcagcggtctgtggggcccacagcctccactttctcctgttaaaaattatactgagatgtttcaggacccagtggcttttaaggatgtggctgtgaacttcacccaggaggagtgggctttgctggatatttcccagaagaatctctacagggaagtgatgctggaaactttctggaacctgacctctataggaaaaaagtggaaagaccagaacattgaatatgagtaccaaaaccccaggagaaacttcaggagtgtcacagaagagaaagtcaatgagattaaagaagacagtcattgtggagagacttttaccccagttccagatgacaggctgaacttccagaagaagaaagcttctcctgaagtaaaatcatgtgacagctttgtgtggtgaagttggcctaggtaactcatcttctaatatgaacatcagaggtgacactggacacaaggcatgtgaatgtcaggaatatggaccaaagccatggaagagtcaacaacctaaaaaagccttcagatatcacccctccttgagaacacaagaaagggatcacactggaaagaaaccctatgctttgttaaagaatgatgggaaaaaaccattattttaccattcaagcattcaaagacacatggtagtgcacagtggggatggaccttataaatgtaagttttgtgggaaagcattccattgtctcagtttatatcttatccatgaaagaactcacactggagagaaaccgtatgaatgtaaacaatgtggtaaatcttttagttattctgctacccatcgaatacatgaaagaactcacattggagaaaagccttatgaatgtcaggaatgtgggaaagcattccatagtcccagatcctgtcacagacatgaaaggagtcacatgggagagaaggcttatcaatgtaaggaatgtggaaaagcattcatgtgtccccgttatgttcgtagacatgaaaggacccactctaggaaaaaactttatgaatgtaagcagtgtgggaaagcattatcctctcttacaagttttcaaacacacataagaatgcactctggagaaagaccttatgaatgtaagacatgtgggaaaggcttttattctgccaagtcatttcaaagacatgaaaaaactcacagtggagagaaaccgtataaatgcaagcaatgtggtaaagccttcactcgttccggttcctttcgatatcatgaaaggactcacactggagagaaaccctatgagtgtaagcaatgtgggaaagccttcagatctgccccaaatcttcaattgcatggtaggactcacactggagagaaaccgtatcaatgtaaggaatgtgggaaagctttcagatctgcctcacaacttcgaatccatcgtaggattcacactggagagaaaccctatgaatgtaagaaatgtgggaaagccttcagatatgtccagaactttcgatttcatgaaaggacacaaacacataagaatgcactctggagaaagaccttataa

SEQ ID NO: 142968 - DNA, 2313 bp, Homo sapiens; identical to SEQ ID NO: 124197

SEQ ID NO: 142969 - DNA, 2604 bp, Homo sapiens
tttcgtgggtcgctttcctcaccttcctcgctgcgcgggcggcggttggtaaccggtcagaccagcccgagagggacctggtgcctgtacccaggcttctgtcgctctgtcgcctgcgctatgccctgctgtagtcacaggagctgtagagaggaccccggtacatctgaaagccgggaaatggacccagtggtctttgaggatgtggctgtgaacttcacccaggaagagtggacattgctggatatttcccagaagaatctcttcagggaagtgatgctggaaactttcaggaacctgacctctataggaaaaaaatggagtgaccagaacattgaatatgagtaccaaaaccccagaagaagcttcaggagtctcatagaagagaaagtcaatgaaattaaagaagacagtcattgtggagaaacttttacccaggttccagatgacagactgaacttccaggagaagaaagcttctcctgaagtaaaatcatgtgacagctttgtgtgtgcagaagttggcataggtaactcatcttttaatatgagcatcagaggtgacactggacacaaggcatatgagtatcaggaatatggaccaaagccatataagtgtcaacaacctaaaaataagaaagccttcaggtatcgcccatccattagaacacaagaaagggatcacactggagagaaaccctatgcttgtaaagtctgtggaaaaacctttattttccattcaagcattcgaagacacatggtaatgcacagtggggatggaacttataaatgtaaattttgtgggaaagccttccattctttcagtttatatcttatccatgaaagaactcacactggagagaaaccatatgaatgtaaacaatgtggtaaatcctttacttattctgctacccttcaaatacatgaaagaactcacactggggagaagccctatgaatgtagcaaatgtgataaagcatttcatagttctagttcctatcatagacatgaaagaagtcacatgggagagaagccttatcaatgcaaagaatgtggaaaagcatttgcatataccagttctcttcgtagacatgaaaggacccactctgggaaaaaaccgtatgaatgtaagcaatatggggaaggcttatcctatcttataagttttcaaacacacataagaatgaactctggagaaagaccttataaatgtaagatatgtgggaaaggcttttattctgccaagtcatttcaaacacatgaaaaaactcacactggagagaaacgctataaatgcaagcaatgtggtaaagccttcaatctttccagttcctttcgatatcatgaaaggattcacactggagagaaaccctatgagtgtaagcagtgtgggaaagccttcagatctgcctcacagcttcgagtgcacggtgggactcacactggagagaaaccctatgaatgtaaggaatgtgggaaagccttcagatctacctcacaccttcgagtgcatggtaggactcatactggagagaaaccctatgaatgtaaggaatgtgggaaagccttcagatatgtgaagcaccttcaaattcatgaaaggacagaaaaacacataagaatgccctctggagaaagaccttataaatgtagtatatgtgagaaaggcttttattctgccaagtcatttcaaacacatgaaaaaactcacactggagagaaaccctatgaatgcaaccaatgtggtaaagccttcagatgttgcaattcccttcgatatcatgaaaggactcacactggagagaaaccctatgagtgtaagcaatgtgggaaagccttcagatctgcctcacaccttcgaatgcatgaaaggactcacactggagagaaaccctatgagtgtaagcaatgtgggaaagccttcagttgtgcctcaaaccttcgaaagcatggtaggactcacactggagagaaaccctatgagtgtaagcaatgtgggaaagccttcagatctgcctcaaaccttcagatgcatgaaaggactcacactggagagaaaccctatgaatgtaaggaatgcgaaaaagcattctgtaaattctcttcttttcaaatacatgaaaggaagcacagaggagagaagccctatgaatgtaagcattgtgggaatggattcacatctgccaagattcttcaaatacatgcaagaacacacattggagagaaacactatgaatgtaaggaatgcggaaaagcattcaattatttttcttccttgcatatacacgcaaggactcatatgggagagaagccatatgaatacaataaaagcaaaggtggctttatcatggtgagctacatctcgcaggagttgggatccacatctgcagactatacaaagacaacacagattaaaagcacaatcatcattgaaatcacagagcctccaagtgtttttatctattttaatgggttaatagctgctaatccatctgcagctccttcaagcactccagttcctggcattaagggcaaggcgagggaaaggatggaacttggtgaagtgtcagcagttagggaagagaaagttgatggattatcatga

SEQ ID NO: 142970 - DNA, 1364 bp, Homo sapiens
atgagttattctgtgatgttcgctttactcctgctcacgccgctgcttttttcgctgctctgttttgcctgccggaaacggagactttctgcgactcgcacggtgaccgtattacatagcttagggatcacactgctgctgattctggcactctgggtggtccaaactgccgctgatgcaggagaaatattcgctgcgggactgtggcttcatattgatggtctgggcggtttgttcctcgccattcttggtgtgattggctttctcaccggtatttactcgattggctacatgcgtcatgaagtggcacacggcgagctttcacccgttacgctgtgcgattactacggtttcttccatctgtttttgttcaccatgctgctggttgttaccagcaataacctgattgtgatgtgggcggcgatcgaagccaccaccttaagctcggcgtttctggtaggcatttacggtcagcgttcatcgctggaagctgcatggaagtacatcattatttgtactgttggtgtcgcttttggtctgttcggtaccgtgctggtatacgccaacgccgccagcgtatgcggtaccgaccacgggggccgaatgatgcgcagttggaatggcgggcagctgatcagcaaattactggcaataactcccggataaactggtgctggatttcggcagtcaagccgaagacaacatcgccgtgctaaaggcacagcacatttccatttcccgccgaaactcagggtgcgaaagtcgagtttactgttgaccaactacagcagagtgaatacttgcagcttccggcatttattaccgtaccgcctcccaccttatggtttgtacaacgacgccgatatttccgcatctccgccccactccatccgccttatttttgccagaccaaactggcggataacagtacgttacgtttccgcctgtatgatttgtcgttaggcggcatgggcgcattactggaaacagcaaagcctgccgaattacaagaaggcatgcgcttcgctcagattgaagtcaacatggggcaatggggtgtttttcactttgacgcccagttaatctccatcagcgagcgcaaagtgattgatggcaagaatgaaaccatccccactccccgtctgagcttccgttttcttaacgtcagcccgacggtggagcggcaattacagcggattattttctctctcgagcgagaagcccgggaaaaagcggacaaagtgcgcgactgatttacatcgcgtccagtgcctgctcaagtttgtagatatagcgcggcagcctgcggcgcagggtgatttcgcgctacgtgttcgaggaaaacgtcagcatcccaaatcgtt

SEQ ID NO: 142971 - DNA, 2284 bp, Homo sapiens
gagtgtcacagaagagaaagtcaatgaaattaaagaagacagtcattgtggagaaacttttaccccagttccagatgacaggctgaacttccagaagaagaaagcttctcctgaagtaaaatcatgtgacagctttgtgtgtgaagttggcctagcgaaacctcaaaatggtcgccgccgctttctgcgcgatgtcgttcgcacagcaggcgggctggctgccgtgggtgtggcgctggggttacaacagcaaaccggacgcgcatctggcgtgcggttgcgcccgcccggagccataaacgagaacgcctttgccagtgcctgtgtgcgttgcggtcagtgtgttcaggcttgcccttacgacaccttaaaactggcgacgctggcctctggtctgtcggcgggcacgccatattttgtcgcacgggatattccttgcgaaatgtgtgaggacattccgtgcgccaaagtgtgcccaagcggtgcgctggatcgtgagattgaatcgatcgacgacgcgcggatggggctggcggtactggtggaccatgaaaactgtctcaactttcaagggctgcgctgcgatgtttgttatcgcgaatgcccgaaaattgatgaagccatcaccctggagctggagcgcaacacgcgtaccggtaagcacgcccgctttctgccgacagttcacagcgacgcctgtaccggttgcgttcttcgggctggggaggtttttgagcggcccatgtttgggtgtggggatcttgcacgggcactacaggcagtagccctgttattcgacacccttcccgctgaccgatccgctgatgacgctgcaaagtcttcccagtggtcatctgccctgccacggtggcgtgaccgctgggtctgcccgctgaacccgattaccgacttagcgaactggttacgcaggcgctttgacctcaatcagtctgcgacgatccctcgccacattcgctacgtgctgttggtggtcattctggtgggatcagccttaactggcacgctcatttgggaatggatcaaccccgtttctctgatggggcgtagcctggtaatgggcttcggcagcggcgcgctgcttattctcgcgctgtttttatttgatctactggtcgatgaacaacggctggtgcgggcacatttgtccgggccatatgaggccactgagcttgagactgctaacagacggcgtgtggcagctccccttagcacagcgactacgaaaccgcagtatgcagtccctgcctggcggcacgtagccacccggcatgaaggacgcacattcaggaagaaccctgatgcgttccagaccgccttggctctggggagctccgtggggggcttggaactgataatgagatttcacgatcagaatcggggggcctatacacagccttccttcagcactctgtatgccagtgagaaatttgaactggtttccgggaccaccatcttactcctcagggtctggactggaacctactgcagagagcaagatcgcctgtttggcggtagcacacaatgccagctggtgtctgcagaaattagaaggaagcacacagtggagcctctcccacttctccttgctctgaagccagttggtggtccaaattccgaggctgttgtgatgttggggaaaggttggaatggcgggcagctgatcagcaaattactggcaataaccccggataaactggtgctggatttcggcagtcaagccgaagacaacatcgccgtgctaaaggcacagcacattactcatggtgcgaaagtcgagtttactgttgaacaactacagcagagtgaatacttgcagcttccggcatttattaccgtaccgcctcccaccttatggtttgtacaacgacgccgatatttccgcatctccgccccactccatccgccttatttttgccagaccaaactggcggataacagtacgttacgtttccgcctgtatgatttgtcgttaggcggcatgggcgcattactggaaacagcaaagcctgccgaattacaagaaggcatgcgcttcgctcagattgaagtcaacatggggcaatggggtgtttttcactttgacgcccagttaatctccatcagcgagcgcaaagtgattgatggcaagaatgaaaccatcaccactcccgttctgagcttccgttttcttaacgtcagcccgacggtggagcggcaattacagcggattattttctctctcgagcgagaagcccgggaaaaagcggacaaagtgcgcgactga

SEQ ID NO: 142972 - DNA, 1048 bp, Homo sapiens
atgaaactcatcagtaacgatctgcgcgatggcgataaattgccgcatcgtcatgtctttaacggcatgggttacgatggcgataatatttcaccgcatctggcgtgggatgatgttcctgcgggaacgaaaagttttgttgtcacctgctacgacccggatgcgccaaccggctccggctggtggcactgggtagttgttaacttacccgctgatacccgcgtattaccgcaagggtttggctctggtctggtagcaatgccagacggcgttttgcagacgcgtaccgactttggtaaaaccgggtacgatggcgcagcaccgccgaaaggcgaaactcatcgctacatttttaccgttcacgcgctggatatagaacgtattgatgtcgatgaagcgcgaggaaaaatcatcatcgccttcagcgaagcaagaagagacagagcaaggagaacaggcacagagaacggagagagagacacgcaagaacagaaacagaacagacaggacgagctagacgagaagaagagcaagaacaagacagcacacagagaaacagcaacgaggacagaaacaggcgaatgttgcgttgatgttcctgactggccgtgacaacgaagtcgataaaattctcggcctcgaaatcggtgcagatgactacatcaccaaaccgttcaacccgcgtgaactgacgattcgtgcacgcaacctactgtcccgtaccatgaatctgggtactgtcagcgaagaacgtcgtagcgttgaaagctacaagttcaatggttgggaactggacatcaacagccgttcgttgatcggccctgatggcgagcagtacaagctgccgcgcagcgagttccgcgccatgcttcacttctgtgaaaacccaggcaaaattcagtcccgtgctgaactgctgaagaaaatgaccggccgtgagctgaaaccgcacgaccgtactgtagacgtgacgatccgccgtattcgtaaacatttcgaatctacgccggatacgccggaatatcacccggatggaccacgcccgtaa

SEQ ID NO: 142973 - DNA, 1100 bp, Homo sapiens
agcctgatgccggctgcagcgagggagggcacgctggcactggggaacacgaccgtgccaaggctggaggtgcatttggcccctgcaaggccatcgccctgctgaccctaagcaggcagccagcagggcacggccggaggctgcacggcttctccactgcacggcttgccggcctcggggcaaaactgaaaaacacagagaagcgaaaaaaggaaaaggcagacgttccagaatttcaccattcccaattcttctgcacgaccttccggaatttcaccattcccaattcttctgcacgaccttccggaatttcaccattcccaattcttctgcacgaccttccggaatttcaccattcccacttcttctgcacgaccttccggaatttcaccattcccacttcttctgcacgaccttccggaatttcaccattcccacttcttctgcacgaccttccggaatttcaccattcccaattcttctgcacgaccttccggaatttcaccattcccaattcttctgcacgaccttccggaatttcaccattcccaattcttctgcacgaccttccggaatttcaccattcccaattcttctgcacgaccttccggaatttcaccattcccaattcttctgcacgaccttccggaatttcaccattcccaattcttctgcacgaccttccggaatttcaccattctcaattcttctgcacgaccttccggaatttcaccattcccaattcttctgcacgaccttctggaatttcaccattcccaattcttctgcacgaccttccggaatttcaccattcccaattcttctgcacgaccttctggaatttcaccattcccaattcttctgcactgctcttatgttcagagtctgtggtgagcgggaatgagagtgaccctgtgtcgccaagggatttgctgtgctcagcagccagggtggcggcagaatgcatgcttctggaagagtccttcctgctcatgaccggctctgagcggctcccgaggccagactggctttgtttgccaatcttgagagtcaaaggaaacgtggctctttcagctgcttcagcaaaagagaagctctga

SEQ ID NO: 142974 - DNA, 3177 bp, Homo sapiens
atggctagcggtcgacttaacgcgttagctccggaagccacgcctcaagggcacaacctccaagtcgacatcgtttacggcgtggactaccaggcgtcagtcttcgtccagggggccgccttcgccaccggtattcctccagatctctacgcatttcaccgctacacctggaattctacccccctctacgagactcaagcttgccagtatcagatgcagttcccagtaattccgattaacgcttgcaccctccgtattaccgcggctggattttcgaagaagttccggtcatttccatgggcgtatacaatggtcagagcacccgtatttacgaccgtgaaccggcgaaatccactacggtcgcgttccggcggggtctgtggttgtttcagaaagttgacgcgaaaactcgcggcaaagtcggcattaacgaactgctgcgtaccatcgactaaaagtatgcacacgggcagcacgacgctgcccgatttttttgcagggatgagcgatgatttcacgccgccgatttttgcaggctactgccgcgacgatagccacgagctcaggtttcggttatatgcattactcctgatttctgacgcgattgctcttggcatagaacaaaagcccgatttgatattactgggcggcgattacgtattatttgatatgtcgctgaatttttcggcgtttagtgacgtactctccccccttgccgaatgtgcgccgacgtttgcctgcttcggcaaccacgatcgccctggcagaattgcggcagcaagtattggaccgctcaacaataccgtcaggaagaaagccagcaccagaagctccgattcgattcagggagttaaacgcccgcagtggcgatcccaggtgcatgacagaggcaataaacccgacgcccatcaacagccagaggaaaaacatgccacggacaatacgctgacggtctgcgtcatttttggcggcgaaccagccaattccgctaacaatcagcgcgcctactacgcattgacccaatacggtgggtattacacgggcagttttcaaccagggttccagattcgggaacgaatttttcccagaacggtgagccgatgcgatcttcgaacaggatccgaatgcacgcgttgcttgcgaaacctacgtaatttcggtgatgaaaaagatatcgagcttcaagaaactgaatgcgccgtcatcagagcattggtgcaggtatcgcactggcaatccactctggccgctgcgggccaggtactgaccatcatcgttcgtactattaccgttgctttccagcacgctgcggataaggctgctgataacggcaacctgacagcgatttcctggatccacgtttcttctctgttcctgcaagcaatgcgtgtggctattccggccgtcatcgttgcgctgtctgttggtaccagcgaagtacagaacatgctgaatgcgattccggaagtggtgaccaatggtctgaatatcgccggtggcatgatcgtggtggttggttatgcgatggttatcaacatgatgcgtgctggctacctgatgccgttcttctacctcggcttcgtaaccgcagcattcaccaactttaacctggttgctctgggtgtgattggtactgttatggcagtgctctacatccaacttagcccgaaatacaaccgcgtagcggtgcgcctgctcaggcagctggtgagcgaaatggttgatacaactcaaactaccaccgagaaaaaactcactcaaagtgatattcgtggcgtcttcctgcgttctaacctcttccagggttcatggaacttcgaacgtatgcaggcactgggtttctgcttctctatggtaccggcaattcgtcgcctctaccctgagaacaacgaagctcgtaaacaagctattcgccgtcacctggagttctttaacacccagccgttcgtggctgcgccgattctcggcgtaaccctggcgctggaagaacagcgtgctaatggcgcagagatcgacgacggtgctatcaacggtatcaaagtcggtttgatggggccactggctggtgtaggcgatccgatcttctggggaaccgtacgtccggtatttgcagctcttggtgccggtatcgcgatgagcggcagcctgttaagtccgctgctgttcttcatcctgtttaacctggtgcgtctggcaacccgttactacggcgtacgcctggtggtactggatttagggttacccgacgaagatggactgcattttctcgcccgtatccggcagaaaaaatataccctgccggtactgatcctcaccgctcgcgatacgctgaccgacaaaatcgccgggctggatgtcggtgccgacgactatctggtgaagccttttgcgctggaagagttacatgcccgtatccgcgccctgctacgacgccataataatcagggcgaaagtgagctgattgttggcaatctgacgctgaacatgggtcgccgtcaggtatggatgggcggtgaagagttgattctgacgcccaaagaatatgctctgctgtcacggttaatgctcaaagcaggcagtccggtgcatcgggaaattctctacaacgacatctataactgggacaatgaaccctcgaccaacaccctggaagtgcatatccacaatctgcgcgacaaagtgggcaaagcccgtatccgcaccgtgcgcggctttggctatatgctgctgatcagcgtcttctggctatggcatgaaagtaccgagcagattcagctgtttgagcaggcgctacgcgacaatcgcaacaacgatcgccacatcatgcgtgagatccgcgaagcggtcgccagcctgattgtccccggcgtctttatggtcagcctgacgctatttatctgctatcaggcggtacgccgcatcacccgcccgctggcggagctgcaaaaagagctggaagcgcgcaccgccgacaacttaacgcccattgccattcacagcgccaccctcgaaatcgaagcggtggtttcggcgttaaacgatctggtcagtcgcctgaccagcacgctggataacgaaaggttgtttaccgctgacgtcgcgcacgaactgcgaacgccactggcgggggtgcgtttgcatctggaactgctggcgaaaacgatcacattgatgtag

SEQ ID NO: 142975 - DNA, 1287 bp, Homo sapiens
atgggaaccgggtgcgactcgacgaacgcatcctcctacgcaattggtgaccggagcgtcgacgtcggcgaagtggacgtggcaatcagcactaaaaatcggcgctatacgatggcagtaagtcagttagcaagtgcagagcctgatgccggctgcagcgagggagggcacgctggcactggggaacacgaccgtgccaaggctggaggtgcatttggcccctgcaaggccatcgccctgctgaccctaagcaggcagccagcagggcacggccggaggctgcacggcttctccactgcacggcttgccggcctcggggtgcgtggggaatgggcgctacgcgacaatcgcaacaacgatcgccacatcatgcgtgagatccgcgaggcggtcgccagcctgattgtccccggcgtctttatggtcagcctgacgctatttatctgctatcaggcggtacgccgcatcacccgcccgctggcggagctgcaaaaagagctggaagcgcgcaccgccgacaacttaacgcccattgccattcacagcgccaccctcgaaatcgaagcggtggtttcggcgttaaacgatctggtcagtcgcctgaccagcacgctggataacgaaaggttgtttaccgctgacgtcgcgcacgaactgcgaacgccactggcgggggtgcgtttgcatctggaactgctggcgaaaacgcatcacattgatgtagcaccgttagtggcacggcttgatcagatgatggagagcgtctcccagctgctgcaactggcgcgtgccggacagtcattttcttccggtaattatcaacatgtaaaactgctggaagatgtcattctcccctcgtatgacgaactcagtaccatgctcgaccagcgacagcaaaccctgctattgccagagagcgccgccgacatcaccgttcagggtgatgcaaccctgctgcggatgttattgcgaaacctggtagaaaacgcccatcgttacagcccgcaaggcagcaacattatgattaagctgcaagaagatgacggagcggtcatggcagttgaagatgaaggaccaggtattgatgagagtaaatgcggggagttgagtaaagcgtttgtacgtatggacagccgttatggcgggattggtctggggttaagtattgtcagccgcattacacagttgcatcacgggcagtttttcctgcaaaaccggcaagagacttccggcacgcgggcctgggtacggctgaagaaagatcagtacgtggcaaaccagatataa

SEQ ID NO: 142976 - DNA, 5415 bp, Homo sapiens
  misc_feature (1)...(5415): n = a,t,c or g
atgacgttgacctcgggttctaccggtttgccgaaagccgctgtccatacttatcaggcccatcttgccagtgcgcaaggtgtgttatcgctgattccgtttggcgatcacgatgattggttgctctctttaccgctgtttcacgtctccggtcagggaattatgtggcgctggttatacgctggtgcgcggatgacggtacgtgataaacagccattggagcaaatgctggcaggctgtactcacgcttcactggtgccaacacaactctggcgtttgctggttaaccgtagttccgtttccctgaaagcggtgttacttggcggcgcggctatcccggtcgagttgacggaacaggcgcgcgagcaggggattcgttgcttttgcggctatggtctgaccgagtttgcctccacggtgtgtgcgaaagaagccgacggcctggcagacgttggttcgccgctgccgggtcgggaagtgaaaatcgttaataatgaagtgtggctgcgggctgccagtatggcagaaggttactggcgtaacgggcaactggtttcactggttaatgacgaaggctggatattgttcaacaagttccggcatcacctgcgccagcggtgtgttggcgtcatagtggcgtttgaaggagcaaagggtgttaaccagagttccccatttcccacgggttacgcccatagagaacaggaacataatttggaagtcagtggtgcgggtagttcaccatcttcacccattcccggagcaaggatgctgattttaatcgggtcgagcatactccagttatccggaatatctttgaagccgtgccagctttcgcccggatgcatcctgggcgcgtctgcgcggcctgaacgacaaacagaccgaacgtcgccacatcctgcgcaatgcctcgctgccgatgatcaccgccgtggggatgcatatcggcgaactgattggcgggacgatgattatcgacaacatctttgcctggccggggcacaacgcattgatgaaatcgcgtttgctaagcggcagagatggcaacttttggtgcaaaagtactgcatccggcaacgttgctacccgcagtacgcagcgatatcccggtctttgtcggatccagcaaagacccacgcgcaggtggtacgctgcctgaatatgctgcattctcgcggtttcctcgcggaagttttcggcatcctcgcgcggcataatatttcggtagacttaatcaccacgtcagaagtgagcgtggcattaacccttgataccaccggttcaacctccactggcgatacgttgctgacgcaatctctgctgatggagctttccgcactgtgtcgggtggaggtggaagaaggtctggcgctggtcgcgctcattggcaatgacctgtcaaaagcttgcggcgttggcaaagaggtattcggcgtactggaaccgttcaacattcgcatgatttgttatggcgcatccagccaggccaatgtctggcgaattaacaccattgggaattccgcagacaccgtctgcagaattcccatcggcaaagatttggcagacgctgtctgccaaatctttccccttgcccagtcggatttcggtggcgtaggattattacaaacgcccaccgcgcgtatggcacgggaaggggagttgagtctgaactatcgcgataacgatcagtaccgttattactcagcttcagtgcaactcttcccgtggctggaaacaacgctgcgctacaccgacgtgcgcacccggcagtacagcagcgtcgaagcgttctctggcgatcaaacgtataaagataaagccttcgatctcaaactgcgtttgtgggaagagagttactggctgccgcaagtggcggttggtgcgcgggatatcggcggtacggggctgtttgatgcggaatatcttgttgccagcaaagcctgggggccgttcgattttacgctcggcctgggctgggggtatttgggcaccagcggtaatgtggaaaatccgctctgtacagccagggggttaagccactgtgcacgaggtccgggaatgaaagatgaacgtcgccctatttgcgaagtggttgcagagagtatcgaacggttaattatcgacggcgtactgaaggtcggtcagccgcttccctcggaacgtcgactgtgtgaaaagctcggcttctcacgctccgcactgcgtgaagggctgaccgtgctgcgcgggcgcgggattattgaaacggcgcagggtcgcgattctcgtgtcgcacggcttaatcgggtgcaggacaccagcccgctgatccatctgttcagtacgcagccgcgaacgctgtacgatctgctcgacgttcgcgcattactggagggcgaatcggcaaggctggcggcaacgctgggaacgcaggctgattttgttgtgataacccgctgttatgaaaaaatgctcgccgccagtgagaacaacaaagagatttcgctgatcgaacatgcgcagttggatcacgctttccatctcgccatttgtcaggcttctcacaatcaggtgctggtgtttacgctgcaatcattgaccgatctgatgtttaattcagtgtttgccagcgtaaataatctctaccatcgaccacagcaaaaaaagcagatcgatcgccagcatgcgcggatctacaacgcggtgttgcagcggctgccgcacgtcgcccagcgcgcagcacgcgatcatgtgcggaccgtgaaaaagaatctccacgatatcgagctggaaggccaccatttgattcgctcggcgcgcaatcaccgggccgatgcggctgaactgatactcgtcgcgcacgcccatcagcggtactcgcgcagttcgcacaccgctgactttcaaacgccacagcaattttgcccagccgaagggaaagagcgatccgttcagatcggcaatcgcctcgttgatgttcggcaagccgacaataaacgcgcagggtgcagaatcaatctcagcgatataggttcgttttcggttttaacggcctttcctgatcgccgtgttattggcctgcatcaggccttaattccggtttacctcgcgttaatggacagccaggtattcaacagcttatgtcccatccgttcgatggcaggcgcgggccaggtgggcgcggcgctggcactctactgtcgggcgccaccgcacagtgcgctacgcagtcaggtacgcggggcgattattcccggcctgctgggcgttggtgaaccgctgatttacggtgtcaccctgccccgcatgaagccgtttgttaccgcctgtttaggcggcgcggcgggcggtttgtttatcggcctgatagcctgttgtagcgtcagcgccgcaaaataccctgttctgacagaaagctcgccagagaaagcagggtttaacgtcgaacggcttaaccagatggatcgctggattagccagcaagttgatgtcggttatcccagcgtaaacctgctgatcattaaagataatcagattgtgtatcgcaaagcctggggagcggcgaaaaagtacgatggcagcgtgttgatggaacagcctgtcaaagccaccaccgggacgctgtatgacctggcctcaaacaccaaaataatggtcatcgcggaccagacgcggaaacgaaaggtgttacccgcgacttcggcccgaacgcgaagccactggcggggggcgtttgaatctgaacggctgcggaanacgcatcacattgatgtagcaccgttagtggcacggcttgatcagatgatggagagcgtctcccagctgctgcaactggcgcgtgccggacagtcattttcttccggtaattatcaacatgtaaaactgctggaagatgtcattctcccctcgtatgacgaactcagtaccatgctcgaccagcgacagcaaaccctgctattgccagagagcgccgccgacatcaccgttcagggtgatgcaaccctgctgcggatgttattgcgaaacctggtagaaaacgcccatcgttacagcccgcaaggcagcaacattatgattaagctgcaagaagatgacggagcggtcatggcagttgaagatgaaggaccaggtattgatgagagtaaatgcggggagttgagtaaagcgtttgtacgtatggacagccgttatggcgggattggtctggggttaagtattgtcagccgcattacacagttgcatcacgggcagtttttcctgcaaaaccggcaagagacttccggcacgcgggcctgggtacggctgaagaaagatcaaggcgcgtatccgatgagtgaaaaggtggtgttcagtcaactgagccgtaaatttattgatgagaacgatgccacgcccgccgaggcgcagcaggtggtctattacagcctggcgattggtcaccaccttggggttatcgattgcctggaagcggcgctcacctgcccgtgggatgaatatctggcatggattgccactctggaggcaggcagtgaagcccgccgcaaaatggaaggcgtgccgaaatatggtgagatcgtcatcgacattaaccatgtgccgatgctggccaacgcattcgataaagcccgggcagcgcaaacttcgcagcagcaggaatggagtacaatgctgttaagtatgctgcatgatattcatcaggaaaacgccatctatttgatgggcgtattcatcatgcttatcttttttccggcacccgtggcgtcggaaaaacctctatcgcccgactgctggaccacgacccatactttgaggatgattggtgagaactcaggactcgtctcatacatgagagaaaaggccgtaagccccaactgttggaatgtcattcattattcaggatttcttcacttggaactgttgagctcctatgatgtagatgttaatcagatcataaataccatatgcgaatggattagtttgattaagaccagaggcgttaggcgacctgaatttcagactttactaacgggatctggatcagagcatggtgaaaggttcatcatgaatcgcccaacgctcttcttcaccgatctcgcctttcatgtcgaccggttcacccagtacgttcatgatacggcccagagtcgctttacctaccgggacttcaatcgggtgttcgaggtcttttacatccagaccgcgacgcagaccgtcggaggaacccattgcgatgcacctggctggtggtttccgggagccgtacagtcggtgcctgccgcggcgctgattgccgttgccgcggcacctgggttggcgtcattcctgccgttcgcgcgacgggtgccaaggactgtcgtggcacttctggctcaggcagcggcatacgcggatggcatgccagcccgcgcagatggttcattcaattcaccatag

SEQ ID NO: 142977 - DNA, 2913 bp, Homo sapiens
atgaaaaccggcatcgtgaccaccttgattgcattatgtttgccggtatccgtttttgccaccacgctgcggctttcaaccgatgtcgatcttctggtactcgacggcaagaaggtttccagctctctgctgcgcggtgcggacagcattgaactggataatggaccgcatcagttagtgtttcgcgttgagaagacgattcatctttccaatagtgaagaacggctgtatatctccccaccgctggtggtcagttttaatacccagctcatcaaccaggtcaattttcgcctgcctcgcctggagaatgagcgggaagctaaccattttgatgccgcgccgcgccttgaattgttggatggcgatgcgacgccgattccgccggaaaacaaactacctgttctggaccttatttctgctgaaatgaagaccgttgtgaatactcttcagccggatttaccgccctggcccgcaacgggaacgattgctgagcaacgacagtattacacgcttgagcgccgattctggaatgcgggcgctccagaaatggcaaccagagcttacatggttccaacaaaatatgggcaggtggaaacacgtctcttttgtccgcagccagatagcccagcgacgctattttatttgcatggaggcggttttattctcggcaatctcgatacccacgatcgcatcatgcgcctgctggcaagctacagccaatgtacggtgattggtattgattacaccctttcacctgaagcgcgttttccgcaagcgatagaggaaattgtggctgcttgttgttatttccaccagcaggcggaggattatcaaatcaatatgtcccgcattggctttgccggtgattccgcaggtgccatgctggcgctcgccagtgcgttgtggttgcgtgataaacagatcgattgcggtaaagttgcgggcgttttgctgtggtatgggctttacggattacgggattccgtgactcgtcgtctgttgggcggtgtctgggatggcttaacgcaacaggatttgcagatgtacgaagaggcatatttaagcaacgacgcggaccgcgagtcgccgtattactgtctgtttaataatgatctcactcgcgaaggcgtaaagacaggaaatgttatggatgacaccagccgggacccggcaataaccgaagatgaaatcagggcgctgcaattttctgccggggatgtagcggaaatagagcagacgattctctcttttgtcgatgcctgccacacccgtaaagtggcgatggtggtgggtagcaccattaacaccctcaaagatcgcgatgagtggatgattgatggacgcgggattaacaacgtctgcgatgtgttgatgtatctcgaagaagacgatacccgtgatgttgtggaacggcgctgcactggaaacgctgtctctggacactgcatctgcaaccggaaacggtctgtggatgaccctctggctggcaattccggtaatggtgattgccacgctataaaccagcaggatcgggtagatagcgaagaagtagagcaggaggtttattttgccaaggtcgaggatgtgcctgggaaaaagaaacacaagtctcagatcctactgcagcgtttcgtcaatgacatgggcgctaaagccaatcaaaaccagcgacggatattgctgtgccagttgtcgggcaagcgtaatgccgtcgatatccggcagatcaaaatccaccagtgcggcagcaaacgcaatgttcatgcactgaatcgccaccgcgaacagctggcggcgcaggtcaaagcgcgtacagctgaattgcaggaactggtgatagaacaccgacaggcacgggcggaagcagaaaaagccagccaggcaaaatcggcgtttctggcggcgatgagccatgagatccgcacaccgctgtacggcgcagaacagagcgtgcataatgactggaaagcgacgcagatcaaagtggaagatgtactgtttgcgatggtgaaagaagtagaaaatcgcccagctgtttcgctgaaaaccagcccggagctggcggagctgctacgtcagcagcacagcgatgtgcgtccaagccgccatctgaataaagcgcactggagcaccgtgtatctcgacggttcgctgccagattcgcaaatctattatctggtggatgcgtcttatcagcaggcggtgaatttactgccggaagaaaaacgtaaattgctggtcagggcagccgaatctgggatcagcaaggcaaggagtatgtcgatttcgcgggtggcgatgcaggaaccggcgtttaacagccattatctggcagatatgaaactgtgggtaacgcacagccagtttattgttgagcatattaatgccatgaccacgctggcgcgggaacaccgggcattgccacctgaactggcacaagagtatttacagtcttgtgaaatcgccattcagcgttgtcagcagcgactggagtatgacgaaccgggtagttctggcgatgccaatatcatggatgcgccggagatgcagccgcacgaaggcgcggcagcgccggagactttagtgacagataacttttcagcgccggaagtaatggcattcgccgctgtttatcggccacacgcgggcgatgcggctgaaatgccagtagcagaattgcccaaccggattatccggatgctggcgggcgattttttccagtgcgccaatttgcttttccatcgtaaaacgcgttggcaggcgatggtaaagaatgtcatcagccagcacgcgcaggcgagcggcgacggtttgcgcattccagcggataacttcttccgcatggctacgctcgaccagcttttgcacctcttccggctgatgcaaactgaccgaaatatgttcctgtactaa

SEQ ID NO: 142978 - DNA, 750 bp, Homo sapiens
tcatccaacggtatcatgataatattttcgcatctcctcctgcataatggtttccggtgcgcggttgccggattgaacaagtattacaggagaattaaggggaacgcggaactcatctccatcaagcgcagcttgaatatcctcttcggatacggccagagtggtttcattaccgaataaatctttgtctgtcagttgctggggagtgtttttattaatattagactcctgtcccgataccatgcgcacccgcgcattctgtgcgacggctgcattgttcagcgcctgaccttctgcgttggcgctaaacccatcaccgctggcgatcacattgacgcgttgtcccgctttggcaaagttcttttctggattttccgttttatcgaccagaccaccaaccgcttcaattccgccataggcaaaaatggcaaataccacaaacgatagcattgccagaccggactgataacccgggttcggtgatgcaaggaaattaatatccttgaactttttcatctgggtatgaactgcttgaatcatgtaaccgccgctggcagcgactttgtctaccgtaacagttaaaggaatgtttttatcgcgcagacgctgcagttgcgaagccgccagcccgtaaccatgcaccatgccaccagggctttccagacggagcacaacctgatcctgcggtttgaatgctgcgagtacagccgttatctcttcacgtagcgagttcacttcatgggcgtccat

SEQ ID NO: 142979 - DNA, 1338 bp, Homo sapiens
atgttagttagtaaaagcaacggatttaacgctagcgcagttttgggtagtggaagttataatgaaaataaatcttctaaacacatggagctactagctcatagtattttaaaattaattgtcataaagttgggtgccgagtctcgaattggtattctatgttttagaaatgtgttggcacgctccggaacggacacacgatattacaaggttaatgtacagcccacaggaaattatgtggttgccccgatgcccattgcgcggggaggaaagctggaagctggcaatgtcaaactgaaacgcggacggctggataccctgccaccgcgtacggtgctggatatcaatcaacttgttgatgccattagcctgcgcgatctatcacccgatcaacctatccagttaacccagtttcgccaggcatggcgggtaaaagcgggacaacgcgtcaatgtgatcgccagcggtgatgggtttagcgccaacgcagaaggtcaggcgctgaacaatgcagccgtcgcacagaatgcgcgggtgcgcatggtatcgggacaggtagtcagcggcgttgttgatgcagatgggaatattcttataaacctctccggcggaaattaataaaaactattaccagttacctgtggtgcagagcggtacacaaagtaccgccagccaggccaatcgtctgttatgggtagagcaggtcactgttcctgactatctggcggggaatggtgtggtttatcaaaccagtgatgtgaagtatgtgattgccaacaacaacttgtgggccagcccgttggatcaacagttgcgcaacaccctggttgccaacctgagtacgcaactgcccggctgggtggttgcctcccagcctctgggaagcgcccaggacacgctcaatgttaccgtaacggagtttaacggtcgctatgatggcaaggtcattgtcagtggtgagtggctgttgaaccaccagggacaactgatcaaacgtccgttccgtctggaaggagtgcaaactcaggatggttacgatgagatggttaaagtgctggccggtgtctggagtcaggaagccgcttctattgcacaagagataaagcgtctaccttaattataaagatttgtaaatataaccgtctccggtatgttgcctgaggcggtttttttgtctctaacgtgcggaaaaatttgttcctcttcacattttttgtacaaccgacatgcccgtgtagctcacaaatatgacagtggcgtgaattttgcgcattgacggcagttatgattcgcggtattgcttaactgtgattgcacatttagtaatcactgttttct

SEQ ID NO: 142980 - DNA, 1584 bp, Homo sapiens
ttagtagtggttgttagggccatgaggtctgcgttgttgctttgaatgcgtgttacagagtgattttgcggatgttgccgctgtttctccgccactgtcttgggctctacgagccccagataccgccgctaccccctccgcatttctgctgttctgtgagttttcgtttattgcgtgggtgtgatattgtaatggggctagcgtgttttgccggttgggatagattgtgcggaaatcgggtattgatggtttagccggcaatgttttcgtgatcatgatcgttgtcgcattcgagtggacgctgtagcagggggggcatatctttctgggtagtctgggagttcggtcctgttgcgtgtttggctgcaagcgtggtgtgactgtgagtgtccgtcgtatggttgtggttgagtccgtccggtcaagggtgtctcggttgccgtgtttggttgtagagcggcctagccgccctttgtgaaggtgatctgtgatgacgcgtcgcgcgacgctaagccggtacggacccggagtcgtcaggcgaggtcgaggtgagtctgatggatagcggtatagtagtagcgccaatgaacgcataaccgtcctgttcacccgcgcgttgtgtcccgatgtcaagtaatggcaagttgggccaggtacagggtttgcaccgtactgggaatagcagggcagtagaagcaccgtccagtcataaccaatgcccgcaggtaattttgacgcaaggttttccatcaacgccatggcatcgccggaactggttcctggcgcggcttccccctgaatctccattgacggcagaccgttgtagcgttccagtcgcggagagccatacacccaatgtgaagtggtaaaggccgagaatggcaccatttcgccgttggcgctgcggacataaagtttatcgacatcttctggcagcatacggaatttggcatccgcctgaacatacaactttttcacgcggccacggtcgatgaagtcgttaacgtaagtcccacccagcgccgttgaaatggtctgattgatgtcagaaagtgaaacacctaatgcctgcgccttttcctggtcaacttccagtttaaactgcgcggtgtcttccaggccattagggcgcacgctgactaagctggcaggatgttgcgccgccataccaagcaactggttacgggcctgggttagggcatcgtgacccagcccagcctgatcaattaactcaaagtcgaaacccgttgccgtgcccagttcaacaatggctggcatattgaatggaatgacaaaaccgtcgcgatcttgcccaaattccattctgtgattcaaaggatggaaacctcttttggaacaatctctagttttgcgtcgttttaacctaaccccgttattatactccccgctaggacaatcttttgtgggggaatgagtctcgatgagatcaaggcgccgaccgattcctagcatgtggaaggtttcaaaggaacgctgtctgaaggaccgcaagggcccctggggacccgaaaccagtagggctgacaaagaccgccacgctactacatcgcaagcctggaccat

SEQ ID NO: 142981 - DNA, 2916 bp, Homo sapiens
atgagcggagagatcttctgcacgcacgttacgaaaagcaccgcccttcgaacggcccatcggggtgcgaattgcatcgacaatgacaacctgttccattgtgactccttaagccgttttcaggtcgccaaccggacgggctggctcaaccggaggatagtacggttcgttatgacgcgctttattacgcagaccttccggcacttcatacagcgggccgaggtgctgatattgctgtgccatatcgaggtattttgcgctaccgagggtgtccagccagcggaacgcgccgccgtggaacggagggaagcccaggccgtagaccagcgccatatccgcttccgccggagtggcgataatgccttcctccagacagcgcaccacttcgttgaccatcgggatcatcatgcgggcgataatctcttcttcgctgaaatcgcgcttcggctggctcacttctgccagcaggtcttcaacggcggcgtcttcttctggggatcctctagagtgcgactgcaggacagcagctcactatggcaacaacgtcggggtattttttacataatgcagcaggcggtgccagatagagagttactgaaagcaccaaccgccaggtgcgcgcattgtccgtggatggccatgaatggcattcaggccatcgcagaggcattagaacaggaaggaagcaatcacgaggttcatgtttatgaaaggctgcgagagagggcgctggtgccgctcaatcattcagctgtatgccagcctgctattacaggtgtttttctttgccgcgaatatttacggttggtatgcgtggtcgcgacaaaccagtcagaacgaggcggagttgaaaattcgctggtgcacagtgccgacgacactcagttggttgcggaacaggggtggctggttggcgcgcgccgcgttccctcaccacattacgattgccgcccggatgacgaaacacccaccctgctggtggtgcacaatattagcctgccgccaggcgagtttggcggtccgtggatcgacgcattattcactggaactattgatccgcaggcacatcctttctttgctgagatcgcccatttgcgcgtctccgctcactgtttgattcgccgtgatggtgaaatagtccagtatgttcctttcgataaacgtgcatggcatgcgggagtctctcagtatcaggggcgcgaacgctgcaatgatttttctattgggattgagcttgaaggcaccgatacgctggcgatatgccgatgcacagtatcaacagcttggttagtcaatgaccttttgcaccgctttgcggtgctttcctggaagaacaaaatgtcatatacaccgatgagtgatctcggacaacaagggttgttcgacatcactcggacactattgcagcagcccgatctggcctcgctgtgtgaggctctttcgcaactggtaaagcgttctgcgctcgccgacaacgcggctattgtgttgtggcaagcgcagactcaacgtgcgtcttattacgcgtcgcgtgaaaaagacacccccattaaatatgaagacgaaactgttctggcacacggtccgaaaaatcctttgagtgtcagatttatagtacaaatttcttttataaaatccttactgtatctctttgccatcgcgcgtttcttctttgccatttctggtctggataccggtagcccgtttaccgctatcggcgcgacccgtgaagcgatgcttggcgtgctggtcgaaccgatgctgctgcttggtctgtgggttgccgcacaggttgccggttccaccaacatcagcaacatcaccgacaccgtttatcactggccgctgagccagagcatcccgctggtactggcgctttgtgcctgtgcgttcgccacctttatcgaaatgggcaaactgccgttcgacctggcggaagccgagcaggagctgcaggaaggcccgctctctgaatacagcggcagcggctttggcgtcatgaaatggggtatcagcctgaaacagctggtggtgttgcagatgttcgtcggggtgtttattccgtggggacaaatggaaaccttcaccgccggtggactgctgctggcgctggtgattgccatcgtaaaactggtggtcggcgtcctggttatcgcgctgttcgaaaacagcatggcccgtctgcgtcttgatattactccgcgcattacctgggctgggtttggctttgcatttttagcgttcgtctgggttgatgatcgcaaccagatacaggtcaaccgtgcatggcgtgtgcagttcagctctgccatcggcccgtacaaaggcggtatgcgcttccatccgtcagttaacctttccattctcaaattcctcggctttgaacaaaccttcaaaaatgccctgactactctgccgatgggcggtggtaaaggcggcagcgatttcgatccgaaaggaaaaagcgaaggtgaagtgatgcgtttttgccaggcgctgatgactgaactgtatcgccacctgggcgcggataccgacgttccggcaggtgatatcggggttggtggtcgtgaagtcggctttatggcggggatgatgaaaaagctctccaacaataccgcctgcgtcttcaccggtaagggcctttcatttggcggcagtcttattcgcccggaagctaccggctacggtctggtttatttcacagaagcaatgctaaaacgccacggtatgggttttgaagggatgcgcgtttccgtttctggctccggcaacgtcgcccagtacgctatcgaaaaagcgatggaatttggtgctcgtgtgatcactgcgtcagactccagcggcactgtagttgatgaaagcggatatcccaagcaattaaagactgattctcacctccagatagagctatga

SEQ ID NO: 142982 - DNA, 2400 bp, Homo sapiens
  misc_feature (1)...(2400): n = a,t,c or g
attacgaattcacggtccgttcccgtggatcgagttgagggttactatcttgacaacgacaaagttaacgtggatagagtctttacggttaacggctttagcttcagcggccaggcacaaaacgccggtatggccttcgtcagtctgaaaccgtgggaagagcgtaatggtgacgaaaacagtgcggaagcggtaatccatcgtgccaaaatggaattgggcaagatccgcgacggttttgtcattccattcaatatgccagccattgttgaactgggcacggcaacgggtttcgactttgagttaattgatcaggctgggctgggtcacgatgccctaacccaggcccgtaaccagttgcttggtatggcggcgcaacatcctgccagcttagtcagcaccatttcaacggctctgggggggacttacgttaacgacttcatcgaccgtggccgcgtgacaaagttgtatgttcatgcggatgccaaatgtcggatgctgcccagagatgtcgatgaactatatgtccgcagcgccaactgcgaaatgggccattctcagacttaccacttcaattggcgtatggctctcgtgactggacgctacacgttcagctctgccatcggcccgtacaaaggcggtatgcgcttccatccgtcagttaacctttccattctcaaattcctcggctttgaacaaaccttcaaaaatgccctgactactctgccgatgggcggtggtaaaggcggcagcgatttcgatccgaaaggaaaaagcgaaggtgaagtgatgcgtttttgccaggcgctgatgactgaactgtatcgccacctgggcgcggataccgacgttccggcaggtgatatcggggttggtggtcgtgaagtcggctttatggcggggatgatgaaaaagctctccaacaataccgcctgcgtcttcaccggtaagggcctttcatttggcggcagtcttattcgcccggaagctaccggctacggtctggtttatttcacagaagcaatgctaaaacgccacgggatgcgcgtttccgtttctggctccggcaacgtcgcccagtacgctatcgaaaaagcgatggaatttggtgctcgtgtgatcactgcgtcagactccagcggcactgtagttgatgaaagcggattcacgaaagagatactggcacgtcttatcgaaatcaaagccagccgcgatggtcgagtggcagattacgccacagaatttggtctgggcgtagagagcgtcagagaaacaatgcgctgcccgtactgggtgcaacttctgacacaaatccagcacgatatcagtaacggtcaacccatctggctggcgctaaaaaataccgtgagaacaggagaggcatccggctctctggatctcatgttagacaacctcgcccatcatcatcgggaaaacacaatggcgctggcggataacctcgcagccttactggaaccggcgttgctgatcataacgggaggaattattgaccgcgatgcggcggcatatattgtggaaccgatgttgtacaacccgcgtgtgggtgccgtaaccggtaatcctcgtattcgaacacgttctaccctggtgggtaaaattcaggttggcgagtattcctcaattattggtttgatcaagcgaacccagcgtatctatggaaacgtatttaccgtttccggtgttattgccgcatttcgtcgcagcgccctggcagaagtgggttactggagtgacgatatgatcaccgaagatattgatattagctggaagctgcagttgaatcagtggacgattttttacgagccacgggcactgtgctggatattaatgcctgaaacgttaaaagggctgtggaaacagcgcctgcgctgggctcagggcggtgcagaagtattcctcaaaaatatgacaaggttgtggcgcaaagaaaactttcgaatgtggccgctgttttttgaatactgcctgacgacaatatgggccttcacctgcctggtcggtttcattatttacgcagtccaacttgccggtgtaccgttaaatattgaattgacacatatcgctgcgacacatactgccggaatattattgtgtacgttatgtttactgcaatttattgtcagcctgatgatcgagaatcgctatgagcataatctgacttcatcgcttttctggattatttggttcccggttattttctggatgctgagcctggcaacgacattggtatcatttacacgagtcatgttgatgcctaaaaagcaacgcgcccgttgggtaagtcccgatcgcgggattctgagaggttaatatgaacaatttaattattacgacccgacaatcaccagtacgtttactggttgattatgttnctgcacc

SEQ ID NO: 142983 - DNA, 373 bp, Homo sapiens
gtcaacattgacggcaccatcgtcattggtgaaggtgaaatcgacgaagcaccgatgctctacgacttttcgcttaacgctgattcatcgattcgccattcgagatggctgacaataccgcgcccttccagctccatttcccgcatcagtgagcggatggcctgctccaggccgctgaacaatgcccgcctgagtacgaatagcagtgatggtctgaccgatatcatcatgcagctcacgcgccacatcacggcgcacgctctcttcggtttccagcaaccgttcagccagatgctgattgcgcgccagttccttttgcagcgactggttaagttcacgcaaccgctggatgccagcgccaagcaacaaccct

SEQ ID NO: 142984 - DNA, 702 bp, Homo sapiens
atgcttgacagcagacacaagggaaccctgctgggttatggggccccactggccatcccgacatgctgccccgattcagaccttcatctggtagggtacgtagctaacgtaaatcagccttatccctaccgctcgcatttcgccgccgaccgtaccggcgcgatcccgattaattttgatgaagacagcgatccggcacagtcaattattgaacaaacggcaggtcaccggggcgtggatgcagtaatagacgccgtcggttttgaagcgaaaggcagcaccacggaaacggtgctgactaacctgaaactggagggcagcagcggtaaagcgttgcgtcagtgtattgcggcggtcaggcgtggcggcattgttagcgtaccgggcgtctacgctggatttattcacggtttcctgtttggcgacgcctttgataaagggttgtcgtttaaaatgggacagacccacgttcacgcatggctgggagaattattaccgttaattgagaaaggattactgaaaccagaagaaattgttacccactatatgccgtttgaagaggccgcccggggatatgagattttcgacaaacgtgaagaggagtgccgtccggtgattctggtacccggtgcacaaagcgcagaggcggcgcagaagacggtttcaggtctggtgaatgcgatgccgggcggaacaatatga

SEQ ID NO: 142985 - DNA, 2109 bp, Homo sapiens
atggaattgagcgacaaagctgttcgccacgctgaattcctcgcccaggatgacggagttattcatctacttcacgtactacccgggtcagccagcctgagcctgcaccgttttgccgctgatgtgcgtcgttttgaagagcatctgcaacatgaagcacaagaacgtctgcaaacgatggtcagccacttcaccatcgatccttcccgcattaaacaacatgtccgtttttcacttactagtattaggaccatgcaagttctggaacacctggggcaggatcagtgcctgaaaaacaaaagtctattcccgattccatggggaagcttctacgcagcaccattgttactgttgacgctgattaccctggcgttgctcccactcttcctgtacattacctatcgagtcggcaccattcgtcgcgagatctccaagagcacgcagcgcagcctggcggatatgagtgcgctgaccgaggaaacgctctcggtgtctggtatgttgctgaccaaggcattcggacggcagacacgtcataacaagtctgtgcaggattatctgaaagtgcttaaggaaaaaaatgcgcagcagccttcagctgaatccgcccccggcgtcgctatcgcacctggcggcagaccggtctgcacttacgcgcaaacgaaagtctactcctttggtttgccaagtattttcaccttcatgcaaaccatcccgtcaacgggaattgatttcaccgtctgggccagcgttattggcggtgtcattgccatcggttgcgcatttgtcgttgcgctgtaccgttatcgctttcgtggtaagccgttcgttagcggaatgctgtttgtggtgatgatgtcaccagatatcgtgatggcgatttcgctgctggtgctgtttatgctgctgggtattcagcttggcttctggtcgctgctgttctcgcatatcaccttctgtcactcgagtctctctataagcagcgaggcatcgccagcaccagataacgaacccacggatcaggccgatcaggtagatccaaccaggtgccacgtgattccgaaagcgatcaccagcacgccggtatgccgccccagtatggcggtaatcatcggcaacggagctgccagagccctctttttcctgtcgggtaaacagtttgggcgcaatgaacgtcgcaagacccgccgcgacgggcggcatcagcgcgacaacgccgacgatggcgtaccagtcataaatgtgtttttccagcatgagaagcagaagaaccaggcggttttattgatggggccgcccatatcgaacgccagcatcgcaccgaccagaaacgctgccgcaaacttcattgatggaggaatgatagcaaaccagaaacgccggagcgaaagccggtttatcggcaatcgacgaggcaatataagcgcccatgatggggatcataaaggtgaagccaaggtaaccgatggattcaactacccagtcttcacggaagttcgcggtgattggcgtttcgatgatggagccatccggcttcgccatcagaccacgcataccagcaagctgacgaatctgtgccgcagaaccactgctgcacctctgttagacgcgtacactagaccctgcgttatcctatgtctggtgaaaacgctagtcgatagccgaggctgtcgattgactgcaagtctggtcgcaatcgcctgctggggcagcacggcagggtttagccgtattaggcgcgcgtctatccagctatccgtcgacgtcactagacttcgacttgcgcctacggtacgattcgagcttgcggacgaggcgggtatcagactcacatcaagagcgcggctaagtacgcgtgtatccatcagaactcacggggcatacacgcagcgaaacgaaccatttgaagccaaagtaccagttgatccgctgaaaaagaaaatcgccagtgtgtttcttgaatcttttttgttctattccggtttagccgccgataccgcacgaataaaggtcgatttacccgcgtttggcatccccaacataccgacgtcagccagcagcatcagctccagcagcagctcgcgcttatcgatagcgatatcaccgtaa

SEQ ID NO: 142986 - DNA, 1165 bp, Homo sapiens
  misc_feature (1)...(1165): n = a,t,c or g
atggtggcgttttatcgccatgccgggcgcatgtggccgggaattgcgctgagctgttcgctgggaaatatcgccgcatccatcctgcttttttccaccagctcgctgaacatgacctggacgaccatcaatattgttgaagccgtggtcggggcagtgctgctacgtaaattgctgccgtggtataaccccttgcaaaatctggctgactggctgcgtctggcactcggcagcgccattgttccgcctctgttggggggtgttctggttgtcctgctgacgcccggagacgatcctctcagggcatttttgatatgggtactgtcagaatccatcggcgctctggcactggtgccgctgggattgttatttaaaccacactatctgctgcgccatcgcaacccacggttgctttttgagtcgctgctcacgttagccatcacactgacgttaagctggctttcgatgctgtatctgccgtggccttttactttcattattgtgctgttgatgtggagcgccgtgcgtctgccacgaatggaagcctttttgatcttccttaccacggtgatgatggtgtcgctgatgatggccgcggatccctccctgcttgctacgccgcgtacgtacctgatgagccatatgccgtggctaccgtttttgctgatcctgctgcccgccaacatcatgaccatggtgatgtatgcctttcgtgcggaaccgaaacacatttccgaaagcgaaaaccacttttcggaaacgcgatggaataattccgctaatccgtctgctcagccgattaactatggctatcaaccgctgtttgaagatcgtcgaccacgcaatattggcgatacgctgaccatcgtgttgcaggagaacgtcagcgccagcaaaagctcctctgcgaatgccagccgtgacggtaaaactaattttggctttgatactgtgccgcgctatttgcaggggctgtttggtaacgctcgtgccgatgtcgaagcctccggtggtaacacgttcaacggaaagggcggggccaatgccagcaatacctttagcggcacgttgacggtgacggttgacccagttactggtcaacggcaacctgcatgtggggggtgaaaaacaaattgccattaataagggtttgatcgaccnctag

SEQ ID NO: 142987 - DNA, 945 bp, Homo sapiens
ttaatcatcagtgattaacgcttggtaaatgaactcaacgccttcttcgtcgtcttcgtcccagtcgtcatcacagtcttcatcatcctcttcagcaatctcttcaagctgctggcgatgataatcatcccacatgaattcgactttctctggctgtttcgcttcttcagcctgcacgaccgggttttcaatgataaaggtcatcacatcccagcagagatctttcacgcccagtccactcgccgcagagatcagataatatttatcttcccagcccagcgcctcagcgatcgctttcgctttctcttcggcttctaccttatccagcagatcgatcttgttgaacactaaccaacgcggtttcgtcgccagatcctggctgtatttttccagctcgctgataataatacgcgcgttttcaaccggatcggtaccgtcaatcggatcgatatcgatgaggtgcaacaggacacggcaacgttccaggtgggtacgtaacgcgcgtctaggaagaacttcggccggggcaaaacgctggaagctgatactgcgtggatccagcgcggtatgcagagcggtggtgttaatgagaacgcggtggcttccggcaaagcgcgggggcgtcaggaaaagaatcaccgtgcatgcctgccggataacaaaggtccggtttccggtccgaagatcatcgacggtgcagagcttctgatcccgatggctggcctcatcaacaaagaagatgagctggcgcgtctggcgaaagaagtggcgaagattgaaggtgaaatcagccgtatcgagaacaaactggcgaacgaaggctttgtcgcccgcgcaccggaagcggtcatcgcgaaagagcgtgagaagctggaaggcttgtttctgagcatgaacgcccgcaagccaacatgttagttgaagcatcagggcgattagcagcat

SEQ ID NO: 142988 - DNA, 2718 bp, Homo sapiens
ttatgcccagggcggtattgccgccgtgtttgatgaaactgacagcattgaacccgtgacacgttcccacatttcaggcaggttcagcgtcagataacccgattgcgttgcgccacctgtcgcggtaggaattggcaaaccgtagttattaaacgcacgattaagatcgctgctgtagttacctttgaagtcaattttcacttcagaacggtaggtcagtgcatagcggttatttttatccagttcatacaggattccggcgttccagccaaagccccactggttaccgttcagatgagcgattttggtattactgtcaataccgttggcggtagctgccaatgcttgcccttgctgagtttggccagcaggagattgcataatttggccagcaaccaactgccccagatcgcccccgacagagccgcctgcataagtatcgttaaactctgtagccagaccatagttagaggtaatagaagcgccccaaccaaattggtcgtaatcggtgcaacaaagtgcatgttcgacctggccaggttgctgggtcgatctagaggatccccaagtctgggtgtggtacgaatggacaacgaaaagagcttcgttgttgccgatattccaggactgattgaaggcgctgcggaaggcgcaggtctgggcattcgcttcctgaagcacctggaacgttgccgcgtcctgttgcacctcatcgatatcgatccgattgacggcaccgatccggttgaaaacgcgcgtattattatcagcgagctggaaaaatacagccaggatccggtcgtgcaggctgaagaagcgaaacagccagagaaagtcgaattcatgtgggatgattatcatcgccagcagcttgaagagattgctgaagaggatgatgaagactgggatgacgacagcgttaaacggacgtgcatccgggctacctaaatatccgcacacgcggcgagttaccgacacacgggaggcgtcatggttaccacatttcgggcaagtgaagcctttgctggtgcactcgaactcaccggtaaagccacactcgtagcactcatcaatcggtgtattggtgccgtaatacggtacatgctgatagctgtaatcccagacatcttccagcgccttcaggttgtgctgaatgtttggatactcgccgtagcaaatgaaaccaccgttcgccagcggcgggtaaggcgcttcaaagtcgatcttgtcgtacgggttcaccttcttctccacatcgaggtggaaactgttggtgtagtaacctttatcggtcacgcccggcaccacgccaaactcagcagtatcgagacggcagaagcgatcgcacaggttttcactcggcgtgctgtagagactgaaaccataacccgtttcttctttccactgatccactgcctgacgcagacgttcaacaatggcgatacctttcgcgcgaagctgctcgttgtcgtaaacatgctcgccgccgaacagcgcgttaatggtttcgtggatgccgatgtgcgacgttatatttggattgcaaccattggactcatgcgaggaagcagataaggaccaaaacctccgcgggtatcggataccttgataaccggcgaacatattttggccggggggagacccaggatttcgatgcatccgtctgatctcctctacgacgacggtatgtgcaagcactaagtgaacgcgcggcttcctggatgcacagctgagctctggcgacactagacaggtgacagcacggtagtgcgttgtctgcatcatggtggcgggggcaatcaggttatgccgcgaaagccctgaaccatcggcaataatggtgtttccaatatcgacaccggcttgctggcgcaggatctgacgcacggcgtccgacccggcccgccatgttccaggcacattgaagcgcgcatggcctatcatgcggaaaaccgtatcggcgatcatgttgtccgactttttcagcataatcttaagcagatcgtgcagcggggccgactgtttactggcaactaccgttccaggttcgttaacctgagtctggcgcagcagtgttccgctccaggtgatacccgcctgttttaactcatctttcagaattgcaccggcatagctggctccatcctgcacggcaaaagccaacgggagcggctcagaacgttgtggcaggcatcccgtcagcgtaaagcggttcaggtcgcctggcaccacatccagttcgcagtattgcgcttcggcagaaccacgggggagggtgcgtacctggctgaacatcgtaacggggtaataagatgccacgcgtataaaagccatatcaccaggcaggaaccccatggtggaatagaccgccgagctattattcgtcaggcgcgactgccagtcggccgggatcagcttgcctttatcgtgcaggatttgtacgtcggtcacctggttataagtgacaacgtcggcttttaagccctgtaaaatcgccagcgcctgttttgatgacccggcatgagattgttttatcgtcagtttgtcgccgccgttatcttttgcccattgttgctcaaacggcggattcagggcggcaaacagctcgcgggagacgtcataagaactgttcagcagttccgttgcctgtacatggcccgccagcagcagagaagcgaccagcgcgagtgagttctttttcagtaagttaacggccat

SEQ ID NO: 142989 - DNA, 4290 bp, Homo sapiens
ttagcgcatttcagcgcgaacgcgctcaagatcttcaggggtatccacacctgtgccaggaacttcctgagcaacagcaacatggattttttcgccgtaccacagaacacgaagctgctctaacatttcgatgtgttctaacggacttggctgccagttgacgtaacgacggataaagcctgcacggtagccataaataccaagatgacgcaggaagttatcgccaacggtttcaaggccttctgcaaaacgatcacgatcccaaggaatggtggcgcgagagaagtacagtgcatacccttcagcgtcgagaaccactttcaccgcattcgggttaaacgcttcttccgcattgtggattggcaccgccagagtcgccatacccaactgacgcttagcgaggttatcagcaacctgaagtggttcgctgaagaacaatggctgccagtactcgatcccggcaggtaatgtgcctttactcacatgcatggtaaatatgttctgggtcgcgcttcacttcgaaggtatcgcgccactggctgcggaacagttcaattgccgctttatgtattcccgacgccaaactggcattggtgatccgtccaccgttcagttggttaacctgaacactgctaccgccagcggaggctcctgcgccgccaaccagaatattgccctgcgccagcgcatacacctgactgtcaacgcccttaagcggtgtcatcaacaacgtacctccacgcaagcttttggcatttcccatggaagaaaccaccacatcgatggtttgcccctgacgtccaaacggaggaagtgacgctgtcaccattaccgcagcgacgttttttagctgcatattggtgcccgtcggaacggtaattcccagctgtgagagcatgttattaagcgtttgtgtggtaaacggcgtctgggttgtctggtcaccggtgccatccagccccaccaccagaccatagccaatcagtgagttttgccttaccccctgaacaattggcgacaggttaaggaagaaacgctgcaaccagcccatattttgcgcttcgttaatgtagccattgcctacgtattcaatgcgcgcatccgccacctgagtagacggtacggtattgctgccgctgatagtgcgtggattaaccacgccagagaagcgaataaattcggtaccctgattaatggcaatctgtttttcacccaccacatgcaggttgccgttgaccagtacctggtcaaccgtcaccgtcaacgtgccgctaaaggtattgctggcattggccccgccctttccgttgaacgtgttaccaccggaggcttcgacatcggcacgagcgttaccaaacagcccgttctcctgcaacacgatggtcagcgtatcgccaatattgcgtggtcgacgatcttcaaacagcggttgatagccatagttaatcggctgagcagattgctgctgtttgttatcagtctctggctccagttgggattgccggacgaactgtcgcgctttacgccattctgtctggcgctgccgattatcgcgctggcctggcactatggttggcaaggggcgctgattgcgacgttgatgaacgccatcgcgctgatcgccagtcaaacctggcgcgatcatccggtggatttattgctctcgctgctggtgcaaagtctgacagggttgttgcttggcgctggcatccagcggttgcgtgaacttaaccagtcgctgcaaaaggaactggcgcgcaatcagcatctggctgaacgggtgctggaaaccgaagagagcgtgcgccgtgatgtggcgcgtgagctgcatgatgatatcggtcagaccatcactgctattcgtactcaggcgggcattgttcagcggctggcggcagataacgccagcgtgaagcagagcgggcagctcatcgaacaactatcgctgggcgtttacgacgcggattccgaccttgacagtgtcaagcaggcctgtcatggcgtctgtagagcgtccctcacgttgggtccgtctggtgtttcctcgcaattagactgggtgatgggttttgggaagacgcccacagagaggatccccctgctggagctgatgctgctggctgacgtcggtatgttggggatgccaaacgcgggtaaatcgacctttattcgtgcggtatcggcggctaaaccgaaagtggcggattatccgtttaccactctggtgccaagtctgggtgtggtacgaatggacaacgaaaagagcttcgttgttgccgatattccaggactgattgaaggcgctgcggaaggcgcaggtctgggcattcgcttcctgaagcacctggaacgttgccgcgtcctgttgcacctcatcgatatcgatccgattgacggcaccgatccggttgaaaacgcgcgtattattatcagcgagctggaaaaatacagccaggatctggcgacgaaaccgcgttggttagtgttcaacaagatcgatctgctggataaggctgaagaagcgaaacagccagagaaagtcgaattcatgtgggatgattatcatcgccagcagcttgaagagattgctgaagaggatgatgaagactgggatgacgactgggacgaagacgacgaagatggcgatgacgacagcgccgatgatgacaacagcatcgacccggaactggctcgcgaaaaatttgcggaactacgcgctcagtacgttgtaacgcgtgacaccatcaaagcgaaaggtcgcagtcacgctaccgctcaggaagagatcctgaaactgtctgaagtattcaaacagttccgcctggtgccgaagcagtttgactacctggtcaacagcatgcgcgtcatgatggaccgcgttcgtacgcaagaacgtctgatcatgaagctctgcgttgagcagtgcaaaatgccccgagaaaaacttcattaccctgtttaccggcaacgaaaccagcgatacctggttcaacgcggcaattgcgattgaacaagtccgtgggtccggaaaaactgcacgaatgtctctgaagaaaggtgcatcagcgccctgcaaaaactgcagcagaattgaagaaagaaaccgggcctgaccatcgagcaggttaaagatatcaaccgtcgtaatgtccctcggtgaagcgaaagccccgccgtgccgaagaaagagaatggttgaagccgaacttacgtctggttatttctatcgctaagaaatacaccaacccgggcttgcagttccttgacctgattcaggaaggcaacatcggtctgatgaaagcggttgataaattcgaataccgccgtggttacaagttctccacctacgcaacctggtggatccgtcaggcgatcacccggactctagagatagagtgtaccggtttggttgtctacgagcacgaagatgacagtgatgatgacgacccgcatcacggtaaaccgtccgcccatagcagcctgtgcgatgcaaccgggttgattaaccatctgattggcgttattgcggtgaccaaaatgaacgccagctcgctgaggacattgctcgacggcatgaatgccccctgtcgcctttactggcttcctggtggcactgttgattctgtcgccggaagtttaggtgcattaaaagcagtgttgaacaaccagcttaccggtctgggtttcgccaggcactttcagtttgacgcgaccatcaagggtcggtacttcgatttcgccacccagcgccgccatagcgaagttgatcgggacttcgcaatacaggttgttgccgtgctgctgtttatcgtcgggttgctgtgtatcagtttcccgttcgtctctggcgatattttaagcacagtagtgggcattcatcttcacggcgtagactttgctattgttgatccagttcgcttcaatgctggaactcacgctgtttaccatcgtcacgcatggctgggagaattattaccgttaattgagaaaggattactgaaaccagaagaaattgttacccactatatgccgtttgaagaggccgcccggggatatgagattttcgaaaaacgtgaagaggagtgccgtaaggtagacattcagatcagtacaacatgcagatctaccgacatcgcgatcccagttgatgccgaagtagtgtttaccatcgatgttagcaccagcagcgaaatcactcatcgccgcaacggtacggtcaatcaccaccggaatcggcatgtttaccggacccagttaacccggaccggctttaaccaccagcaggcataa

SEQ ID NO: 142990 - DNA, 1018 bp, Homo sapiens
atggcctttatgctaagtcctttgctcaaacgctatacctggaacagcgcctggctgtattacgcgcgtatttttattgcgctttgtggaaccacagcgtttccgtggtggctgggtgatgtaaaactgacgattccgctaacgctggggatggtggcagcggcgctgaccgatctcgatgaccgactggcgggacgtttgcgtaacctcatcattacgctgttctgcttttttatcgcctcggcctcagtagaattgctgtttccctggccctggctatttgcgattggcttaacgctctctaccagcggcttcattttgctcggcgctctggttcaacgctatgcaaccattgccttcggtgcattgctgatcgccatttacactatgttgggaacatcactgtatgagcactggtatcagcagccgatgtatctgctggccggtgccgtctggtacaacgtcctgacacttattggtcatctgctgttcccggtccgcccgctgcaggacaacctggcgcgttgctatgaacaactggcgcgttatcttgagctcaagtcgcgcatgtttgatcctgatattgaagatcaaagcgagggagccgctgcccgatgtgaccctagtcaacggcctggtgatggagacattgaatcagacgaaactctcgctgctgacccgcttacgtggcgatcgtggtcaacggggaacgcgtcgcacgctgcattattactttgtcgcacaggatattcacgagcgtgccagctcttctcatattcagtatcaaacattgcgtgaacattttcgccacagcgacgtgctgttccgttttcagcggctgatgtcgatgcagggccaggcgtgccagcaactgtcacgctgtattttgttgcgtcagccttatcaacatgactccgcattcttgagcgcgcttttacgcatattgatgctgcgctggagcggatgcgcgataacggcgcacccgccgatttactcaaaacactgggataatgcttga

SEQ ID NO: 142991 - DNA, 1006 bp, Homo sapiens
atgcacgcttatcttcactgtctttcccactcgccgctggtggggtatgtcgacccggcgcaagaggtgctcgatgaggtcaatggcgtgattgccagcgcccgcgagcgtattgcggcattctcccctgaactggtggtgctgtttgcgccagatcactacaacggctttttctatgacgtgatgccaccgttctgtttaggcgttggagcgacggcaattggtgatttcggcagtgcggcaggagagctgcccgtgcctgtggagctggcggaggcctgtgcgcatgccgtcatgaagagcgggatcgatcttgccgtttcttactgtatgcaggtggaccacgggttcgcccagccgctggagttcctgctcggtgggctggataaggtgccagttctgcctgtgttcatcaacggtgtcgccacgccgctgcccggtttccagcgtacccgcatgttgggtgaagcattggacgtttcaccagcactctcaataaacgcgtgctgttcctgggttccggtgggctttcccatcagccgccggtgcccgaactggcgaaagcgatgcccatatgcgcgaccgtctgttggggagcggaaagatttacccgccaatggttggcaaccgacgacagtcctgctaaaacgttcgtttgatatcatttttcctaaaattgaatggcagagaatcatgagtgacagccagacgctaatggtaaaactcggcaccagtgtgctaacaggcggatcgcgccgtctgaaccgtgcccatcaagttgaacttgttcgccagtgcgcgcagttacatgccgccgggcatcggattgttattgtgacgtcgggcgcgatcgccgccggacgtgagcacctgggttacccggaactgccagcgaccatcgcctcgaaacaactgctggcggcggtagggcagagtcgactgattcaactgtgggaacagctgttttcgatttatggcattcacgtcgggcaaatgctgctgaccc

SEQ ID NO: 142992 - DNA, 449 bp, Homo sapiens
atgaagttcgcccagccagtagcacccgggccggaaccatgcagcaggacaacgggtttcgtcgccttgtccgcagtcattaaaatggatgcgcagcgttttacccgcttcttctacattcagaaaacggctggtggcggcttcgccaaatccggcaatccactccgggattgggcggtaataacgcccttcgctacgccagttgccaaacgcagaaatagcggcaaaagcggcgacccaggttttgatttcatgtgtcgactttccggcaatggcggaaagctcttcgttactgacggcatccagttcctgtatgcgtccctgctccagcaaagtcatgaactggttatcccaaatcgggttgagcggatgcagcgttctctgatcctcaacaaacttctcagcggcgctaatcacccgttgctgacgcaattcgcgctcactggcgg

SEQ ID NO: 142993 - DNA, 618 bp, Homo sapiens
atgggcgtttcgcgtgatacgttttatcgttaccgcgaactggtcgctgaaggcggtgtggatgcgcagattaatcgtagtcgccgcgctcctaaccttaagaaccgtaccgatgaggcaactgaacaggctgttgttgattacgccgtcgctttcccgacacatggtcagcaccgggccagcaacgagctgcgtaaacagggggtttttatctccgacagtggtgtccgttctgtctggatccccattttgttgcaggatggagatcagacgttgacttttaaagttgattatatcgctacggggaaagcgacttcagaaggtgaagagcaaatttcactgggtgtacgtaacaccagtccggatgttccttatcttattcagtcatgggtgatgaccccagataataaaaaatcagcagactttattattacaccaccggtatttgtgctgaatccgggcaatgagaatctgttacgcattatgtacattggagcgccgttggcgaaagacagagaaacccttttcttcactaacgtacgggcagttccttcaacaacgaagcggaaagagggaaataccctgaagattgcacacaagcggatgataactaactga

SEQ ID NO: 142994 - DNA, 1689 bp, Homo sapiens
atggtatggtcctgccaaaagccaccagttactggaaaacgctatccggaatcaaaaatctcctgggtggagttccccgcgggtccgcaaatgttggaagcgttaaacgttggcagtattgatctcggcagtaccggggatattccgccaatctttgcccaggctgccggggctgatttggtgtacgtgggcgtcgagccaccgaagcccaaagccgaagtgattctggtggcagaaaacagcccgatcaaaaccgtagccgatcttaaaggtcacaaagttgcctttcagaaaggttccagttcacacaaccttttactgcgtgcactgcgtcaggccggacttaagtttaccgatatccaacccacttacctgacgcccgctgatgcccgcgccgcgttccagcaaggtaacgttgacgcctgggctatctgggatccctactactctgctgcattattacagggcggcgtgcgggtgctgaaagacggcaccgatctcaatcaaactggatcgttttatctggcagctcgtccctatgcagaaaaaaacggcgcttttattcagggcgtactggcaacctttagtgaggccgatgcgttaacccgcagccagcgcgagcaaagcatcgctttactggcaaaaacgatgggcttaccggcaccggtgattgcctcttacttagatcatcgccctcctaccaccatcaaaccggttaacgccgaggttgccgccttacagcagcaaacggcagatctgttttatgaaaatcgtctggtgccgaatctgttacgcattatgtacattggagcgcccgtacgggcagtcccttcaacaacgaagcggaaagagggaaataccctgaagattgccacacaaagcgtcatcaaacttttctggcgaccaaaaggtttagcgtatcccttaggcgaggctccggcgaaactgcgttgcacttcgtcagctgacatggttacggtcagtaacccaacaccttatttcattaccctgacagacctgaaaataggtggaaaagtagttaaaaatcaaatgatttccccctttgataaataccaattttctctgccaaagggggccaaaaatagcagcgtaacgtatcgaaccatcaatgactacggggcggaaacgccgcaactcaactgtaaatccctgttaagctctggtggagtgccatcgtttattggtgggctggtggtgtttgtgtcggcagcgttcaatgcacaagctgaaacctggttcgatcctgcttttttcaaagatgatccctcaatggtggccgatttgtctcgtttcgaaaaaggacaaaaaataacgccaggggtttatcgtgtcgatattgttctgaatcagacaattgtagatacgcgcaacgtcaattttgttgagataacgccagagaaggggattgccgcctgtttgacgactgaaagcctggatgcaatgggtgtaatactaaagcgtttgcggtaccggctccagacagcccctaagtcctttcttcttatggctttggcttctctagtgacaaacaggcatggcctgagtgtgcttcctatgtgcccatactgcgtttccctgggtcagggtactcggtgtagctctgtgaagacttccatttctgtagagctcaagaaagtggacaccctgaatttctcagaccttgggtaa

SEQ ID NO: 142995 - DNA, 981 bp, Homo sapiens
gcaagaccctgaataaactggcgtcggtgatgacgctgacccgccctgatgccgacgtttctgtcgaaaaggtagcctgatatgcacgcttatcttcactgtctttcccactcgccgctggtggggtatgtcgacccggcgcaagaggtgctcgatgaggtcaatggcgtgattgccagcgcccgcgagcgtattgcggcattctcccctgaactggtggtgctgtttgcgccagatcactacaacggctttttttatgacgtgatgccaccgttctgtttaggcgttggagcgacggcaattggtgatttcggcagtgcggcaggagagctgcccgtgcctgtggagctggcggaggcctgtgcgcatgccgtcatgaagagcgggatcgatcttgccgtttcttactgtatgcaggtggaccacgggttcgcccagccgctggagttcctgctcggtgggctggataaggtgccagttctgcctgtgttcatcaacggtgtcgccacgccgctgcccggtttccagcgtacccgcatgttgggtgaagccattggacgtttcaccagcactctcaataaacgcgtgctgttcctgggttccggtgggctttcccatcagccgccggtgcccgaactggcgaaagccgatgcccatatgcgcgaccgtctgttggggagcgggaaagatttacccgccagtgagcgcgaattgcgtcagcaacgggtgattagcgccgctgagaagtttgttgaggatcagagaacgctgcatccgctcacaccgatttgggataaccagttcatgactttgctggagcagggacgctacgggactgacatctgttatcacttaacccattacaagcccgctgccgcagatattcccgtggcgagcgataacccagcgcactatgcggatgccattcgttataatgctcgaacgcctctgcaaggttctttgctgccgttaacccgtctg

SEQ ID NO: 142996 - DNA, 2001 bp, Homo sapiens
ggtttggaactgggcgaagaactagattgtgatgagagtttggaattcatggcgcttggcaccagcgagttatttacccgtggagatgtgcaacaccgcctgcgtagttgccgctgtcatcttcgcccatgtgaaggctcctgccttcaacatcagacgccagctctgcagctgttagactcacaccagtgtttgcgcagcgattcgtcggaccccgagctccgttcgtgggtcgtccaggtcgattctcccagagcatccaacagaattccccagcagatttgggtctccgtgaaggtccagcacaaccaacaggcaggaccggccaatcacactttggccgagaggtatcccccagcagactttattattacaccaccgctatttgtgctgaatccggcaaatgagaatctgttacgcattatgtggattggagcgccgatggcgaaagagagagaaacccttttcttcactagcgtacgggcagtcccttcaacaacgaagcggaaagagggaaataccctgaagattgccacacaaagcgtcatcaaacttttctggcgaccaaaaggtttagcgtatcccttaggcgaggctccggcgaaactgcgttgcacttcgtcagctgacatggttacggtcagtaacccaacaccttatttcattaccctgacagacctgaaaataggtggaaaagtagttaaaaatcaaatgatttccccctttgataaataccaattttctctgccaaagggggccaaaaatagcaacgtaacgtatcgaaccatcaatgactacggggcggaaacgccgcaacttaactgtaaatccgacgtgctgttccgttttcagcggctgatgtcgatgcagggccaggcgtgccagcaattgtcacgctgtattttgttgcgtcagccttatcaacatgatccgcattttgagcgcgcttttacgcatattgatgctgcgctggagcggatgcgcgataacggcgcacccgccgatttactcaaaacactgggatttttgctgaacaatttacgcgccattgatgcccaactggcaacaattgaatcagaacaggcccaggcactaccccataataatgacgaaaatgagctcgctgatgacaacccgcacgggttgagtgatatctggctgcattctaaccgtcacttatatgcgcacaggcctccgccagctccacaggcacgggcagctctcctgccgcactgccgaaatcaccaattgccgtcgctccaacgcctaaacagaacggtggcatcacgtcatagaaaaagccgttttctgaatgtagaagaagcgggtaaaacgctgcgcatccattttaatgactgcggacaaggcgacgaaaccgttgtcctgctgcatggttccggcccgggtgctactggctgggcgaacttcagccgcaatatcgatccgctggtagaggcgggctattggctcccaacaccccctttcgtgggggctcggccactcgctatgtctctgtgcgcacactcgttttgttactccccccgttataacagtggatattgtagtggaatacgattgaaggggtataacagggtcgaaatattaaacgtggccacggggttacgccacagggagagattagaatcctatagaactcctgacaaatgcaaatgtttcaaatatcaggtcaaccagccaatcaacaactgtggtatccatgtggaggccaaagtaattccctgggtcttgcacatcccacgcatgcactttgcaatcatgaagccgcactttaccgtgagacacataaacgactatattggagacgctagaagagtcaccatgatgctagtagcttttacacgtggcactatcaagcctatagagtcgcgagcatcatacccttatcaagggcctacaacacctcagattctcaacaaggcctccgacgtgcctgacatggagcaaagacccaatgggaaacaactgagactcagtgtctag

SEQ ID NO: 142997 - DNA, 618 bp, Homo sapiens
tgggcccacctggcagcagatggtcatcgtgtcggtttattgacaggcgatgtcgcgcagaaaaaacgtctgcgtattcttgatgaatttacccgtggcgatctggatattctggttgccaccgacgttgccgcgcgtggtttgcatattccggcagtgacgcacgtctttaactacgatttacccgatgactgtgaagattacgttcaccgtattggtcgtacaggtcgcgcaggcgcaagcggtcactctatcagcctggcgtgtgaagagtatgcattgaatttgcctgctattgagacctatattggtcactcaattccggtaagcaaatacaatccggacgcattgatgaccgatctgccaaaaccgttgcgcctcacgcgcccgcgcacaggcaatggtccgcgtcgtactggcgctccgcgtaatcgtcgtcgttcaggttaaataaaaaatgtcatactcaaaatcattcaaactgtatcaagatggcaagagaatgaatcccgatgagcttactgtagtaagtgattcaggtgaaagaatgcagccaacacagagacagattgaaggatgaagagtatgggttccacctcgtcgctgtatgcagccatt

SEQ ID NO: 142998 - DNA, 2646 bp, Homo sapiens; identical to SEQ ID NO: 139170

SEQ ID NO: 142999 - DNA, 2958 bp, Homo sapiens
ttaacaggttcctggattcgtcttaataaccaaaaccgtaacaccgggagtaataattgctgtggtatccataaccgagatataaagttcatcgaccacgcctaccgttagctgcgcagaaacaggtttacctttcagcgacgaggttaattcgacattgaccagttcaccaggctggggatgggggttgtccgttttcacccggatatccagctggggaacggcaactttgatcccggcgttctgaaaactgtactgaccgttacgggtatacagcaccgaaaaagtgatgttaggcgcaaaggaattgctcactggaacccgggcttcatactgggtatcgtttaaacgttgtagcgttacgcagtttgccggatgcgaaagcagcgactgctgttccacgcgatcgctttccagcgtcaataatgcttcatcaattggctccggaaaggtaatcagcatcttcgcggtttcgcctggctggtacagcgttttatccgccacgatatctaccgtaccagtatgcgccgtgctgcccttaccgctgacggcatgacttaacccagcgagaattaagccgtctttatcgcgtaatgtcagattgtagttgccaggtttagcgaaattgacggtaaaggatttgccgcctgacggtagctctccgctatggctcgtgcggtcttcgagacgcaaccattcatacgtaacatgaaaccgcccgtaactgcggagacggttataaatagcggctcgtttatcggcgccgggaagattaaacccaattggggggtaatagcttgtaatggccttggtcacattaccgatacgtcctacggctttcgctttagatttggtgtaagcgatggacggacgcagaccgaaatcgaactggtattgcgcaactaacagaacgtcttgcgttttgttggcgaagccgctggtgtttgtaaatttattagtgatcggcgtagcgttacgggtttcaccgtagttcgctgccaggtagatgttgttcgcgtcgtacttcagaccagtagcccactgttcagcttttttaccgttgccaagaggttgagcttcttgcaggttggtacggtcagctgcaccataagcaccaacgataccaaagccttcgtattcgtagctgatagaaccgccaacaccgtcgccgttagaacggcgtgcagtgtcacgctcgtttttgccttggtactgagcagcaaagttcagaccatcaaccagaccaaagaagtcgttgttacgataggttgcaacaccagttgcacgttgagtcatgaacacgtcggtttgagtccaagtgtcaccacacgaattgtcagtccacgcaccgatgtcgtatgctacaccgtagttacggccgtaatcgatggagccgtagtcaccgaatttcaggccagcgaaggcaagacgggttttatctgtgctgcatgtggctcggcgaagtttgcatgcctgcaggtcggaaagataagtcgcctgccggatgccgttatcgcctgtgttggcggcggttcgaatgccatcggcatgtttgctgatttcatcaatgaaaccaacgtcggcctgattggtgtggagccaggtggtcacggtatcgaaactggcgagcacggcgcaccgtccatctccgccggactggatttcccgtctgtcggcccacaacacgcgtatcttaacagcactggacgcgctgattacgtgtctattaccgatgatgaagcccttgaagccttcaaaacgctgtgcctctccagctccatttgcagcctccccatggcctttgtagacataggtaatggcaatttcagtgccgttcagattggcgctgaatttcttcgattcttcaatagcactctgttcctgatagcgccagccgttatggagcagttgaataagtaacgcctggcagcgtatcagcaactgatgagcagtagacggcacaggcaaaacgctggcagaaggtagcggtgcaacaggcgtagtttccgggtcaacccccaggcagggttgtaatgacagcgctaccgtgccatggtatttgccggtgcagtagcgaaagattcggacttcaggatgctggcggtatatcgtcattgccctgcgtttactgataattttcatgtaatacctcaaagcagaccgtgttctgcgaacgaatagatttgcctgaaccagtcgctgcgtgagggttttgtcggcctggctaggtgtcgtctcgccggaaggatggttatgcgcgagtatcaccgccgccgcgttgaagtgcagagcacgtttgaccacctcccggggatgcacctcggtgcggttaatcgtgccggtgaagagcgtttcatgggcaatcaactgattctggttgtccagatacaacacccggaactcttcccgctcaagcgcggccatatgcagtcgcagccattcacgtacggcgtgggtagaggtgaaggtcccgcagcggtaatagtgtgcggtcatcgcgtcacattctgtacggcaggcatggtggctatacgcaatcaggcagacagcaatacctgctgcttctgcactcatttgggcatcgttaccgttcaggcagttaaacagacgccatgtctcatcgttgtcaggctcgggggacataaatgcgccgccattgctgagggtgtagaacgaccagataccaccgctgtagccctcacagaagcggtccatccaggcgaagatatgcggctccaggagtagccactgcgggatagcgccaaagtactgtggccagaaatcgatacgctgttcatcggggaccggcgtgacggtcagttcaaattcgggttggttagcgggtgcgaggtcgtgctgcgtctgtgttgtcatgggtatgtctccgtcaataaaaacgcaacgcatgggctggcgtatggggcttttgggggtactttgggcggcactctcttgcat

SEQ ID NO: 143000 - DNA, 3036 bp, Homo sapiens
atggtttggggttttacatgctcaacaacagcgacactagagggacaatcaactgcagcttcttcaaggacctctaatcaggacatatcagcttcatctcagaaccaccagactaagagcacggagaccaccagcaaagctcaaaccgacaccctcacgcagatgatgacatcaactcttttttcttccccaagtgtacacaatgtgatggagactgttacgcaggagacagctcctccagatgaaatgaccacatcatttccctccagtgtcaccaacacactcatgatgacatcaaagactataacaatgacaacctccacagactccactcttggaaacacagaagagacatcaacagcaggaactgaaagttctaccccagtgacctcagcagtctcaataacagctggacaggaaggacaatcacgaacaacttcctggaggacctctatccaagacacatcagcttcttctcagaaccactggactcggagcacgcagaccaccagggaatctcaaaccagcaccctaacacacagaaccacttcaactccttctttctctccaagtgtacacaatgtgacagggactgtttctcagaagacatctccttcaggtgaaacagctacctcatccctctgtagtgtcacaaacacatccatgatgacatcagagaagataacagtgacaacctccacaggctccactcttggaaacccaggggagacatcatcagtacctgttactggaagtcttatgccagtcacctcagcagccttagtaacagttgatccagaaggacaatcaccagcaactttctcaaggacttctactcaggacacaacagctttttctaagaaccaccagactcagagcgtggagaccaccagagtatctcaaatcaacaccctcaacaccctcacaccggttacaacatcaactgttttatcctcaccaagtggattcaacccaagtggaacagtttctcaggagacattcccttctggccagcggcggctgtgggaggctgtgaagaggaggaaggccttgtgcaaacgcaagtcgtggatgagtaaggtgggtgaggaggtggaccaagttggaggtgcgtcctccttttgccagacctcctcttgtgcctcttgctgtatgcagagcgtcgtgatgacaacctcagtgctcctagatagttggcaagatgatactcagagagacaaagtctcagggaagaattcagcttcaagtccactttctggaattgactgtaattcgccaccttctcttacttcagacagtaacttagactctcaatttccacagttcccagaccgtcagctgtgccctccccactcccagcacgttgagagcagcagtacttggctctccaccctcaagacaggaaatttgcttagctcctaccatgcgccctgctgcacagtggccccaatgcctgcaaaagagacagcaccctattcactgcccaaggtcatgagaagggccatgctggattccaaagccatgctcttgccaccaacaccgccctgccctaccaagctctccaccaacaccgccctgccctgccaagctctccaccaacaccgccctgccctgccaagctctcaaccaacaccaccctgccctgccaagcttctccaggtcctcaacctccccgactcactgctgttctccgcagcccaggaactggagccacagagctggtgctgccgctggaatgacaagccctacctctgtgccctgtaccagcagaggcggccccacgtgggctgtgctacatacaggcccccacagcccgcctggatgttcggggacccccacatcaccaccttggatggtgtcagttacaccttcaatgggctgggggacttcctgctggtcggggcccaagacgggaactcctccttcctgcttcagggccgcaccgcccagactggctcagcccaggccaccaacttcatcgcctttgcggctcagtaccgctccagcagcctgggccccgtcacggtccaatggctccttgagcctcacgacgcaatccgtgtcctgctggataaccagactgtgacatttcagcctgaccatgaagacggcggaggtggtccctgtgtgctgtgtgctggttgcgagtgggccgtggttgcggtgggcgtgtgcatggggccctggttgcgtgtgcgtgttgcagtggccgtggttgctgttgcgtgttgcaggggccctggttgctgttgctgtgtgcagttggccgagtgcgttgtggtgccgggcccggtggctggctgcaagtgtgacgggggcaccttcggccgctactgcgagggctccgaggatgcctgtgaggagccgtgcttcccgagtgtccactgcgttcctgggaagggctgcgaggcctgccctccaaacctgactggggatgggcggcactgtgcggctctggggagctctttcctgtgtcagaaccagtcctgccctgtgaattactgctacaatcaaggccactgctacatctcccagactctgggctgtcagcccatgtgcacctgccccccagccttcactgacagccgctgcttcctggctgggaacaacttcagtccaactgtcaacctagaacttcccttaagagtcatccagctcttgctcagtgaagaggaaaatgcctccatggcagaggtcaacgcctcggtcagtgctgcaggccgcgctctggtgaacgtgagcacgctgaaggcttacttcagatgcgatggctacaagggctacgacctggtctacagcccccagagcggcttcacctgcgtgtccccgtgcagtaggggctactgtgaccatggaggccagtgccagcacctgcccagtgggccccgctgcaggtgcatagggctgtggccaggaggtggaggacagtgctggggaacccaagctgggcaagacactgcaaggggtccaggaattaggatggctcgagagatcagagaccagggaagagaggacagtggaaaaggagagttgtga

SEQ ID NO: 143001 - DNA, 1137 bp, Homo sapiens
atggtgctgcagatggtgctgaggatggagaacccaccaagccccgctaggagccacctagactggatgcagagcatgctttacaaagggaagccccacaaaaggacacaggtggcaaatccggggacctggatgctgggtcaccgacttcatgttcttgctgacttcctggcctcggttttcttctccttaaggctgggtgaatggaatgagtttagatccctggacctccaggccctcctgtgccccggggtggccctgcttcacagggatgcccggtcacctggagaagagcatgagctcagcataaaagcaaggcccaccctgcaggggccagcagctgggagctgtccactaaccactatccttgcagctggacagcgaggcccctccaaaaggccgtctccacctgccaccgggaaaggacccggagcgaaggatgtcgtgggcggtcagcccagggatgatgcccggatggaaggaggagccacgttcctccacaggtgtcctccacaacaggtgtcctcacaacagagatggaaaactgttgtcctgaaagcgtcaccaaacaaaacctgtggaaaggttccctggccccttcggagaaacgcacttggttcgggccagccgcctgaggggacgggctcacgtctgctcctcacactgcagctgctgggccgtggagcttccccagggagccagggggacttttgccgcagccatgaagggggcacgctggaggagggtcccctgggtgtccctgagctgcctgtgtctctgcctccttccgcatgtggtcccagggccccggtcccctgtgtaaaaagcagtggtgaacggttggacctcctgacgcccaagttcttgagtttccaaatctgtgatttaaagctgagcccaaatgtgctgggacactcaaaaggaaaggatccctggacaagaggtcctgccaggaaaatcagccaaattttggccaacgaccagcaaggtgcacagggaagagcaggggctgaaactcagaggtccagcatcagcgacgcccttggcagcccagggaacacaggcaacgccttttggctctggagtcttaggctcttcatcggcgaactgagcccaggggaaggggctactatgtag

SEQ ID NO: 143002 - DNA, 3874 bp, Homo sapiens
cctctgaagatggaaacatcaggaatgacaacaccgtcactgaagacagacggtgggagacgcacagccacatcaccaccccccacaacctcccagaccatcatttccaccattcccagcactgccatgcacacccgctccacagctgcccccatccccatcctgcctgagagaggagtttccctcttcccctatggggcagacgccggggacctggagttcgtcaggaggaccgtggacttcacctccccactcttcaagccggcgactggcttcccccttggctcctctctccgtgattccctctacttcacagacaatggccagatcatcttcccagagtcagactaccagattttctcctaccccaacccactcccaacaggcttcacaggccgggaccctgtggccctggtggctccgttctgggacgatgctgacttctccactggtcgggggaccacattttatcaggaatacgagacgttctatggtgaacacagcctgctagtccagcaggccgagtcttggattagaaagatcacaaacaacgggggctacaaggccaggtgggccctaaaggtcacgtgggtcaatgcccacgcctatcctgcccagtggaccctcgggagcaacacctaccaagccatcctctccacggacgggagcaggtcctatgccctgtttctctaccagagcggtgggatgcagtgggacgtggcccagcgctcaggcaacccggtgctcatgggcttctctagtggagatggctatttcgaaaacagcccactgatgtcccagccagtgtgggagaggtatcgccctgatagattcctgaattccaactcaggcctccaagggctgcagttctacaggctacaccgggaagaaaggcccaactaccgtctcgagtgcctgcagtggctgaagagccagcctcggtggcccagctggggctggaaccaggtctcctgcccttgttcctggcagcagggacgacgggacttacgattccaacccgtcagcataggtcgctggggcctcggcagtaggcagctgtgcagcttcacctcttggcgaggaggcgtgtgctgcagctacgggccctggggagagtttcagtgaaggctggcacgagcagcgtccttggcagttggcccaggaactggagccacagagctggtgctgccgctggaaggacaagccctacctctgtgccctgtaccagcagaggcggccccacgtgggctgtgctacatacaggcccccacagcccgcctggatgttcggggacccccacatcaccaccttggatggtgtcagttacaccttcaatgggctgggggactttctgcttggcggcgcccaagacgggaactcctccttcctgcttcagggccgcaccgcccagactggctcagcccaggccaccaacttcatcgcctttgcggctcagtaccgctccagcagcctgggccccgtcacggtccaatggctccttgagcctcacgacgcaatccgtgtcctgctggataaccagactgtgacatttcagcctgaccatgaagacggcggaggccaggagacgttcaacgccaccggagtcctcctgagccgcaacggctctgaggtctcggccagcttcgacggctgggccaccgtctcggtgatcgcgctctccaacatcctccacgcctccgccagcctcccgcccgagtaccagaaccgcacggaggggctcctgggggtctggaataacaatccagaggacgacttcaggatgcccaatggctccaccattcccccagggagccctgaggagatgcttttccactttggaatgacctggcagatcaacgggacaggcctccttggcaagaggaatgaccagctgccttccaacttcacccctgttttctactcacaactgcaaaaaaacagctcctgggctgaacatttgatctccaactgtgacggagatagctcatgcatctatgacaccctggccctgcgcaacgcaagcatcggacttcacacgagggaagtcagtaaaaactacgagcaggcgaacgccaccctcaatcagtacccgccctccatcaatggtggtcgtgtgattgaagcctacaaggggcagaccacgctgattcagtacaccagcaatgctgaggatgccaacttcacgctcagagacagctgcaccgacttggagctctttgagaatgggacgttgctgtggacacccaagtcgctggagccattcactctggagattctagcaagaagtgccaagattggcttggcatctgcactccagcccaggactgtggtctgccattgcaatgcagagagccagtgtttgtacaatcagaccagcagggtgggcaactcctccctggaggtggctggctgcaagtgtgacgggggcaccttcggccgctactgcgagggctccgaggatgcctgtgaggagccgtgcttcccgagtgtccactgcgttcctgggaagggctgcgaggcctgccctccaaacctgactggggatgggcggcactgtgcggctctggggagctctttcctgtgtcagaaccagtcctgccctgtgaattactgctacaatcaaggccactgctacatctcccagactctgggctgtcagcccatgtgcacctgccccccagccttcactgacagccgctgcttcctggctgggaacaacttcagtccaactgtcaacctagaacttcccttaagagtcatccagctcttgctcagtgaagaggaaaatgcctccatggcagaggtcaacgcctcggtggcatacagactggggaccctggacatgcgggcctttctccgcaacagccaagtggaacgaatcgattctgcagcaccggcctcgggaagccccatccaacactggatggtcatctcggagttccagtaccgccctcggggcccggtcattgacttcctgaacaaccagctgctggccgcggtggtggaggcgttcttataccacgttccacggaggagtgaggagcccaggaacgacgtggtcttccagcccatctccgaggaagacgtgcgcgatgtgacagccctgaacgtgagcacgctgaaggcttacttcagatgcgatggctacaagggctacgacctggtctacagcccccagagcggcttcacctgcgtgtccccgtgcagtaggggctactgtgaccatggaggccagtgccaacacctgcccagtgggccccgctgcagctgtgtgtccttctccatctacacggcctggggcgagcactgtgagcacctgagcatgaaactcgacgcgttcttcggcatcttctttggggccctgggcggcctcttgctgctgggggtcgggacgttcgtggtcctgcgcttctggggttgctccggggccaggttctcctatttcctgaactcagctgaggccttgccttgaaggggcagctgtggcctaggctacctcaagactcacctcatccttaccgcacatttaaggcgccattgcttttgggagactggaaaagggaaggtgactgaaggctgtcaggattcttcaaggagaatgaatactgggaatcaagacaggactataccttatccataggcgcaggtgcacagggggaggccataaagatcaaacatgcatggatgggtcctcacgcagacacacccacagaaggacactagcctggcgcgcgtgcacacacacacacacacacacgagttcataatgtggtgatggccctaagttaagcaaaatgcttctgcacacaaaactctctggtttacttcaaattaactctatttaaataaagtctctctgactttttgtgtctcc

SEQ ID NO: 143003 - DNA, 3646 bp, Homo sapiens
tcagttcagggtgatgctcatcaggcaggtatagggcccattgcggtcctggcggcgttcggcgtataccgcgaggactccggcgatatccggaacgtccctgccggtgtaatgacagacgctaccgtgccactggtatttgccggtgcagttagcgaaagattcgggacttcagggatgctggcggtatatcgtcattgccctgcgtttactgataattttcatgtaatacctcaaagcagaccgtgttctgcgaacgaatagatttgcctgaaccagtcgctgcgtgagggttttgtcggcctggctaggtgtcgtctcgccggaaggatggttatgcgcgagtatcaccgccgccgcgttgaagtgcagagcgtgttgaccacctcccggggatgcaactcggtcggttaatcgtgccgtgaagagcgtttcatgggcaatcaactgattctgggttgtcagatacaacacccggaactcttccgctgctgcttctgcactcatttgggcatcgttaccgttcaggcagttaaacagacgccatgtctcatcgttgtcaggctcgggggacataaatgcgccgccattgctgattccacggtacggcttcgtcgtaggtatgcaggtatttgcgagatttccctttgccgctctgaccgtattcaatgaaggtttgttccagcaggccgaagtcgttagcctcggggccgaagtagctgatatgccgcccggcgtcgcgcgctttgcggatcgccatgtccatttccgggcgggtgtaacggtgaaaactgtcgccttccacctcagctgcatgcagatttaactgcgcgaatattttacgaaacgcgaggctggtggtggtggtccccgcgccgctggatctgcgcggcataatattgaccgtttcgtgcagctccgaccataccagcaccgcttctccgcactgtagctggcgtttgacgtcggcgactttctgttcaagtgtacgctcatgttcaccataatcggtgccttcacgtaacacaaagctttcaattaaattttccagcgtttcgggggagaggtcagtcaggaatgcgtgactccagccacatttgcggatgaagtaatgtaccgccaataaagccaacatgaccggcatggttaagtcaagttgatactccaacctgcgggggggaagacttttccggttttcgggaatcacccgggatggttccataaaccgggatcggcctttgggcgtggaataaaccaagcgtccggtttcagcagacggccccattaacgtgacaatgtcacctttatccaccgtaaagttaacgtttgtcagcaagcggctttctggtaaacgtagcgaaacatttttcacgcagagcattagcggagtccttgtctgaccataacctacccattttgcgactaacgcggtcagggcaaaaataataagcggtaatagcagttgccataaagcctgggcggcgagaataccgcttgtgccgccgctgcttaatgccaccgcctcagtggtgagcgtcggaaaacgccccgcgcccagccacagcgttggcatatactgcgcaataccgactgcaaatcccaccgcgaaggcaatcagcacagggcgcaacatgagtgggcatttcacgtaaaagaagattttggcccgcgaccagcccagtgtttgcgcaatcaaaattaaccgtgaatcaatgcgctgccaggcgggttgcaggataaacagcatccacggcatcacccacagcagatgcccccagaccaccgccgtccagcttccatccagtttcagccatagcgccagcgtgtactggcccgcaccagtggcagagcaggtaataaaatgggcaaacgccaccaccggacacaacgatttcgggtagccgtcattcgagtcctcagcgacgcaagatgcccgcgttaattcggcactttccgggtaatggtcatcatccctggccacaggattccgtacgcctgaacgtccggagcaccaagcacatttccagcctgataccgtaatcatcgcaaccgacgtaacacttcctccgcttttctgcacctcaaattttccgccccagattcgatcgccaaatagcgtccagccagttacccagcccatcgacagccgaacaacgaggtgtctgtgcaccgtgccggttaccagttcagtactgtccgccggaattgagtgaccaatataggtctcaatagcaggcaaattcaatgcatactcttcacacgccaggctgatagagtgaccgcttgcgcctgcgcgacctgtacgaccaatacggtgaacgtaatcttcacagtcatcgggtaaatcgtagttaaagacgtgcgtcactgccggaatatgcaaaccacgcgcggcaacgtcggtggcaaccagaatatccagatcgccacgggtaaattcatcaagaatacgcagacgttttttctgcgcgacatcgcccgcgaatggaaacagaaacgctttaaaaaaccgtggtatcagggtgacaccattccggttggtatcggtcagggttactggacagcgaccccaatccagatgagtaaggcactgatgatcctgattaatgacggtatcgtgaaggttcctcatttgctgatgagcaccgccgaagacggcaaacaggtgccatgggtacagccgcatgaaccgcccgtcggcgatattcattccggttactgggagctggcgaaagacggtatgtacggtgttgctaaccgccctaacggtacggcgcataaatactttgctagcgcaccgtacaaaattgcggcgaaatccggtaccgctcaggtcttcggtctgaaagcgaacgaaacctataatgcgcacaaaattgccgagcgtttacgtgaccacaaactgatgaccgcctttgcgccatacaacaatccgcaagtggctgtcgccatgattctggagaacggtgggagctcaggtcttccctttaacaaaaacacggaagctgaaaaccttctttcccggaaaaaactggacgtgaacaatagctggacctgctctgctggctccaaagcaaaagaagggcaatcacctgtggctgaccgcccacgacatccttcgctccgggtctttcccggtggcaggtggagacggccttttggaggggcctcgctgtccagctgcaaggatagtggcatttgcttctgggaggacccgacccgagacactcacgtaaaagaggatgcccacgtacagatgtggcagcaggccctccgagctgggattcagacccagcccaggaactggagccacagagctggtgctgccgctggaatgacaagccctacctctgtgccctgtaccagcagaggcgggcccacgtgggctgttgctacatacaggcccccacagcccgcctggatgttcggggacccccacatcaccaccttggatggtgtcagttacaccttcaatgggctgggggacttcctgctggtcggggcccaagacgggaactcctccttcctgcttcagggccgcaccgcccagactggctcagcccaggccaccaacttcatcgcctttgcggctcagtaccgctccagcagcctgggccccgtcacgggaccttcagccacatactga

SEQ ID NO: 143004 - DNA, 2343 bp, Homo sapiens
tcagcgatttgccgtcaaagcccagctgtatgatgtgggcggcttctgcagaaatccggcttcgttgttagcgtcggaatagacggtatcgaacgcctgaatacccgcagagcgcgcggcctgccaaatgggacagcgtgcggacagcagttcagttccttccggggagcgttctgtacgcaggttgcgcacatagtcttctgcaccgagggcgataccgatcaaacgctcggaagcgtgagcgatttccactgcgcgggtaatccccagcggagattcaatcgccgccagcaggccggtgctgccgggttcacgaccacaggctttttcgatacgcaggatctttttttcaatatccagaacatcctgagcggtatcggttttcggcagacgcacaacgtccgcaccaccgcgaacgacggcttccaggtcgttaacaccccattcggaatccagcgcgttgacacgcacaatggtttcaatatcgcgatacagcggatgttgcagcgcgtggtaaaccatgcggcgggcggtgtctttttcacgcaatgctacggagtcttcgaggtcaaacatcagggcatcagccgggtagatgaaggagttgctgaccatcgcggcattggcaccaggcacaaacaacatgctgcggcgggtgcgagttttacgttgttgcagcgaagcggaaatcattggcaatccgctggcgcgtgccagcagggcttccagtcgtgcacgtaaaatgcagtccagtgcgcctttgtcatcgacattcagctgtacgccgcgcacgttgtagcgggcgagaacgtccagaatggtggtgcgaattgcatcgccaaactgtttctcaacgctgctattgatttgcaggtcgatatcctgcgtatcgagtggggcgatgcgtatcatcacatccccagactcaagggtgcgagctgccgcgtcctggcgggagtgctcaagcaggttctgcaaataatgcagcgtgactgcagggaccagcggcgcgatagccgtgagatcgtttttcgccagcagttgacgtacccgggaagcggatatcggcatctcctggtaacgcagccgctcaatttcaaccagttcgatgggcggtgcggagatagtcggcgtttccagccagtagcgcatatcctggttgtactgggcggtaacgcgacaaaagggttcagtaccgacaaagcggtgagttacacccagcgcgggagcgaggtactgacggaaaatcttcagatcgatttcggtgtaacaatggttaatgacgctctgttctttaatgaagtagcaagggaacgtagcgcgggagatgatgtattcggagccacgatgcacagtcaggcgtggaatatcggcggtgccttttaacaccaaatccagccggtcttcataggggaagcgtgaagaatcttctttgactaaaaacagatgcaaccagtcgcactgtgccgcagcctgttgaatcagataacggtgaccattcgtaaagggattggcgttcatcacaatgcagccaatcttgttccctggatgacgaaattttttcagcgattcggcatagcgtttcagtcgcgtggcgctgttttccatcagcaccatcacgccgggtacgctggtcagcgtggaaaaaccgcactggcggaacagcgcctcgtattcggttttggtataaataaacagatgcgtgctgtgccgctcataggcgaggtttatcaattcagtggctaatgtcagcgccagtccttcaccgcggacggattcactgatagcaacgcatttaataatatttccggcaattccaccgcacgcgataagcttttcatcgcgggttacggtaataaatacttcgacttcattattttccaaagtggtttccacaggccttgatgttaaagaagatggttctgctattgctgatgcccacgctgtgtcactcacatcagtgccatgcttccgtgttgcttgagaggcgagcgatttgattttctccctatagagctgagcagcacgactgttgtacttggcattggtgtcattggtggaacacccatgttgatgaaaaaaggaagaatggagatggccctctgacttggatccagagctaggaatcttcaacttggcatcagcaatgtccacaaagttgtgcttggtgagtttgagacagtgaatgttgagaagagggcccagagctccctgtgccttgggatggctatgcacctgctccaatgccaactggtaatacaaagccctggaaaaagtcttttgtatgcggtaatacacaagggccaagcccccagtaccgaacacattgccgaaaaggaccat

SEQ ID NO: 143005 - DNA, 457 bp, Homo sapiens
atggatctgctgtacatggctgccgctgtgatgatgggtctggcggcaatcggtgctgcgatcggtatcggcatcctcgggggtaaattcctggaaggcgcagcgcgtcaacctgatctgattcctctgctgcgtactcagttctttatcgttatgggtctggtggatgctatcccgatgatcgctgccatcgcgtttgtcctgttcgttctgttctgcatgaagtacgtatggccgccattaatggcagccatcgaaaaacgtcaaaaagaaattgctgacggcctttcttccgcagaacgagcacataaggaccttgtacttgcaaaggccagcgcgaccgaccagctgaaaaaagcgaaagcgaacccaagtaatcatcgagcaggcgaacaaacgcgctcgcagattctggacgaaggaaagcttgagcagacaggaacctctggtgcaggtc

SEQ ID NO: 143006 - DNA, 1493 bp, Homo sapiens
ctgcgtcgcacccgggcagccagccagtcgatcattccggtcgatactaaactggccgccggtatcacacgattttttccgcaatttaacgatcgctttgaagcgattgcggtacgtgtgccaaccataaatgtgacggcaatcgatttaagcgtgacggtgaagaaacctgtaaaagccaatgaagtcaacggccgctgctgctgatgccgcgctgttaagcgcaggaacgtcaggtcattgacgatgctgccgctcacctgagtgaagtggcgcagggcgatgatgttgacgccatcgaacaagcgattaaaaacgtagacaaacaaacccaggatttcgccgctcgccgcatggaccagtcggttcgtcgtgcggatcgatccgatctgatcgaaacgttcgatcacgtatgcacagtgattttcatcagagatggtatcaccagtgcggaggttgaaacggcggatacggctaggggaaacgtagatgtcatcaggaccggcgaggtaggagctgtctgcggaacggaggaaaccaaatccatcctgcaatatctccagtacgccatcaccaaagatatcttcgccactctttgcgtgctgcttcaggatggcaaaaataatgtcctgcttacgcatacgagccaggttttccagccccatattttcgccgagagtgatcagctcagaaaccggcgtattttcggcgacagattcgattcgcctgtaagcatcagaatgatgttcggcatatagcgcaagtccttccagtttgggcaaagcatcagccagatgtaggctatgtggatctaccaggtccacaaccattttgccatcctgttcggcaaagaacaggaaatcgggacgaacaatcttgtactgttcagcttcaacataagcgattcccagtgacgactgccctgtgtactgtggattacgataccagaaagcaaatccttcacgtttggtttcgatctcaaaaaccttggtttcccaatggttcaacagagccggatagttcccgctttcgtcacacaacaaatggtgtttccagactggaaggtcagcttccttttcaccttcacgcaccctggtcatttcaaacttgttcgccggcctgaccagatccacatcctgcggttcggtactcatttcgacgatttgacgataggcctctttacgctcatctttcaacgacttgatttgcggtgtgtactcggggcagcacgctttcggcagtctatcgggcttcgcatcgaagtaatcctgcaccgtttcggtgggtgggcagccaaaatattccgacggcttttggccgaaacgggagacatcatccacgttccctttaacgatctccatgcagtgaaagcggtgatggatgatcacacctgttcggtggtggttgagccgatccacggcgaaggcggtgtgacggccaccaatccatactttttgcagggcttgcgcgaactgtgcgatcacatcacgcat

SEQ ID NO: 143007 - DNA, 1506 bp, Homo sapiens
atgaagttccacaggaatgccgggtgtgctccggtgccccagcggaattggaagggccaattccgcagtgcaatcgccaccgccaatcatttttgtggcgatatccagcgcaataccggtcacgataattactgccacacccgacaggatccccagcaaaccagtgtgggctatcacagtcaaatcaatggtattgcccagcgcgaaggcaaagaatggaatcagcgtttgcaccgctttgctgaaaaattctcgcaattcagggtcaaggttcctcagggcaaagcccaccaggaacgcgccagcgttgaaagtccggcaaagaatccaacttcaacaccatgttccggaataatacgcgaggcaattgccgcaaccacccacgcgacggcaattttagttaccaccagcgtaccggatttacgcagtaccgatgccgtctcaattaattggggcatccatttattactcaaccgtaaccgattttgccaggttacgcggctgcaggcatgcaagctttggcgctatgtggtggaagaagatccgggcgttaaatcggtgcgcaatatctacgactactataagcaacaccactatgaaaccattgtgatgggcgcgagcttccgtcgcaccgaacaaatcctcgccttaaccggctgcgatcgactgactatcgcaccgaatttactgaaggagctgcaggaaaaagtttcgccagtggtacgtaaattaatcccaccttctcagacgttcccacgcccagctcccatgagcgaagcggagttccgttgggagcacaatcagtatggcacgtcggtagagccactgtctcaacgcgtgggtgccgagctcaggtcgtatcaatgctccggggatagtgtcttacatatccacgagcaaggactaagagtcagtgattctgtaaacccaagagcgcactatgctataaacagcctcgcattgggcgatgtgaaaggcattaaagcatatggcaatgcaggttatatccgcatgtatagcggtcacgcaccagaacgtcaggtcattgacaatgttcccgctcccctaagtgaagtggcgcaggccgatgatgttaacgccatcgaccaagcgattagaaacgtagacaaacaaactcaggatttcgccgctcgccgcatggaccagtcggttcgtcgtgcgttgaaaggccattccgtggacgaggatctctgccctgatggcgctgttctggaagctaatagcggtgaaaccattctcgacgcagctctgcgtaacggtatcgagattgaacacgcctgtgaaaaatcctgtgcttgcaccacctgccactgcatcgttcgtgaaggttttgactcactgccggaaagctcagagcaggaagacgacatgctggacaaagcctggggactggagccggaaagccgtttaagctgccaggcgcgcgttaccgacgaagatttagtagtcgaaatcccgcgttacactatcaatccatgcgcgtga

SEQ ID NO: 143008 - DNA, 3267 bp, Homo sapiens
attaattggataacgggcaatcccttccaccgtttcgccaaccatcgccccgcccaccgcagaagtcacaaacaactgcacatccgccaccgtcataccgtaacgtgcggctttttcacggttaatctcaacgttgatatagcgcccaccttccagccgctcggcaagcgcagaagctacgcctggcaccgttcgcgctacttcttcaatttgctcagccatcgcgtcgatatccgccagcacagtgccggaaactttaatgccgatggggcttttaatgccggttgagagcataatcgaatcgggttacgaaattggcggcacccaacagatttcgcaagccccggcagccgcacggtgttatccagttcctcaatgattttgtccatcgtcatgcctggccgccactgctcctgcggcttaagctggatggtcgtttctaccatctccagcggagcagaatcggtggcggtttccgctttcccggttttgccaaatacccgcgccacttcaggtacgctcataattagcttgtcggttttttgcagcatactcgccgcctctgctgcggaaatccccggcagcgtcgatggcatatacaacaagtcgccttcattgatctgcggtaaaaattccccgccaactttattgagcggccagagaaccgtcagcaccgaaagcgccgccaccagcagcgtggttttcggccagtgcagtactttcagcaacagcggatgataaacacgaatcaaaaagcgattgagcgggttactgctttccggcggaattttgccacggatccagtagcccatcaggatcgggatcactacgatcgcaagcaggcccggcaccgcccatcgcatacgttttggtgaacgccaacgggccaaacagacgcccttcctgcccttccagggtgaagatcgggataaacgacaacgtgataatcagcagactgataaatagcgccggccccacttcaacagacgcatcggtgatcacctgccagcgcgttttattatccagcgtggcgtcaggatgctggtgctgccactcttccagccgtttatgcgcattctcgatcatgacgatagcagcatcgaccatcgccccgacggcaatcgcaatgccacccaacgacataatattggcattcaatccctggaagtggcatgacaataaaagcaattcctgcatgtcttgtgttaacagtgggatcaccttaacggcagtagtaactgtaagctgatgggggtgggcagaaatggaaaaggccgcgaaagcccttttcttgttacagctgcaacgatttttttgcgaggcggcttcaggattattgctgttccagcgcatcgcaattttgattttcgcctctttacgcaggttactcatcagagcttcaaagacgatttgtgcgttgttctgggtgataccctgcaccatcgcttttttctgatcttccggcattgaaccttgtttcacttcatccagcgccacagagaaccacattaccttgcatatcggtcgccataccgtagctcggtttgtctttcgctggcagtggcagtgcaaacgccgcctggctttgccggctttcaaatcaaccagcagtttctcagcatccactttcgcctgttgttcagctttgttgtgctgaaccaatgccttaacttgttcctgaacatctgccaacggtttcaccgcttccggtttgtgctcgctgatgcgcagcacgaatgcgcggtcgccgtctaccagaccgccgttaaagatagcgtcggcaaccggcttgaagttcaactcttccggcaggttatctttgctgaaccaacccgtctgagtggctttaacgccggcagcttgctctgcaccggccagagactcggtgtcgttgcttgccgcatcgctcactttctgctgcagcgcgtagtacgcatcgagggctttttcgtgtttcactttcgccgcaatgtcgtcacgtacttcgtctaacgatttcactttcgctggctgaatgtcgtccagacgtacaatcaggaaaccgaccgaagatttgatgacaccagacagttggccagccttcgcgtcttcctggtgccgcttttcggccctatcgttggcgcgattgtaggtgcatttgcctaccgcaaactgattggtcgccatttgccttgcgatatctttgatctgctcgctgttcccctgagggggtcccaagtccaagaatagtcgtggcatctcggggcccttcctctcgggcttgggggggtccccgtctccgctgagtgccgtgtctccgccggccctgctgtctggggccccgggctctccctcgggggccacctccggcctggctctcgggggcgctggctccagcctcctctgctgtgcctccggtggcggtggcagcggtggcggcggtggctgccgcctcgtgttgtctacccatccggcctttgcgtccacgccgcttccggggccgccgccgggggccgtccccgtgcccactggggctcggcccccactcccgaggtccagcctcccagcccctggggctctcggcgcccccccagtctcgggggctctcctctcggtcccgggttccagcgtcccgttcttgggggctgggccaagggggccaggggctgtctccccgccgttccgggaggagaccactgcgctgggtgcaggggctctctccagagaggtctctggggctggctccccgatcgtgggggctggaccccaactctcgggcgtcttctcccagggccctggggctctccaaggcccagtctctggtggcctctccgtgttcctggggaatctcaggcccccattctctgacaccttgtcctcgctctttgggggtgtcaggcccccattcaccagcaccttctccccggcctctggggacctcagctccccattctccagcgctttctcctccctccttgggggtgtcagctccccattctccagcactttctcttctctctcgggggaccccagggccccattctccgccgccttctcctcgatgcctggggctctctggtccccgttctccagcactgtcaccccgttcactgggaggctcaggcttggggcttgtttcccgttgcccaggactgtcgggtccctgttcaggcccgggactttctctctgttcccggggcctctccccgccttcctgggtcctgtctcccgggctgtcgcccccttctcccccaggaggttccttgtcacatcctcccgcagggacat

SEQ ID NO: 143009 - DNA, 1679 bp, Homo sapiens
tcaaactggcggcctggggcggcgttgttttcctacattttcccatcctgataatcgtaccacgccctggcgaatgtgttctaccagcggcgcatggcaatcactcaggtagctggacgccaggctcaggtttttaaagcccatcttcgcgatgacgtccatcaccatattgacggtcaggtcaccgccacggaaagcgtgatggaaggaaaccgtcatgccgtcctgtaaaccagagcgacgaatcgcttcttccaggttggcgcacagtttgcgatcgcgcgctttttcagcctggtaggtttgctttggcgagttctggaaagcggcaagatcgcattcagcgcgacgattccaggccgctacccgttcttgtcgttgagattgttcaattttctgcgtcattttgattgccttattcttcgcggatgccggaaagttctgcacgggagagcaccagacgggcgcgatcgataaccggaccgtccaccatcttgccgttcagggaaaccacgccgaggcccttcgcgagcggcggcttcagcggcttctacgacgcggcgggcgtgatccacttctttctgggtcggtgcgtagaggttgtgcagcagatcaatctgacgcgggttgatcagcgatttgccgtcaaagcccagctgtttgatgtgggcggcttcttgcagaaatccggcttcgttgttagcgtcggaatagacggtatcgaacgcctgaatacccgcagagcgcgcggcctgcaaaatggaacagcgtgcgaacagcagttcagttccttccggggagcgttctgtacgcaggttgcgcacatagtcttctgcaccgagggcgataccgatcaaacgctcggaagcgtgagcgatttccactgcgcgggtaatccccagcggagattcaatcgccgccagcaggccggtgctgccgggttcacgaccacaggctttttcgatacgcaggatctctttttcaatatccagaacatcctgagcggtatcggttttcggcagacgcacaacgtccgcaccaccgcgaacgacggcttccaggtcgttaacaccccattcggaatccagcgcgttgacacgcacaatggtttcaatatcgcgatacagcggatgttgcagcgcgtggtaaaccatgcggcgggcggtgtctttttcacgcaatgctacggagtcttcgaggtcaaacatcagggcatcagccgggtagatgaaggagttgctgaccatcgcggcattggcaccaggcacaaacaacatgccgatatagacatgaaagccagccagcgaaaaaccaacataaattgcagcgataatcacgacggctaagagacaatccagcagcgatgaccagccgaccataaatccgacgtgcgggttaatcgacttttgcgcgtaggtataggccgaaccggcctccggaaactggcgaaccagtttgccgtagctgatagcggtaaacagcacacccgccagcgccagcaaataggacgccggaacgtgaccgtcgctaatgccggagacaataccaaaagtatcaaatacggtcatcggcgtgagataggccagacccatcatcaccacctgccacaatttcagtgattttcgcagacgggttttgccgggttgcgcagcaatattcagtggtgaattaatagccat

SEQ ID NO: 143010 - DNA, 3256 bp, Homo sapiens
cccgctggcgcagtttatcttcctgaagctactgtggggggtagcgttgttcgtacggcgaataccggggcgcttctcggcgctaatgtagattgtgctgtcgctgaccgtttcatgccgttatatatggtggcgttacacctatacgctgaactgggacaatccggtcagcctggtgtgcgggctttttatgcttttcgctgaaacgtacgcgtggattgtgctggtgctcggctacttccagacgcctttcttggccagagccacacggaagtgtgcgttcgagccaggaagtgtaccatcttgttgcgcccatgttcgttgttggccctgtacaaatgccaatattatgtcgttgggtggcattgcgattgccgtcggggcgatggtcgatgctgctatcgtcatgatcgagaatgcgcataaacggctggaagagtggcagcaccagcatcctgacgccacgctggataataaaacgcgctggcaggtgatcaccgatgcgtctgttgaagtggggccggcgctatttatcagtctgctgattatcacgttgtcgtttatcccgatcttcaccctggaagggcaggaagggcgtctgtttggcccgttggcgttcaccaaaacgtatgcgatggcgggtgcggcgctgctggcgatcgtagtgatcccgatcctgatgggctactggatccgtggcaaaattccgccggaaagcagtaacccgctcaatcgctttttgattcgtgtttatcatccgctgttgctgaaagtactgcactggccgaaaaccacgctgctggtggcggcgctttcggtgctgacggttctctggccgctcaataaagttggcggggaatttttaccgcagatcaatgaaggcgacttgttgtatatgccatcgacgctgccggggatttccgcagcagaggcggcgagtatgctgcaaaaaaccgacaagctaattatgagcgtacctgaagtggcgcggaaaaatgctgactgcacaagtttcagtgagctggtggagaactttaagaagaccttgagccacactgacccaatggtctcggatgatttgggcactagcttacccttcatcgatatctacttttccactctggactaccaggacacaactgtccacaaggcttcaccaagttgggctggacacgtgcccgaggagaatgccggggcgatgacgacatgccgatgggccaggactgtcatggaaaacctgaatatggatctgctgtacatggctgccgctgtgatgatgggtctggcggcaatcggtgctgcgatcggtatcggcatcctcgggggtaaattcctggaaggcgcagcgcgtcaacctgatctgattcctctgctgcgtactcagttctttatcgttatgggtctggtggatgctatcccgatgatcgctggaaaccacgccgaggccttcgcgagcggcggcttcagcggcttctacgacgcggcgggcgtgatccacttctttctgggtcggtgcgtagaggttgtgcagcagatcaatctgacgcgggttgatcagcgatttgccgtcaaagcccagctgtttgatgtgggcggcttcttgcagaaatccggcttcgttgttagcgtcggaatagacgacgcggcgcgtctggcgggccttcacgtcctgcgcttacttaacgaaccgaccgctgcggctatcgcatacgggctggattccggtcaggaaggcgtgatcgccgtttatgacctcggtggcgggacgtttgatatttccattctgcgcttaagtcgcggcgtgtttgaagtgctggcaaccggcggtgattccgcgctcggcggcgatgatttcgaccatctgctggcggattacattcgcgagcaggcgggcattcctgatcgtagcgataaccgcgttcagcgtgaactgctggatgccgccattgcagccaaaatcgcgctgagcgatgcggactccgtgaccgttaacgttgcgggctggcagggcgaaatcagccgtgaacaattcaatgaactgatcgcgccactggtaaaacgaaccttactggcttgtcgtcgcgcgctgaaagacgcgggtgtagaagctgatgaagtgctggaagtggtgatggtgggcggttctactcgcgtgccgctggtgcgtgaacgggtaggcgaatttttcggtcgtccaccgctgacttccatcgacccggataaagtcgtcgctattggcgcggcgattcaagcggatattctggtgggtaacaagccagacagccaaatgctgttgcttgatgtgatcccactgtcgctgggcctcgaaacgatgggcggcctggtggagaaagtgattccccgtaataccactattacggtggcccgcgctcaggatttcaccacctttaaagatggtcagacggcgatgtctatccatgtaatgcagggtgagcgcgaactggtgcaggactgccgctcactggcgcgttttgcgctgcgtggtattccggcgctaccggctggcggtgcgcatattcgcgtgacgttccaggtcgatgccgacggtcttttgagcgtgacggcgatggagaaatccaccggcgttgaggcgtctattcaggtcaaaccgtcttacggtctgaccgatagcgaaatcgcttcgatgatcaaagactcaatgagctatgccgagcaggacgtaaaagcccgaatgctggcagaacaaaaagtaaaagcggcgcgtgtgctggaaagtctgcacggcgcgctggctgctgatgccgcgctgttaagcgccgcagaacgtcaggtcattgacgatgctgccgctcacctgagtgaagtggcgcagggcgatgatgttgacgccatcgaacaagcgattaaaaacgtagacaaacaaacccaggatttcgccgctcgccgcatggaccagtcggttcgtcgtgcgctgaaaggccattccgtggacgaggatctctgccctgatggcgctgttctggaagctaatagcggtgaaaccattctcgacgcagctctgcgtaacggtatcgagattgaacacgcctgtgaaaaatcctgtgcttgcaccacctgccactgcatcgttcgtgaaggttttgactcactggcggaaagctcagagcaggaagacgacatgctggacaaagcctggggactggagccggaaagccgtttaagctgccaggcgcgcgttaacgacgaagatttagtagtcgaaatcccgggttaa

SEQ ID NO: 143011 - DNA, 310 bp, Homo sapiens
tcacacgaccaatggtggaaaggcaatctgagcatcggttgaaccgtcgtactgtttcggcggatcgaggcgatatcgcagttcccgcacggctcctgacgcccttcgccaaaatagttcgcaataccagacgacggcaagtttgcgcttcggcaaacgcgccccatcgattgacgttggtggcgtgtcagcgtaaagaagaggaaacagcattgagctgtcggcttgtttgcgaagctgacagaaacagaaccggtgattattttcgaaggtatcgaagcgccgcaacgctgggtttaaaagccagtcg

SEQ ID NO: 143012 - DNA, 1404 bp, Homo sapiens
tcatgctagatcgaccatacgatagcaagcatttccgcccaagcccccgccaacggccaagggagccgaaacagccccttgacgtgatccatataataatgcgtagaaaaaattgttgaaacaatccggccgacaagcgatcgggtagatcgtgagcccggcgtcgatcagggtgattgcgtcgttaaacttcactacgccgcgcacggttggcggcgatactgcggcgagcgccgcgttctggcgcaggcccacactcgcagccccatgccggaacgccctgtgcgccgccggtgccggtagcgtgagggtcaggctcatgttacagcgccttggtgaagcggaagtggtctgctcgtagccttcgcgcagatagaaacggtgcgcgtcgtggcgcttacgttggtcgaaagttcggtcatttcggccccggcctggcgggcttcttttctgcccacgccagtaacttatgccgacgttcagaccgcgcgcctgcgcattaccaccaactcctgaatttcgccgatccagttgacatgatgcagtgaaaaagaggcatggtgtttctccttctgatggatcagcgtcagcagcgtgtcgacgactggcgcaggctgccgtcattgttgagcgtatggcaatcctgtggagatagcgggcggcgcgcgccaggcgggcgttaatttcactggcgttttcaggccacggttttccaggcgctggcggaggatctccggcgaaacctgcaaattgtggtggcgacggtggcgttcgcatgggcatcaataaaccaaacgttcgcttcgtggtccactttgatatccgcgcaatatcgaatcctattatcaggaaaccggacgcgccgggcgtgtggcctgcccgcggaagcgatgctgttttacgatccggctgatatggcgggctgcgccgttgtctggaagagaagccgcaggggcagttgcaggatatgagcgccacaaactcaatgcgatgggcgcgtttgccgaagcgcaaacttccgtcgtctggtattgctgaactattttggcgaagggcgtcaggagccggcgggaactgcgatatctgcctcgatccgccgaaacagtacgacggttcaccgatgctcagattgccctttccaccattggtcgtgtgaatcagcggttgggatgggttatgtggtggaagtgattcgtgttgcggcgtttctcgagccagattattcgcatcgcccgtgaatttgccgataacgggtgaaatccctgaaagagggttccatccgttttgcggcagaacaacagaaaacggtaaaaaccacccgcgcaacctgttcatctggcgttctaactgctcggttcttccggtaaaggtcatgagtttatgctcaagtaccccatgccccat

SEQ ID NO: 143013 - DNA, 2123 bp, Homo sapiens
atgccaaataactggtcaccggaattgcgggggctgggaagactgcgttttatcaccaacgcttttacccgtatgcgtttttgcttcccgaacggtcaactggatatgtacagcaaagaatcgccggaagaggcccctgccccactgaaaccgtggtttgcgattcctggccctgtcgctgaagaatacagcatcgcctttggtcactgggcatcgctggagggcaaaggccggataagacgcgaccggcgtcgcatccggcgctaccgtaaattctatacaaaattaccgccgctccagaatctcaaagcaatagctgtgagagttctgcgcatcagcatcgtggaattcgctgaataccgattcccagtcatccggctcgtaatccgggaaatgggtgtcgccttccacttctgcgtcgatatgcgtcagatacagtttttgcgcttttggcaagaactgttcataaacgcgaccgccgccaatcaccatgatttctgtccagccagtttgcggataacccaatacggtgaaagagagcgccgacggagtaccggccgcattcccggcttcatgctctggggcgcacgcgtggcgtatgactttggcccgcagatggcagatctgaacctggcattcggtgtgaaaaacatcttcgaccaggactacttcatccgctcttatgacgacaacaacaaaggcatctatgcaggccagccgcgcacgctgtatatgcagggctggaatgtgattatgttggcatttatccgttttctttttgcaggcctgctgctggtgatcagccacgcctttgccgccacggttcaggacgaacacggcacgtttacactcgaaaaaacgccacaacggattgtggtgctggaactctcgttcgccgatgcgctggccgccgtggacgtcatcccgatcggtattgccgacgataacgatgcaaaacgcatcctgcccgaatcgacgggcggtgtggttgagaaaacgctttcaacgtatttgatgaaagatgggaagttgtgcgacagtacgcagatgaatgaaacaggtggttactgccgctgggttgcacagatgataacttttaccgcgtcgggatgtgacaaggcggaagtctcggtcacgccaaatcgacaccctataacggacaaacagttacacgatatggtcgtgcgtgttgataccagcagtatgcagccaatcgattctacttgccggttccacgccagccaaccgcaaaggaacatggccgccgcgcaccagactaacatcagcggtaacgagattaactccagttgcagagcgataagacctaaaatcgaacccaacaccgtaccgccaatacgctcaaaggcgcgagggacaacgttaccccagaacgagattggccccataatcaccaccatggtgaccagcggccagaatgcccggtatgcggcagaaaaatcgttcggcggcaactatgatcgcaaactgttcgccaaattacgcaaactgcgtaaatcgatagccgatgaaagtaatgtcccgccgtacgtggtgtttaacgacgcaaccttgattgagatggctgaacagatgccgatcaccgccagcggaaatgctcagcgttaacggcgttggatgcgaagctggaacgctttggcaaaccgtttatggcgctgattcgtgcgcatgtgatggcgatgacgaagagtagtgggacaaaaacaacttttattattgtgggggagctgttgggatgggtagttccacaccaaccaaagccgcaaagcaaatgcaggctttatttccaggacagattccacaacagaatcaaagatatcacactaaccaccactcctactctctgtggcatcgcagaatacagcgagtgttgtatatcatcgagttttgaagccgcgccgcaaagaccgaccttctgcctagcgcctcagtacattaccgcctttcatcggcgtacgcttatccacatgatatccactttcctgaccatcaccccttcatcgtttccgggggcgttgtgttgccgctgtactgccgcgctgacggctgatacgcgagcccggtaccgccatatccagcgcctcgtgcgggcgttcaaggtttag

SEQ ID NO: 143014 - DNA, 3569 bp, Homo sapiens
atgaccaaaaaactccatattaaaacctggggctgtcagatgaacgagtacgattcatcgaagatggccgatctgctggatgccacccacggctatcaactgaccgacgtggcggaagaagcggatgtgctgctgctgaacacctgctcaatccgcgagaaggctcaggaaaaagtcttccatcagttgggtcgctggaaactgttaaaagagaagaatccagacctgattatcggcgtcggtggctgcgtggcatcgcaagaaggcgagcacattcgccagcgcgcccactatgtcgatattatttttgggccgcaaacgctgcaccgtctgccggagatgatcaactccgtgcgtggcgaccgcagcccggttgtagatatcagcttcccggaaatcgagaagtttgaccgtctaccggaaccgcgcgccgaagggccgaccgcgtttgtctccatcatggaaggctgcaataaatattgcacctactgcgtggtgccttacacccgtggtgaaaagttgaaccagtttattacttttaccggtcggattcagcgcactgttatgatgtttcccatagtcaacaatgccgccgcccgtaacaactgggcaacgttcggtgttacagtacccactttcgggttgggcatcaggccgcgcggacccagaaacctggcccagctggccaacaacgcgcattgcatccggagaagcaataacaacgtcaaagttcatttcgcctttcttgatctgccctttagcagcttcagcgtttgcaccttgggtaaatacggctacgcgaacggaacggccagtaccgtgcggcagtacagttgcaccacgtacgttctggtcagatttacgagcgtcgatgccgaggttaacagctacgtccacgctttctacgaatttagcagtcgccagctctttcagcagtgcgatagcttcgttgatgtcgtactgtttggttgcatcaactttctcgcggataacacgcatgcgcttggtcagtttagccatttcttagtcctccactaccaggcccatggaacgtgcagtaccttcgatggagcgagtcatcgcttcaatgtcggcaccagtcatgtcggcagctttggtctgcgcgatttcctgcagctgagcgcgggaaattttacccactttgtctttgttcggcttaccggaaccagacttgataccagccgcttttttcagcagaactgctgccggcggggtcttggtaacgaaagtgaaagaacggtcagcgtaaacggtgattactaccggaatcggcagacctttttcgatggaatcagtttttgcgttgaacgctttgcagaattccatgatgtttacgccctgctgacccagagccggacctactggcggactcggttgcacgtccttctcagacgaaccgatactggatggatggccgccgcagtcgtcacaactgatgatacggatgtgcttctccgtatacaccatgttatcggagagctgccaaggtatggttatcgtcgggtatgggcgctgcttcgcagacaggcagaacttgatggtatgcctgcgatcaatgccaaacgtgtttaccggatcatgcgccagaatgcgctgttgcttgagcgaaaacctgctgtaccgccatcgaaacgggcacatacaggcagagtggccgtgaaagaaagcaatcagcgatggtgctctgacgggttcgagttctgctgtgataacggagagagactgcgtgtcacgttcgcgctggactgctgtgatcgtgaggcactgcactgggcggtcactaccggcggcttcaacagtgaaacagtacaggacgtcatgctgggagcggtggaacgccgcttcggcaacgatcttccgtcgtctccagtggagtggctgacggataatggttcatgctaccgggctaatgaaacacgccagttcgcccggatgttgggacttgaaccgaagaacacggcggtgcggagtccggagagtaacggaatagcagagagcttcgtgaaaacgataaagcgtgactacatcagtatcatgcccaaaccagacgggttaacggcagcaaagaaccttgcagaggcgttagagcattgtaacgaatggcgggaccgacacgaaagctatgacatgattacaattcttgctcgaagggagcttcctgaggacaaagatgctatggggacaaggatccccgatattcgttacagcctgtcggatcgtattcgttattactggccgcatagtcggattaaaaatagcgtcgaaacgatgatggtgaatcttgaaggcgtggacatcccactgggcatgattagtcagtatcttcccaaacaatttgaacgcattcagtccggggaattatcagcaataccgcatcagctgattatggataaaatttatgatgttttgcgcgcctatcgctacggctatcaggtggatcaactgcaagccaacggcgtggcggcggcgtgccttaactcgacgcaaacccgcgaacagcaacttgaagtgatgacaggctgccgcaccgggcaaattcgtctgctttatatcgccccggaacgcctgatgctggataactttcttgagcatctggcgcactggaatccggtgttattagccgttgatgaagcgcactgtatctcccaatggggccacgatttccgcccggaatatgccgcgctcggtcagttgcgccagcggttcccgacgctgccgtttatggcgctgaccgccacagccgacgacaccacgcgccaggatatcgtggggatcccaaagaggcgtttattcatgccgattacacgctggtagtggataccgcattaaccgggcggcgactgggcgcgcagcatatgttggtagtcagtgcgatgggtgccaataaagctatccagctgcacccgctggtttgtgcggcatataacgccgacttcgatggtgaccagatggctgttcacgtaccgctgacgctggaagcccagctggaagcgcgtgcgctgatgatgtctaccaacaacatcctgtccccggcgaacggcgaaccaatcatcgttccgtctcaggacgttgtactgggtctgtactacatgacccgtgactgtgttaacgccaaaggcgaaggcatggtgctgactggcccgaaagaagcagaacgtctgtatcgctctggtctggcttctctgcatgcgcgcgttaaagtgcgtatcaccgagtatgaaaaagatgctaacggtgaattagtagcgaaaaccagcctgaaagacacgactgttggccgtgccattctgtggatgattgtaccgaaaggtctgccttactccatcgtcaaccaggcgctgggtaaaaaagcaatctccaaaatgctgaacacctgctaccgcattctcgatttcatgtacaccgggcgttttcgccctatgcagcggcgttttctggtgcattctgttggtatcgatgacatggtcatcccggagaagaaacacgaaatcatctccgaggcagaagcagaagttgctgaaattcaggagcagttccagtctggtctg

SEQ ID NO: 143015 - DNA, 2508 bp, Homo sapiens
atgaaaatccataccacagaggcgctcatgaaggctgaaatcagccgtagaagtctgatgaaaacctccgcacttggcagtcttgcgctggcaagcagtgctttcactctgccattttcccaaatggtccgggcggcagaggctccggtagaagagaaagcggtctggagttcctgcaccgttaactgcgggagccgctgtctgttacgtttgcatgtgaaagatgacaccgtgtactgggtggagtctgatacgacaggtgacgacgtctacggtaatcatcaggttcgagcgtgtttacgcgggcgctctatccgccgacggatgaatcatcctgataggttgaaatatcccatgaagcgcgtcggcaagcgcggtgaaggtaaatttgaacggataagttgggacgaagccctggataccatcagtgataatcttcggcggatcctgaaagattacggcaatgaggctgtacatgtcctgtacggaacaggcgtagatggcggaaacatcaccaactcaaacgtcccgtaccgtctgatgaactcttgcggtggttttctcagtcgctatggcagctacactacgcttatcaagtcagcttcagatattggtataattcgtctgctttatatcgccccggaacgcctgatgctggataactttcttgagcatctggcgcactggaatccggtgttattagccgttgatgaagcgcactgtatctcccaatggggccacgatttccgcccggaatatgccgcgctcggtcagttgcgccagcggttcccgacgctgccgtttatggcgctgaccgccacagccgacgacaccacgcgccaggatatcgtgcgcctgctggggctgaacgatccgctgattcaaatcagcagttttgaccgtccgaatattcgctacatgctgatggagaagttcaaaccgctcgatcagttgatgcgctacgtgcaggaacagcgcggtaagtcaggcattatctactgcaacagccgcgcgaaagtagaagacaccgctgcgcgcctgcaaagcaagggaattagcgcggcggcctatcatgccgggctggaaaataatgttcgcgccgatgtgcaggaaaaattccagcgcgatgacctgcaaattgtggtggcgacggtggcgttcggcatgggcatcaataaaccaaacgttcgcttcgtggtccactttgatattccgcgcaatatcgaatcctattatcaggaaaccggacgcgccgggcgtgatggcctgcccgcggaagcgatgctgttttacgatccggctgatatggcgtggctgcgccgttgtctggaagagaagccgcaggggcagttgcaggatatcgagcgccacaaactcaatgcgatgggcgcgtttgccgaagcgcaaacttgccgtcgtctggtattgctgaactattttggcgaagggcgtcaggagccgtgcgggaactgcgatatctgcctcgatccgccgaaacagtacgacggttcaaccgatgctcagattgccctttccaccattggtcgtgtgaatcagcggtttgggatgggttatgtggtggaagtgattcgtggtgctaataaccagcgtatccgcgactatggtcatgacaaactgaaagtctatggcatgggccgtgataaaagccatgaacattgggtgagcgtgatccgccagctgattcacctcggcctggtgacgcaaaatattgcccagcattttgccctacaactgacagaggccgcgcgaccggtgatgcgcggcgaatcctctttgcaacttcccgtgccgcgtatcgtggcgctcaaaccgaaaacaatgcagaaatcgttgggcggcaactatgatcgcaaactgttcgccaaattacgcaaactgcgtaaatcgatagccgatgaaagtaatgtcccgccgtacgtggtgtttaacgacgcaaccttgattgagatggctgaacagatgccgatcaccgccagcgaaatgctcagcgttaacggcgttgggatgcgcaagctggaacgctttggcaaaccgtttatggcgctgattcgtgcgcatgttgatggcgatgacgaagagtaccgtggcacggcgatcgacctgacgcttcgtgatgagcacgggaacatcctcgatatgggcgcagggttcgatgaaatgcacgagcgctcccatgcctatcacccttccgtcccgcccgccgctcagcgcaatcggctgttgctgaatgcgataatgactggtggcggttttgtcggtatctccagcgaatggtggcacttcgaattaccccaggcagcgagttaccctctgctcgctgatcaattctcttgttttatatcccctggcacacagcacgccgccgatccacaaaccctcgacccggcggtaacaatagataataacgactggacagtgacctacccgtcttatcagcggctggttcagtacaaaacggaccgtgataaaagctcaaccggacgttga

SEQ ID NO: 143016 - DNA, 517 bp, Homo sapiens
gagatcgtctcgttaatcggccctaacggtgccggaaaaaccacggtttttaactgtctgaccggattctacaaacccaccggcggcaccattttactgcgcgatcagcacctggaaggtttaccggggcagcaaattgcccgcatgggcgtggtgcgcaccttccagcaaagcgaagcgctcgaccgcgccgcgacctggcttgagcgcattggtttgctggaacacgccaaccgtcaggcgagtaacctggcctatggtgaccagcgccgtcttgagattgcccgctgcatggtgacgcagccggagattttaatgctcgacgaacctgcggcaggtcttaacccgaaagagacgaaagagctggatgagctgattgccgaactgcgcaatcatcacaacaccactatcttgttgattgaacacgatatgaagctggtgatgggaatttcggaccgaatttacgtggtcaatcagggacgccgctggcaaacgtacgccgagaaattcgaggcag

SEQ ID NO: 143017 - DNA, 1532 bp, Homo sapiens
ccgcacgcttaatcgaacctaagctttcgagcacgactttctcttcatctatagcacccgccagcgcggcgaacttaatcatcgcatactcaccgctcacctgatacgcgccaatcggcaattcagtacgttcacgcagctcacgcacgatgtcgaggtacgctccagcaggtttaaccatcaggcagtctgcgccctgggcttcatccagcagtgattcacgaatcgcctcacgacggttcattgggttcatctgatagcttttgcggtcgccttttaatgcgcttccggcagcttcacggaacgggccataaaaggaggaggcgaacttggtcgaatacgacataatcgccgtatctttaaatcccgcagcgtccagcgcctgacgaatcgcctgtacctggccgtccatcgcggcggaaggggcgatgaagtctgcacctgcagcagctgcaaccacggcttgcttgcctaaattttccagagtcgcgtcgttgtcgacgccatgctcgcacagcacaccgcagtgaccgtgagaagtgtattcacagaagcaggtgtctgacataacgatcatttctggcacggtctgcttgcagatgcgcgacatacgcgccaccagtccatcttcccgccaggcatcgctgccggtttcatcggtatggtgagagatgccaaaagtcatcacggaacgaataccggcgttggcgatgcgttcaatttcgcgtgccagatgtttctctggaatgcgcatcacgcctggcatgtattcgcaatgatacgaattctgtagctcggtaccgttgttaattacggttgccgccgggttagtggaaggcgtcaccgaagccaccacgccccacggtgcgttttcaattagggtcaggccgttgtcgccagtcagcacttgcggagagaggcactcaacgcctggtgtgccgcgcgcctgagcgacgttttttgcaaatttatcttcaacgcgccccatgccggtttcactgacggcaagttccgctaaatctctggcgtgtttttcgcctgcttcacgaatggcagcaatggctaactggcgcattgccacgctttttaacccttgctgggcgactttggctgccgcaacggcgtcatccagggacgcgaaaacgcccatctcatgaacggcggcggacggcgtgtcactgctttgcattttcagcagtaccgctttcaccacctgttcaatatcctgaccgccagacaccacctcatcgacaatgccaatcacgcacagatcgaccggtgacgtttcgcttttatgcgcctggcgggcggaactgccactcaccagtaacacccactccccggttcccgcgccaatattgtcgatggcgacggcgcattgcccgtcaggattaccttgtggatcaatcatttccaccatcagcaatttgtcatgcgccagtccgtgatggcgtacggtacaaacaatttgtccagtgacgactgccagtttcatacccgcctccgtggcgtatttcaggtaaaagctcccc

SEQ ID NO: 143018 - DNA, 1522 bp, Homo sapiens
atggctcgacaacgaccgactctggaaaatttaggcaagcaagccgtggttgcagctgctgcaggtgcagacttcatcgccccttccgccgcgatggacggccaggtacaggcgattcgtcaggcgctggacgctgcgggatttaaagatacggcgattatgtcgtattcgaccaagttcgcctcctccttttatggcccgttccgtgaagctgccggaagcgcattaaaaggcgaccgcaaaagctatcagatgaacccaatgaaccgtcgtgaggcgattcgtgaatcactgctggatgaagcccagggcgcagactgcctgatggttagacctgctggagcgtacctcgacatcgtgcgtgactggcgtggacgtactggattgcccgtggcgcatatcaggagagcaggcatgagtcagccattattatctgttaacggcctgatgatgcgcttcggcggcctgctggcggtgaacaacgtcaatcttgaactgtacccgcaggagatcgtctcgttaatcggccctaacggtgccggaaaaaccacggtttttaactgtctgaccggattctacaaacccaccggcggcaccattttactgcgcgatcagcacctggaaggtttaccggggcagcaaattgcccgcatgggcgtggtgcgcaccttccagcatgtgcgtctgttccgtgaaatgacggtaattgaaaacctgctggtggcgcagcatcagcaactgaaaaccgggctgttctctggcctgttgaaaacgccatccttccgtcgcgcccagagcgaagcgctcgaccgcgccgcgacctggcttgagcgcattggtttgctggaacacgccaaccgtcaggcgagtaacctggcctatggtgaccagcgccgtcttgagattgcccgctgcatggtgacgcagccggagattttaatgctcgacgaacctgcggcaggtcttaacccgaaagagacgaaagaactggatgagctgattgccgaactgcgcaatcatcacaacaccactatcttgttgattgaacacgatatgaagcttgtgatgggaatttcggaccgaatttacgtggtcaatcaggggacgccgctgggcaacggtacctcttatactgcctgcagggcaaacagcgatgcgtcgttttccgccgcctgcgccatcaacgaggcacaaatctcagcgttcttttcccacacagatgtaacagcaaactgtcctgcggcaaccagcattgccacctcctgtcagagtcgtaaaattcgccaacgacgattattcggcgttacacttatcactcatacaaatcaaatagcaggattttgcagtgttacaacttcttttagcagtttttattggcggtggtacgggaagcgtggcgagatggctgttaagtatgcgatttaacccactgcatcaggcgattccgttggggacgctgacagcaaacctgattggggcattcatcataggaataggattcgcatggttcagcaggatgacg

SEQ ID NO: 143019 - DNA, 1199 bp, Homo sapiens
atgaagttgaattttaagggattttttaaggctgccggtttattcccactggcgctgatgctttcaggctgtatctcgtatgctctggtttcccataccgcaaagggtagttcaggaaagtatcaatcgcagtcagacaccatcactgggctatcgcatgcaaaagatagtaatggaacaaaaggctatgtttttgtaggggaatcgctggattaccttatcactgatggtgccgatgacatcgttaagatgctcaatgatccagcacttaaccggcacaatattgaggttggcgatgacgcaagatttgttttaaatgcggggaaaaataaatttaccggcacaatatcgctttactactactggaataaccaggggagagaaaggaaatctcagaaagacataagtgaaactcttggaaataatggagtcggtttccaaacccagccaaataatgaagtgtcggctaagcatgagctggaggaacaggtgaagaaactgagccatgacacctattcattgcagttgatggcagctttgctagagaatgaatgccaaatcttacagcagagagtagagattctcaaggaactccatcatcagaaacagggaactctgcaagagaagccaattcagataaactataaacaggacaagaaaaatcagaagccatcagaagcaaagaaagtagaaatgtataagcagaacaagcaagcaatgaagggtacattttggaaaaaagacagatcctgtagaagcctggatgtttgtcttaataagaaagcttgcaatacccagttcaatattcatgttgcaagaaaagctcttaggggaaaaatgaggtcagctagcagcctaagatagaaaataccaaaagcagatgaaaaggtgaatccttaaaaaactacatctgttacctccaacttgtcagtcatgatcaatcatcaaaccttgggcagatctgctggttcaaccaagaaagagctatagaataaggagattgacacttatattactcattacttcagcagttatgtaagtctggtctttaatgaccattgtgtctacatcaagttcataacttttcacctttacaatctgcttgttttttttgtaattattagatagacagcctagagtgagaagttaaaggtccaattaagtaaagatctaaataaaaaccagaatacaagggaaaa

SEQ ID NO: 143020 - DNA, 2415 bp, Homo sapiens
atggaaaggccgggtgggccctttaaggagccaatgggaaatgccggtttcccccggggtggctgccaggtcaacggctctgcgagcatagattcagagctgggtaccgagcgtgtttctgatacagctcatgggcttggcgcgcgtgacgatgcgatgggaatgcagtatctgattcctggctggacgttcgataacaagatcgatgctgataataccgcagttcttccagctataaacgttggcgcagattgtatcacgaccgatcccagcgatgccaaactggaactggatgccgacaaactcaccgctgcactgaaaaaagatgccagcggcgtaggtgcattgattgttggcgatggtaaaaaaaccggcatcacgaccaccatcggcagcaacctgaccagttggctttcgacaacgggcattattaaagccgctaccgatggcgttagtaagaccctgaataaattaactaaagactacaacgccgccagcgatcgcattgatgcgcaggtcgctcgctacaaagaacaatttacccaactggacgttttaatgacctcgttaaacagcaccagcagctacttaacgcagcagttcgaaaacaacagtaattccaaacaggtcatgtacgcggcaaaaggcacccaggcctatgcacaaattggcgtcgaaagcgccgtaatgagcgccagccagcagcagctggtcaccatgctatttgatggagtgctgagcgcactggttagagcgagcctgtttatgcaggacaacaatcagcaaggcaaaggcgtctctttgtcaaaagcgatcaacatcattgagaacggactgcggggcgacgaggtggaagcggacaaaacgttacacattgcgcaaaacggaacggtggtcgccgagggtgattatggattccgcctcacgaccgcaccaggtaatggtttgtacgttaactatgggctgaaagcgctgaacatccatggtgggcaaaagctgacgttagccgaacatggcggagcctatggcgcaacggccgatatgtcggcaaaaatcggtggtgaaggggatctggcaatcaatacggtgcgacaggtttcgctttccaacggtcagaacgactatcagggggcaacctacgttcagatggggacattacgtaccgatgcggatggtgcacttggcaacacccgggaactgaacatcagcaacgcggccatcgtcgatcttaatggatcgacgcagacggtagagacattcaccgggcagatgggttcgactgttttgttcaaagagggggcgctgacggtaaataaagtcggaccggaaacgctaaagcgtgacccacccgtcagagcaatgacaatccccgcaacagctgcggtatataaaccgtactggggtgccacaccactaccaatagccaacgccatcgccagcgggatagcaataatcccgacggttatcccggcaatcaggtcacggcggaatggtatcgcagacaacgacttcatcaattacagagttacgcaggttgttcgccgcgttgccagagaagatcgggtgagtcgcgtacgcaaatacacgtttagcaccacgttactttcagagcttcagcagctttacacagcgtaccgccagtgtcgatcatatcatcgaccagtacgcagtcacgacctgcaactaaacctgctgatcattaaagataatcagattgtgtatcgcaaagcctggggagcggcgaaaaagtacgatggcagcgtgttgatggaacagcctgtcaaagccaccaccgggacgctgtatgacctggcctcaaacaccaaaatgtacgccacgaacttcgccctgcaaaagctgatgagcgaaggcaaactgcatcctgacgatcggattgcgaaatatattccggggtttgccgatatggttgtcacctgcgggccattcatgagctttggcgaacgtcgcctgctgggtctgttccagaaccgttacggacctaaccgtgttggctataccatctgccgacaagaaggccccggcacccggattccggcccctttcccaaacaagtttggcgccaggcccttggaaattgggccgaaccattggcagtttgaaaatacggaagattatgttcgccaggccgttgaagaaccacaccagcggggtgcaaaccaggtacgctacgccaccgcacgctcagtcttcaaatgggatggcaccgataccgtcaaagtcggcagcgatgaaaccccggttcgcgtgctggacgaagaagtctccaccgaccaggcgcgctggcataaccgctattggatcgacagcgaagggcaaattcgccagtcggaacagtatctcggcgcggattattttccggtgaaaaccactctcatcaaggcggcaaaacaatga

SEQ ID NO: 143021 - DNA, 3378 bp, Homo sapiens
ctatcctctgcttttgcatcgagatacagccgacgggcaggctaccgcgcagaggttacaggctacgcaacgctcttcgccgtccgggtcgcgggtcagaacgatacgaccacgataacggggcggcagatagaccggctcttccgggtacattcgcgtttcgcgtttggcgaacgcgtgcaggccgatcatccagatactacgaacctgggtgccgaaacctactaacaattcttttaaggtcatggtcttattgccccttattgcgcctgccagagaatgacagccgccgttaccagcaagttgatcagcgtcagcggcaggcagattttccagccgaaggacattacgaatcaaaatgaacatcatcataaagaacgcggttttcagcgcgaaccagatgaatggcggtaacaacgggccttgccagccaccgaagaacagcgtcaccatcaatgcagagatggtcacaatcccgatgtactcacccacgaagaacagaccgaacttcataccggaatattcaatgtggtaaccatccgccagttcctgctcggcttccggctggtcaaacgggtgacggtgacataccgccacgcccgcgatggcaaaggtaataaaaccaaagaattgcgggataacgttccacacatgcgcctggctgttgacgatgtcggtcatgttgaatgaaccggcctgcgccaccacgcccatcaaggaaagcccgaggaacacttcgtagctcagggtctgcgcagaagcacgcatcgcacccagcaacgagtatttgttgttacttgaccagcccgcaaacagcaccgcgtaaaccgccagacctgccatcatcaggaagaacggcggaacgtgtgcgagagtgccaaccagttgctgtcccaagggtggcgctatggctgttaatcgccacagcgcgcggctggcggcccagccttccagtcgttcaccaatcaaaaacagcagcaacaccatcgcagcttcagccgttgcgccaataaacagtgcaccaatagcggctacgctcattaaggtttcaatggcgaagtagctgccggatttgatcaaccgtaatgcctgacgagcaatcgggtacagcccaaccagcgtggtcgcgataaacgccagttgcccgaacggatgattgaactgctccagaccccagctgattgccatcatcacgattagcgtaatcagcggcagattctctttcaggcgtgaatgccttgcggttcttcggcggcgaatgtcattgtccggcatcgaccaccattcgcggacttttcccaatgcgaaagcttttgcctgctcgccagtatccagcccgttatcattcatactggtttcgccgaaatctttcacaatttcagcaaagtgtttttccccatcatgattttcgggagccatgcctaaatccggcagaccatcattgttattatcaaagggatttgccgctttttgctcgaaggtagattgtgcgttagctgtaccgcctgggtttcgactcttgcgggtacgagcgacaaaatcatcacgctgggtatcggaaagcagcgccgccaccacaccaacggtacgcgaggcattctgcacatacaccgtcgggccgctgtagttctgctcgattttcaccgccgtgtgcgcttttgaggtcgtcgcgccgccaatcagtaacggaatagtgaagccctgacgctccatctctttcgccacgttaaccatctcgtccagcgacggcgtgataagccccgaaaggccaatcagatcagcattcacttctttagcggtacggagaattttttccgcaggcaccataacgccgagatcgacaatttcgtagttgttacattgcagcaccacaccaacgatatttttaccgatgtcgtggacgtcgcccttcacggtggcgatcaccatcttgccgttggttttgccctgctctttgctggcttcaataaacggttcgaggtaggccaccgcctgtttcatgacgcgcgccgatttgaccacctgtggcaggaacattttcccttcgccaaacaggtcgccgaccacattcatgccgtccatcaacgggccttcaatcacttcaatcgggcgcgtagcctgctggcgggcttcttcggtatcctgctcgataaactcggtaatgcatttcagccggcgaattaaggcatcgatgtgtccttcatggccgatctcccacgggttacggtcatcggtacagagcatgcattgcgggctgttaaattcgttgatcaacggtgccagcgcgttgagattgcgggcagcggacccttcgcggatcatcaacgacatgccgagttgtaatttccggcgtccttcttccagctgataactttcgtggcagttttcaatacccgcagtaatataggcgttaagttctttaccacccaaacccgggcagtgaccgtccagcgtcaggtggcgaaatgcatccagtttatcgagcagcgcattctgcccgctaattacgccagggtagtccatcatttctgcaaggccggtaacctgcggatggtcccgccaggcgagcatctgttcaagggtaaaactggcaccgttaacatcgcagccttccagggcgggtacgcaagagctgacctgtaagtactggttttgccttgcctgttcggcacagcgggcaaaccaggcgaatgcagatctccattctggaacctgcgcagccccggataataatttggcacaaaggtaagcgcctctcgcacgaagatcgccgctcgactccagcatatgcgtggcgaacgagtgacgtaatttatgcggatgaacgtgattattcagcccttgttttatgccccattcggcaaagcgtttctgcacattacgcgcggagatacgcttgcccagtttcgacagaaaaagcgcgtcgtcttcgctaccaaacaggtcgcgcaaatcaagccagtgctcaatccacgccacagcgttgcgaccaatcggcaggcggcgctctttgctgcctttccccataacccacacttcaccagactccaggtcgaggtgtttaatatccagccccaccagctcagaaagacgcagacccgcgccgtacatcacttccagcattgcacggtcgcgtacagcgaggggatcattgatatcaatatccagcagccgattcatatcgtcgacgtcgatgtttttcggcagatgacgcggcgctttcggtgccgaaacacctttcgccgggttagctttgagttcgttctggctgaccagccagtcaaaaaggggaccgcctgagctttgtgaaccccaccgggtatgggaccgacgcggacgggacgcagactcgcgcgatcccgtaacactcgcaggcat

SEQ ID NO: 143022 - DNA, 1218 bp, Homo sapiens
atggcagcttatcaaagcagaccgaatgccaacgcggttgttcacaatcatgccgttcattgcacggcagtttccattcttaaccgatcgatccccgctattcactacatgattgcggcggctggcggtaattctattccttgcgcgccttatgcgacctttggaacacgcgaactttctgaacatgttgcgctggctctcaaaaatcgtaaggcaactttgttacaacatcatgggcttatcgcttgtgaggtgaatctggaaaaagcgttatggctggcgcatgaagttgaagtgctggcgcaactttacctgacgaccctggcgattacggacccggtgccagtgctgagcgatgaagagattgccgtagtgctggagaaattcaaaacctatgggttacgaattgaagaaatgattctgaacgaaacggcatggtttggtcggggtgctgttggggctttaaccgatgaggtgaaacgccgtggttatcagaaggcgctgatcgtcaccgataaaacgctggtgcaatgcggcgtggtggcgaaagtgaccgataagatggatgctgcagggctggcatgggcgatttacgacggcgtctggggcttttgctttagccaagtgaaaattttaggagtcctagctacccgggggctagacgtgggacaatctcttgagcccaggaatccgacgctgcagcgaactctcaatggccccctgcgctccagcatggggcaccaagaacctttcaccttcgactacgaacatttgcatagcgcaccggaaggcaaacatattcctactgctcgcccgcgttcactgattgacggcaaacggatggacaaagtgatctgggggccaaactgggaagaactgtgggcgaattaccccacgaacagtgacaggcttaatgattttgaaagtagcaatatacaaacaaaggaagggaaggaatggagtcagatttcgagtcttcagacaggaactgttatgaccagggaagattcaggactcactggtgcattcagtggattcaaagagataacagaagtacagcacctaggtggtgtctggcatggagcagcctctccttgtgatgagattacagacatgagccactgtgcctggactcagcaagctttgaaggcagccagaataggaaatccctggaccccaaggaaggaggacccagagtgtggccaccttatcctatga

SEQ ID NO: 143023 - DNA, 2773 bp, Homo sapiens
atgacccgcctgggactgaaccaggggacagcggggaacgtcagtgtacgttatcaggatgggatgctgattacgcctacaggcattccatatgaaaaactgacggagtcgcatattgtctttattgatggcaacggtaaacatgaggaaggaaagctcccctcaagcgaatggcgtttccatatggcagcctatcaaagcagaccggatgccaacgcggttgttcacaatcatgccgttcattgcacggcagtttccattcttaaccgatcgatccccgctattcactacatgattgcggcggctggcggtaattctattccttgcgcgccttatgcgacctttggaacacgcgaactttctgaacatgttgcgctggctctcaaaaatcgtaaggcaactttgttacaacatcatgggcttatcgcttgtgaggtgaatctggaaaaagcgttatggctggcgcatgaagttgaagtgctggcgcaactttacctgacgaccctggcgattacggacccggtgccagtgctgagcgatgaagagattgccgtagtgctggagaaattcaaaacctatgggttacgaattgaagaaatgattctgaacgaaacggcatggtttggtcggggtgctgttggggctttaaccgatgaggtgaaacgccgtggttatcagaaggcgctgatcgtcaccgataaaacgctggtgcaatgcggcgtggtggcgaaagtgaccgataagatggatgctgcagggctggcatgggcgatttacgacggcgtagtgcccaacccaacaattactgtcgtcaaagaagggctcggtgtattccagaatagcggcgcggattacctgatcgctattggtggtggttctccacaggatacttgtaaagcgattggcattatcagcaacaacccggagtttgccgatgtgcgtagcctggaagggctttccccgaccaataaacccagtgtaccgattctggcaattcctaccacagcaggtactgcggcagaagtgaccattaactacgtgatcactgacgaagagaaacggcgcaagtttgtttgcgttgatccgcatgatatcccgcaggtggcgtttattgacgctgacatgatggatggtatgcctccagcgctgaaagctgcgacgggtgtcgatgcgctcactcatgctattgaggggtatattacccgtggcgcgtgggcgctaaccgatgcactgcacattaaagcgattgaaatcattgctggggcgctgcgaggatcggttgctggtgataaggatgccggagaagaaatggcgctcgggcagtatgttgcgggttatacgtatgtccccagttttggtaccactttagatgaatatgttcgtcgtacccggactgtggtaagatactttgatgtatgtgttactatcgtagtacttatactatgcagctgcatgctgctagtgactctagaggatcccttagaggctaactggccatctgctctgggaagtcaacctgagcagatgtgcatgcacctggaagggctgtttgaggacatatggggaccttcttgctgtccgtttcgggagagccaggggctgactccagacaaggataaatttcaggcccaggataggcctctcctcaaggtccagcaccaccatgcctgccaatcctagagcactccagtgtgacagacaccaggctgggatccttagagtcatcaatcagctcggtaccaacgggcttgcagccaccgaagaacagcgtcaccatcaatgcagagatggtcacaatcccgatgtactcacccacgaagaacagaccgaacttcataccggaatattcaatgtggtaaccatccgccagttcctgctcggcttccggctggtcaaacgggtgacggtgacataccgccacgcccgcgatggcaaagcccgcaaacagcaccgcgtaaaccgccagacctgccatcatcaggaagaacaaaatcccgatgttcaggtcggcaaccacccaacccggactgactggcacaatcgcaaaggccagcagcagcgagatgacgcgatccgagaatttcgggatccagtcttctttaaagaacattttgatcatgtccgcaaccagctggagcgaaccgccccagccaacacggttaggtccgtaacggttctggaacagacccagcaggcgacgttcgccaaagctcatgaatgccccgcagatcctcaagatgcgcgccagccagcaccggagcaagtgggcccggggggaagccaaaatttaaggccgctcattcggcaagcccacctgccctgccgtcagtccttcggcgatttcaaccggcagcgtgaccgtgttgccatcgacgcacgcccggatcgccaaagcgcggtccgggggtccgccccttggcccgaatgccgggacccccggattacccggcggctgggtaccgttcagggcgccgtcccacgcttgccgccggttcgatcggcgggccatgtccgccggtttctgataattccaacgacggtcgacgggcaccatccagtcaatcaacatacctaccgccagccctgtgatgacatcaataaaatgatgctgccaggtcgtcagcgtcgaaatggcgatgagacggataaaactaaacttcagcggatagagcaaaaaaccgcagcaggccattaccgttgccagaataagccggtggacaagtcggcgctgttcgaatgtcgtgctacaaacgaacagcgaaaatccatataa

SEQ ID NO: 143024 - DNA, 4677 bp, Homo sapiens; identical to SEQ ID NO: 139695

SEQ ID NO: 143025 - DNA, 393 bp, Homo sapiens
atggctgcttccatagtggaatacactccgctgtttcctccaggatatagaacctgcacttcccgcgcttatactgtgattcaggcgcgtccgactgcagggctgcaacgtttgcgttatctgctgctgctgtggggggcagatcgtaacggcgctaacccgatgacgccggaagaggtgcatcgtgttgctaatgaacgtctgatgcagatgatgccgcagacgcgatggggccaaagttacctgaaccggcaacggggatcgctcagccgactccgcagcatccggcgacaggaaatgcagctactgcgcctgctgcgccgacacagcctgctgctaatcgctctccacaaagggctacgccgccgcaaagtggtgctcaaccgcctgcgc

SEQ ID NO: 143026 - DNA, 2703 bp, Homo sapiens
ttacagagctttcaggattgcatccacgctggctttggcgtcaccaaacagcatgtgggtgttttccttgaagaacagcgggttttgcacaccagcatagccagtgttcatcgaacgtttaaagacaatcacgttctgcgctttccacacttccagcacaggcataccagcaatcggactcttcggatcatcctgcgccgccgggttaaccgtatcgttagcaccaatcaccagtacggtatcggtatcagcaaagtcatcatgatcaaactggtttttcaggatccgacccagcaggctatgcagcgcaatcagcgccggttcgctgtccagacgttccccgtatggcgggttgctcaacactgtgccgtacggccctttcggcagcggattggtcagttgcgcgacatctttcacctcaaaggtgatcagttcaccaatccccgcaagacgggcgttagtgcgtgcacgttgaatcacccgtgcgtcgctgtccgaaccgtaaaaatgagagctatactcagccaggcctttacgggcgcgagtttgcgcttccgctttcacttcctgccagatagcttcatcatgctgcgcccagccgctaaagccccaacgcccacggtgcaagcctggtgcgcgatcggtcgccagcatcgctgcttcaatcagcaacgtaccggaaccacacatcggatcgagcagcggtgttcctggctgccagccggatcgcatcacaatagcggctgccagggtttctttgatcggcgcaataccagcacgatcgcgatagccacgcagatgtaaaccatcaccactcagatcaagagcgatactggcggtttctttatgcagccagacgttaacgcggatatccggcgcatcgcgataaacatttgacgcgtcagatttttccggaagagcatgcggtaccgagctcagtatgtatctccaccctagtgaccctttacttaaccagtcgataacgatcgggaatttatttgcatttaagcgtgaagagaaaatagagagttcttttccggtaattccttgctgaatcacttcagacggttcactggagaaccccatcaatacaatacgtgccgctggagaagccagcgttacggcctctttcaggatagaaggatgacaagccgcatcgataattaatgtcggcttgatgcctttttcagtgaaaatctcgccaagcggtgtctggctgttattaatcgcccagtcagccccgctctctttcgctttttccagtcgttcatcaatgcgatcggcaacaatcacatttttaacgttatagacgccttttaatacctgaacgatcgtcaggccgattggaccggcaccataaaccagaacggtatcattttcagtcggttgaccatgtccggttacgttagccgcaatggtaaaaggttcgatcattaccgcatattgatcggccactgcttcaggaattttccacgcattttttgccggaaccacggcatattcactgaaaccaccgtcagcgtgcacacctaatacagccagtgtcgtacaaacgttcggtttaccggtcgtgcggtactcgtctatctgtacactgatatttctgtatacctcggatcgttcactggccaatggcctgagcgtgtccatcgttggagcgctaggcggcatttgctgggggagctccgggaaagcagagtgctggcggtgatccattttttgcagcagcgccagatgctgcgcgatctgcgtcagtgccggatgaccgggatccagcatcgacgccagtttttccaccaatgtcagacgcaggctaagcggcgcatttaacatgccgccgttcgtccatgtctgaagctgcacacgcgaaagaagttcctgcatcagtcgttcacgaaactgctgctgatgggcttgtggaaggcgggcatcatcagcctgcgccagatccactaaaaagcggggataaaccgactccagcacgcgaccggggccgtcaagtaacgtcttggtcaatatcgttaaaactccaggtgtgtttggaatgcggaatttggtcatcagctcatcgctggcgatcactttttccaccactttcaggcacatctggtgcagttcggcggtgacttcttccagcttttcaacctgggcgagggtcaacttgtagtaagcatcttcacaccagtacggctcgccgtacatggtgtgaaaattgaaaccgtattcgtgggcttttcgagcttgatccacggcagccagaccgttttggtcagcagcgccagcggggccagcgttgcctctacgcgtggcaaatgcaccatcgtgacttcgggaatatccggtggattgccaagaatgatgtcttccgcgtgtacatggggccacggcacccagctgcgccagccagtttcttgtttttgccgctcccacaccacgcccagatcgccacggatagcgaacggacgattcaactccgcagagactttcttctccggctgtggagaaagctccgacagcatccagcgcttcaggcaactcccgcaacgataaaccattgcgggagataaccttgattacttcagatcggcctgtacctgacgcagcggtttcgcccacgggtttttggcctcttaccattcccttccatagatgcagacggatgtcgtcactgcctggcatccccatacgccagtccagcgccat

SEQ ID NO: 143027 - DNA, 1963 bp, Homo sapiens
ttacagcgccttggtgaagcggaagtggctctgctcgtagccttcgcgcagatagaaacggtgcgcgtcgtggcgcttcacgttggtcgaaagttcggtcatttcggccccggcctggcgggcttcttcttctgcccacgccagtaacttactgccgacgttcagcccgcgcgcttgcggcattaccaccaacttcttgaatttcgccgatccagttgacatgatgcagatgaaactgcaaatgcaggccgatcatgccgacaacttcgccatcaagcagcgccagatggtagcgcatgtttgggtcgcgcagattggcgttaaaacccacgcgaaacgcgtggtggtcaaactccgcctgttttagctcacaaatcagcgcgtaaaccgcgtcggtgtcgtactgcgtggccgggcgaagctcacaagcaggcatggtgtttctcctttggcgcaggctgccgtcattgttgagcgtatggcaatcctgtggagtatagcgggcggcgcgcgccaggcgggcgttaatttcactggcgttttcacggccacggttttccaggcgctggcggaggatctccggcgaaacctgtaaacagacgggcagcagcgccgattgatagcgcgcccgcgcctgcggcagatgggcgcgtgagccgttgaccagcacgtcgaatccggcgtgcagccagagatcaatctcgacgccgacgccataatacagaccgttagcgtgccagcttaaggccaacagattttgccccgcgcgggtaaaaaactcctgctcgctcagggcgatatggttttcacttccggcgctggcatcgcgcgtgatgtagcgatgcgcccccaggatcagcaggcatacaagcattgcccccttccccccccccccgatggcgattagatcgacgtgcgggccgtcaaatccggtggtcagtaccgcgacgttgaccagatagcgaaaacgctgggccctttgccgcgttgcagcaaactccataatctggctgatgatgtgcggggtaatacgttgttgttttttcagctcacggttgagatcgcgttcgctgaacagcccgttactctgtgcctgcaagcggctgaaatcgtattgcactactggcatatccagtcgttctggcggcgtcagatagccgtgtttaatcatataacgcagcggcagctcataaatgcagtcacggaaaagggctttctcatcgccgcgtaccatgccgtgataatgaaactggtagatccagcctttgcccaatcgaaaaggcgtggcagtcagccccagcaggcgtaagtggggattcacttttgtcaggtgagtgaggatttgctgatactggctctcttcatcgtcaccaatacggtgacattcatcgacaatcaacagcgaaaattcacccttaaaggccgacagcgggctcagaagacgctccagtgtggccagagtgcgttcaccgaagacgtgcgccacaaccgtcctccgtatcctgtcatacgcgtaaaacagccagcgctgacgtgatttagcaccgacgtagccccactgttcgtccatttcagcgcagacaatcacatcactgcccggttgtatgcgcgaggttaccgactgcggcctgagttttttaagtgacgtaaaaccgtgttgaggccaacgcccataatgcgggctgttggcgcgacatccgacgccattcatggccatatcaatgattttctggtgcttaccgggttgagaggcggtgtaagtgaactgtagttgccatgttttacggcaaggagagcagagatagcgctgatgtccggcagtgcttttgccgttacgcaccacgcatgcaggcatgcaacgtgggggggcatgggggcatgctatttggtcatcattcttgtcgattcgacgccgcaaattgcagcacaactgcctgaacgtatcgaaaaacgtctgcaacat

SEQ ID NO: 143028 - DNA, 2997 bp, Homo sapiens
ttacagcgccttggtgaagcggaagtggctctgctcgtagccttcgcgcagatagaaacggtgcgcgtcgtggcgcttcacgttggtcgaaagttcggtcatttcggccccggcctggcgggcttcttcttctgcccacgccagtaacttactgccgacgttcagaccgcgcgcctgcggcattaccaccaactcctgaatttcgccgatccagttgacatgatgcagatgaaactgcaaatgcaggccgatcatgccgacaacttcgccatcaagcagcgccagatggtagcgcatgtttgggtcgcgcagattggcgttaaaacccacgcgaaacgcgtggtggtcaaactccgcctgttttagctcacaaatcagcgcgtaaaccgcgtcggtgtcgtactgcgtggccgggcgaagctcacaagcaggcatggtgtttctccttctgtaaacagacggccaatcacccgcaatggcgggatcccgttcgcggccttcgtcagcgatccgtgcgacgggcgctcgcagggcacgcacggtatgttcgattccctgccgtaccgcaacgacgcggcgatcgtgtttcgccgcctgatccgctccctgccgacgcggcgggcggtgatcggcgtagcgacctgcgataaagggctgcccgccaccatgattgcgctggccgcgatgcacgacctgccgactattctggtgccgggcggggcgacgctgccgccgaccgtcggggaagacgcgggcaaggtgcagaccatcggcgcgcgtttcgccaaccacgaactctccctgcaggaggccgccgaactgggctgtcgcgcctgcgcctcgccgggcggcgggtgtcagttcctcggcacggcgggcacctcgcaggtggtcgcggaggcgctgggtctggcgctgccgcactccgcgctggcgccgtccgggcaggcggtgtggctggagatcgcccgccagtcggcgcgcgcggtcagcgagctggatagccgcggcatacccccccggaaaattcttctccataagcctctcaaacccccttgtgtatccccccggcgttggggggctcaccaaaattttgggtggcacctttttggactttctcaccggcttgcgtgcgctgaggaagttgcggccgtttttccacggcgagtcgacaatcttcacgtcggtgtagagcagccagaatttaccgtcggcgtagctcaggcacggcgcccagatgccgccggagtccgggttgcccttcatgtccagcatcgacacgcggtccaacggggtgctgaccagcgaccagtttttcaggtcacgggagtggtagatgcgcacgcccgggaaccactcgaaggtcgaggtggcgatgtagtagtcctcgccctggcggcacagggacgggtccgggttgaagccggtgagtatcgggttagtgatttccatattgcctccggttaatgggatgcggctgtcgcggcgtcgggaacggcctcgccctccgtcccgccaatcgccaggccaatcttcagctgaacagttagtggtagaacaccgcccgtcgtagcggcgaccgctgcagctcttctcgtagtccaacacgtcagaagccatcagacacatgcggcgattattacgcccactgagattatggatcgcacgggcaatcagctctttacccgtgccagtttcaccgaggatcagcacggtactgtcactttgcgccaccatttcaacttgtttaagcacgctgtacatggcttcgctgcggccaataatctcgccaaattcactatcaacattgttgagctgctcggtcagggcgaggttttcatcaaccagccgttctttcagacgatggatttcctgataggcgagggcgttatcgacagcgattgccacacgttcggcaatctggcgcaagtcgtggtggtgtcgatgctgaactcgtactccggctgggcggctgcggctgcgggctttatgctcagcaacgacctgctgattgtgaccggtgcgctggtcggttcttcgggggctatcctttcttacattatgtgtaaggcgatgaaccgttcctttatcagcgttattgcgggtggtttcggcaccgacggctcttctactggcgatgatcaggaagtgggtgagcaccgcgaaatcaccgcagaagagacagcggaactgctgaaaaactcccattcagtgatcattactccggggtacggcatggcagtcgcgcaggcgcaatatcctgtcgctgaaattactgagaaattgcgcgctcgtggtattaatgtgcgtttcggtatccacccggtcgcgcggcgtttgcatggacatatgaacgtattgctggctgaagcaaaagtaccgtatgacatcgtgctggaaatggacgagatcaatgatgactttgctgataccgataccgtactggtgattggtgctaacgatacggttaacccggcggcgcaggatgatccgaagagtccgattgctggttgtaacacattgcgaagaaaagaagtaatccacgccgtcatcgacgcccagcggctgggcaataataaaattgccactgacgacgttgatatgcgcgccctgctcttgggaatgcaatacctgcggcatcatctgcatcagacgttcattagcaacacgatgcacctcttccggcgtcatcgggttagcgccgttacgatctgccccccacagcagcagcagataacgcaaacgttgcagccctgcagtcggacgcgcctgaatcacagtataagcgcgctgggtatcgagttttacggaagagacaaccgcgaccggatagccttccgggaaacgaccgcccagaccggaagtcaccagcacatcaccaacacgaatatctgtattcgccggcagatgctcaagctgcaaatcatccgtacaaccgttaccggctgcaatggggtcatattttctttatccactctatcattaatgggcatttga

SEQ ID NO: 143029 - DNA, 1668 bp, Homo sapiens
tcatagggttgctgaaagcaggggcaccagcgtgccgtcttgcaggtcgctctgcacacttttgtctggcgcaaacacaatccccaggtgatttcgtgccagctccagcgcagattgcgtgttgtcgcaaacgtaatttcccttcacgcgataatcccgcacctctttactcccggcgacgttgaagcgccagatattcgcgtcgtcgatcatcatcgagtcgatcaaaatacaggagtgatgttcgagttcgtcaggacggctaatgggatgtttctcaagatagcgctggctggcataagcggttacggcatattgggtaataaaactggcaaccagcgattcatcttttggtggagcgtagctgattaaaacatcacaatcatcaggaaattcgacgccttcataaaaggcattacgctcaagattgcaggtttttagcgataaggtgatatcaccgatatctttaattttatcgattacatgtttgggataataggtaattatgcggatgatattggtcaccacggccaggttaaccagcacgttgaactgactgtttagcgacgggctaatggtcatcagtgccaatccactctgaataatcacaatggtcaacattccctgcaccggtgcatccactttggttacacgggagaaaattttagggaagtagccttcatcagatgaagatttaaacacctgggcaatggtgaactgccagccaagtagcgaaccgcagcaggacatcaccatcagcgccataatgactttacccacttccggcgtgaacatctgcgcgaaggccagaccaaatggtgccgttgaatttgccagctccatatttggcacaatcccggcaatcacgttggtggagacgatataaatcaccgccgcacctaacgtaccgccgagtaccgcgattggcacattacgttccgggttttccactacatcagtattcgcacacgcagactccagaccaagaaaagcccacagcgtcatagcgatggaagaacctaccgcactgaagaacggtgcatgatgcggattccaggaatcaacgtacagcgtcgggctaaaccagaaccagccaataatgcacagaccgacgaccggaataatgaccccccacacggtaatgctactgatttgcccggtaatgcgcgcaccacccaagtagccacgggtacaatcacagcacccgatggtcgcagacaattctcgacactgggcgggttgatgttttatctgcaattctttttctatgcctggggccacgcccgcattccggcgcagtatgactacatcagttggatgctgcatatgagtttctatgtattgtgcggcggtatcgtcgggctggtgctgaaagagtggaacaatgcaggacgccgtccggtaacggtgttgagcctcggttgtgtggtgattattgtcgccgctaacatcgtcggcatcggcatggcgaattaatctttctgcgaattgagatgacgccactggctgggcgtcatcctcggtttcccgggtaaacaccaccgaaaaatagttactatcttcaaagccacattcggtcgaaatatcactgattaacaggcggctatgctggagaagatattgcgcatgacacactctgacctgtcgcagatattgattgatggtcat

SEQ ID NO: 143030 - DNA, 1944 bp, Homo sapiens; identical to SEQ ID NO: 138972

SEQ ID NO: 143031 - DNA, 3288 bp, Homo sapiens
atggctgacacccgctactttggaatgcacatgagtcaggaaacgcccgcttcgacgactgaagcgcagattaaaaatgaacgccgtatctcacctttctggctgctgccgttcatcgcgctaatgattgccagttggctgatttgggacagttatcaggaccggggtaataccgtcaccatcgactttatgtcggcggatggtattgttccaggccgtacgcctgttcgttatcagggcgttgaagtcggaacagtgcaggatatcagcctcagcgacgatcttcgtaagattgaagtcaaggtcagcatcaagtccgatatgaaagatgcgctgcgcgaagagactcagttctggctggtgacgccaaaagcatcgttggcaggtgtctccgggctggacgccctcgtcggtgggaactatatcggcatgatgccgggtaaaggtaaagagcaggatcactttgtcgcactcgatacccaaccgaaatatcggctggacaatggcgatctgatgatccacctgcaagcccccgatctcggttcgctgaacagcggttcattggtctatttccgcaagatcccggtgggaaaagtctacgactatgccatcaatcccaacaagcaaggcgtggtgattgatgtcctgatcgagcggcgttttaccgatctggtgaaaaaaggtagccgtttctggaacgtttccggcgttgatgccaacgtcagtatcagtggcgcgaaggtgaaactggaaagcctggcggcactggttaacggtgcgattgccttcgattcaccagaagagtcgaaacctgccgaggcggaagatacctttggtctgtatgaagatctggcccacagccagcgtggcgtaataataaaactggaactgccgagtggggccggattaaccgccgactcgacgccgttaatgtatcaggggctggaagtcggacagctgactaaactggatttaaatcctggtggtaaagtcacaggggaaatgaccgttgatcccagcgtcgttaccctgcttcgtgaaaatacccgcatcgaattacgcaacccgaaattatcccttagcgatgctaatctcagcgccctgctgaccggcaaaaccttcgagctggtgcccggcgatggcgagccacgcaaagagttcgttgttgtgccaggcgaaaaagcactgctgcatgaacctgatgttctgacgctgaccctgagcgcgccggacagttacaaagatattgcagagaagatacaaaaacagggaggtgattatttattcgctgtaaaaggaaaccaggggcggcttaataaagcctttgaggaaaaatttccgctgaaagaattaaataatccagagcatgacagttacgcaatgagtgaaaagagtcacggcagagaagaaatccgtcttcatattgtttgcgatgtccctgatgaacttattgatttcacgtttgaatggaaaggactgaagaaattatgcgtggcagtctcctttcggtcaataatagcagaacaaaagaaagagccagaaatgacggtcagatattatatcagttctgctgatttaaccgcagaaaagttcgccacagcaatccgaaaccactggcacgtggagaataagctgcactggcgtctggacgtggtaatgaatgaagacgactgcaaaataagaagaggaaacgccgcagaattattttcagggatacggcacatcgctattaatattttaacgaatgataagcagcgcaatggtgaaaaatgcgccgccaatagccatcagcgtcagaaactgcggccagacgatttcgaatccggcaccccggtagaggatggcctgcgcgaggctaacaaaccgagtaagtccctggataccgacctaagcacctacctaggccccgagtcgaccgatgatacttctgctcagtcatgcatcatcaagacagtaaatattctgggatatacccagttgcctggtaaagtgcctgggctcatgcgctgtggcatcgaccggttcaccttgaatatccggctggcgtccggcgaggacatcacgctgaaaattaggcggaatatttatcgcgaaggtatagcgtacggcgtccagtccggcatccatctcatcggcggggatcaactccggggggaaaaaccacggacgaaaaaggcgcccggatttccatcaagattagcgacgaacagcgatcgcttcgatctcaatcttcacgtctttcggcagacgggcaacttcaacgcaagaacgtgccgggaaggtggcgttgtgtccggtgaagaaggcttcgccagcggcttcgacgatcgcttttacgttgtccagcgactgacgtgcctgtgcagcgacgtctgccggtacttcgcccgtcttcggatttaccgggatctgaccggaggtgatgatcatattgcccagatcaacgccctgtactacttggctttgagcgcgatatcgttgggccgtttcggccggcaaagttggttgcaaccggttcggcatggtgtatacgtgtcggtcggggcccccggcctgtggcttcgccccggcattggggcgggttccccgcgctggtttgccgtgggtccggggttggggaaattgaagaaaactgtcctcaccgagttcaaccgtctgcgtaccgccggtaaagtggcgatcaaactggttgacggcgatgagctgatcggcgttgacctgaccagcggcgaagacgaagtaatgctgttctccgctgaaggtaaagtggtgcgctttaaagagtcttctgtccgtgcgatgggctgcaacaccaccggtgttcgcggtattcgcttaggtgaaggcgataaagtcgtctctctgatcgtgcctcgtggcgatggcgcaatcctcaccgcaacgcaaaacggttacggtaaacgtaccgcagtggcggaatacccaaccaagtcgcgtgcgacgaaaggggttatctccatcaaggttaccgaacgtaacggtttagttgttggcgcggtacaggtagatgactgcgaccagatcatgatgatcaccgatgccggtacgctggtacgtactcgcgtttcggaaatcagcatcgtgggccgtaacacccagggcgtgatcctcatccgtactgcggaagatgaaaacgtagtgggtctgcaacgtgttgctgaaccggttgacgaggaagatctggataccatcgacggcagtgccgcggaaggggacgatgaaatcgctccggaagtggacgttgacgacgagccagaagaagaataa

SEQ ID NO: 143032 - DNA, 864 bp, Homo sapiens; identical to SEQ ID NO: 138973

SEQ ID NO: 143033 - DNA, 3390 bp, Homo sapiens
atgagctatagaaccacgccacaagaacccgaacccgggcacctatggacacccaaatatcagaaccgccgcttggctgccaaccaacgtgaagggacgttgtcgattatggttggcggtgatgaagcggtatttgaacgtgttaaaccgctgtttgaactgctcggtaaaaatatcaccctcgtgggcggtaacggcgatggtcaaacctgcaaagtggcaaatcagattatcgtggcgctcaatattgaagcggtttctgaagccctgctatttggcttcaaaagccgtattatgctggcaattatcctcagcgcctttttcattgccgcggtaatggtattaaacggtgctgcgggcagtaaatacggtgtgccttttgccatgatcctgcgtgcttcttacggtgtacgtggtgcactgtttcccggattattaggggcggaattgccgccatcatgtggtttggtttgcatgttacgcggggtcactgatgataaagacgtcattgcaattgatggaaaaacgctccggcactcttatgacaagagtcgccgcaggggagcgattcatgtcattagtgcgttctcaacaatgcacagtctggtcatcggacagatcaagacggatgagaaatctaatgagattacagctatcccagaacttcttaacatgctggatattaaaggaaaaatcatcacaactgatgcgatgggttgccagaaagatattgcagagaagatacaaaaacagggaggtgattatttattcgcggtaaaaggaacccaggggcggctaaataaagcctttgaggaaaaatttccgctgaaagaattaaataatccagagcatgacagttacgcaatcagtgaaaagagtcacggcagagaagaaatccgtcttcatattgtttgcgatgtccctgatgaacttattgatttcacgtttgaatggaaagggctgaagaaattatgcgtggcagtctcctttcggtccataatagcagaacaaaagaaagagccagaaatgacgtccggtgacaaccctagtacgttgccaatgcttgccattcacattgcactcctgtgccacacggctgccgggtggacgcagtgtcgtgttttgcggtactttgctggccgcctccttacctgctttaccttcgtgctccgactagaactccggtttgctgcctccgtgtacagtcactgggcttgccgtggcgaagccgtgtattccaggctccacgatatcccaggcgtttacccaccttggaaaggttccctcgatgcgcttctccttgttaccggaccattgctggttaattggataccttgtccggcctttcttcgcctctgtggaagcgtgtgcgctttctcaattgcttcacgctggtgggtattcccggaccgcggtacgtcgtcaccccccagctttgctgttttgcggacccccgctttcgcacggtttcctcgcgggatcctctacggcgtctgccacagtgatcccactgctgatctcgtactccctccatcgcttcgaatccaacgtccgcgcggcgaccgtcgtcggcatggtcggcgcaggcgggatcggcgtcaccctgtgggaagcgattcgcggtttccagttcccacaaacctgcgccctgatggtgcttatcatcgtcacggtcagcctgctggatttcctctctcaacggttgcctacccaacacgctatcaagagatagccgcaaaacttgagcaggagcttcgtcaacactaccgctgcggcgactatcttcccgccgagcagcaactggcagcgcgctttgaggtgaatcgccacaccctgcgccgcgccatcgaccaactggtggaaaaaggctgggtacagcgccgtcagggcgtcggcgtgctggtgctgatgcgcccgttcgattacccgctcaacgcccaggcgcgttttagccagaatctgctggatcagggcagccatcccaccagcgaaaaactgctttcggtattgcgccccgcgtccggccacgtcgctgacgcactggggattaccgagggggagaacgtcatccacctgcgcaccctgcgtcgtgtcaacggcgtcgcgctctgtttaatcgaccactacttcgcggacctcaccctctggccgacgctgcgacgcttcgacagcggctcgctgcacgattttctgcgcgagccaaccggaattgcgctgcgccgcagccagacgcggatcagagcctgcgcgcccaggcaaagagtgccagggtctgaagtccgaatatgttgccgtggttggattgaagaagagttgctgtttatgccagagggcggcatgccggacatgcaggtgctgacctgggacggtcaactgctggcgcttgagctgccgcagaccgttgatctggaaatcgttgaaaccgcaccaggcatcaaaggggcatctgccagcgcccacgtgactcctatgaatacaatcgcctccgttacgctcccgcatcatgtacacgctccacgctatgatcgccagcagttgcaatcacgtatcgttcattttggctttggagcctttcaccgcgctcatcaggcgttactgaccgatcgtgtgctgaatgcccaggtaggcgactgggggatctgtgaaatcagcttgttcagcggtgatcaactgatgagccagctccgcgcacagaaccatttatataccgtgctggagaaaggtgcggacggcaatcaggtgataattgtcggtgccgttcacgaatgccttaatgcaaaactggattccttagcggcaattattgagaaattttgcgagccacaggtggcaattgtttccctgacgattaccgaaaaaggctattgtattgacccggccaccggtgcactcgacaccagtaatccgcggattattcacgatctacaaacccctgaagaacctcactccgcaccgggtattctcgtcgaagcactgaaacgccgccgtgagcgcggccttacaccgtttaccgtgctctcctgcgacaatattcccgacaatggtcatgtggtgaaaaacgcggtgctgggaatggcagaaaagcgttcgccagaactcgccgggtggataaaagagcacgtcagtcttccgggaaccatggtcgaccgcattgttccggctgcaaccgacgaatcactgctgcgaaccgttatccagtgggtgttggagataacttgtcgctggcgtcctgctgtgaagtccaggtgtcactgtgactggtctgcctggacaataacgggcgattatggcacccttaatagcctgaccctttcgccagaatccacgaaggttatgagtaagggcgcagacgttccaggccagcgaagcatcgagattcagtccggatga

SEQ ID NO: 143034 - DNA, 1596 bp, Homo sapiens
ttacccgcggcgactcaaaatttctttctcataagcccgcacgctctccagccattcgctacctgctggcgtatcgtgacgttggcaatacatttcccagaccgcctgccacggcaacgatttctgctcttccagcagtgccagacgcgcagtgtaatcgcccgccgcttccagcttgcgcagctcagcggtaggttccagcaacgcacgcagcagggcttttttcatattgcgtgtaccaatgacccacgcggcaatgcggttgatagaggcatcgaagaagtcaaggccgatatgcacccggtcaaacagatcgtgacgcacaatctcactggcaattgcctgggtttcatcatccagcagcactacgtgatcgctgtcccagcgaaccggacggctgacgtgcagcagcaactgcggcacatacagcatggcggcggaaatcttgtcggaaatcacttcagtcgggtggaagtgcccggcgtccaggcacagcgcagtctggcggctggtggcataccccatgtaaaactcattggagccaaccgtgtagctctctgcgccaatgccaaacaatttgctctcaacggcgtcgatatggtgcgcagggtttagcttctcgctgatcacctcatccagtgctgccagcagacgctgacgcggggcgagacggtcaacggtgatatctttcataccatccgggatccagatgttcatcaccgatggtgtgccgagttgctcgccaaaataggccgaaacgcgacggctggctttgcagtgatcaatccagaactggcgaatgctgtcgtcggcatgggaaagcgtaaagccatcggcgcttagcggatgcgaaaagcaggaggggttaaaatccagaccgagctgattggctttcgcccattcaacccagtttttgaagtgctctggtttgatcccgtcagccgacgtggctatcggtacatcgtgatcaccggtgacgatttgccggaagccaggctggcagtgccgcgtgtttcctgggccgaacatcagataatcgcattccgatgtgtgccggacagccgcagcatgaatctgtccaatgcggtgtcggtagtggtgtatgaagccgttgaaatgctggtccatatccattgatggcttatcgctgtctggtttaccgacaatacgagccggaacgccagcggcggtggtatgcggcggcaccggttgcagcaccacggaacctgcgccaatcttcgcgccgcgcccaacttcaatattgccgaggattttcgcgcccgcgccaatcatcacaccttcacgaattttcgggtgacggtcaccaccagatttacccgtaccgccaagcgtcacagattgcagaatcgatacgtcgttttcaatcaccgccgtttcaccaacgacgatgcctgtcgcgtggtcaagcatgataccgcgaccaatttttgctgccgggtgaatatcgacctggaacgtcacagaaaccgtttcgaactcatccagacgcaggtcgaagcccgccgtgatgttaaccagcacgccgcgcgcgccagacaggtcgatatcttccagcagcggagaagagatagccat

SEQ ID NO: 143035 - DNA, 1744 bp, Homo sapiens
atgaaaaggtcaatgacactgacaatatttcactcagaaagaatcatccttagaaaccgtcaacctcctccaaaagaaagttgggaagatatagaggatttcggggaaacacatctcgatttcttgaagcaatatggtgattttgaaaatggtattcctgttcacgatactattgccagagttgtatcctgtatcagtcctgcaaaatttcacgagttgctttattaactggatgcgtgattgccattcatcaaatgataaagacgtcattgcaattgatggaaaaacgctccggcactcttatgacaagagtcgccgcaggggagcgattcatgtcattagtgcgttctcaacaatgcacagtctggtcatcgggcagatcaagacggataagaaatccaatgagatcacagctatccctgaacttcttaacatgctggatattaaaggaaaaatcatcacaactgatgcgatgggttgccagaaagatattgcagagaagatacaaaaacagggaggtgattatttattcgctgtaaaacagcgcaatggtgctgtcgagaaccgcgcgaaaacccagacgcggatcgcttttggcgaccattttttccgccgacaggtgagtcagcgtatccggcttttttgccaccggctggcgacacagttcgcagcacgcctgcggatgttcatcgctactggtcagcccatgaacgggctgcggctgctgctgttcatcgtcaacaaacaggcggccctgctcgtcaataaacttgatgcgcagatggcggctttccagcaactcccgggcagagggcgtcaggcgactgtccgcagggagatggatctctgcgccttcgctgagcgtatgggattgccagttagccggccaggcgacatacaggaatttcacgctggatgtcgtaccaaattcgatgctggagcctttcgggataaacatcacgtcgcctgctttggcgatcatggtttggccttcgtggcgaacatgcagctccccttccagcaccatgtcgatttcgtcgtagttcagggtccacgggaagaatgcgttctcccactgcataaaaccggcggccatgctgctgccgtcgtctccggtcacaagatcagtcaagcccacgcaatgcggctctgcgccgtcgaaacgaccaaacttgacgctactggcatcaatcactttgatgccgcctttgccggtcaccgatttgaaagctcggttgattgcgcctgctccgcgactgtttccttcatcacttttccatcagtgtgcgaccggttcggtaactggcttcgcagtggcagatgttcgcatgcggctcgcaagaacgaaatcaccctaactaacacccggcgcagcctgagacctaaacgcaacaccgagaggcacgacatgcaaacaagggccaccgttatcgctgccggtgaaaaactactgccttatgcagaaacgctcatgagcacctggcaggccgcccgtaaggaggtggcgcatacctcacgacataacgagttttctatcggtgccagcgcctcgttgtgggacatggtgatgacatccgccggggctgttgtcacgaccgtcgtcgttgctgtacgaccttcctctttctatattctctgctctcacaagaagaagcgaacactacacaccaagagagagaagacagtagacagaaggaaagagtacgaaacgagagcgaagagatcagaaacagatacacaatag

SEQ ID NO: 143036 - DNA, 2691 bp, Homo sapiens
atgcgtgactgccattcttcagatgataaagacgtcattgcaattgatggaaaaagcgtctctctggcattgcttatgacaaggagtcgccgcaggggagcgattcatgtcattagtgcgttctcaacaatgcacagtctggtcatcggacagatcaagacggatgagaaatctaatgagattacagctatcccagaacttcttaacatgctggatattaaaggaaaaatcatcacaactgatgcgatgggttgccagaaagatattgcagagaagatacaaaaacagggaggtgattatttattcgcggtaaaaggaacccaggggcggctaaataaagcctttgaggaaaaatttccgctgaaagaattaaataatccagagcatgacagttacgcaatcagtgaaaagagtcacggcagagaagaaatccgtcttcatattgtttgcgatgtccctgatgaacttattgatttcacgtttgaatggaaagggctgaagaaattatgcgtggcagtctcctttcggtccataatagcagaacaaaagaaagagccagaaatgacggtcagatattatatcagttctgctgatttaaccgctgagaaattcgccacagcgatccgaaatcactggcacgtggagaataagctgcactggcgtctggacgtgtcgcgtaaccgccgttttggcatgatgctcggtcagggcatggatgtacaaagcgcgcaggagaagattggtcaggtggtggaaggctaccgcaatacgaaagaagtccgcgaactggcgcatcgcttcggcgttgaaatgccaataaccgaggaaatttatcaacacgaaaaccttggcagtgcactgagctacatgctggcgaacaagctgtcatcgccaattatgcctgctattgctatccgtgaagtggtggaagaagcctacgccgctgacccggaaatgatcgcctctgcggcctgtgatattcaggcggtgcgtacccgcgacccggcagtcgataaatactcaaccccgttgttatacctgaagggttttcatgccttgcaggcctatcgcatcggtcactggttgtggaatcaggggcgtcgcgcactggcaatctttctgcaaaaccaggtttctgtgacgttccaggtcgatattcacccggcagcaaaaattggtcgcggtatcatgcttgaccacgcgacaggcatcgtcgttggtgaaacggcggtgattgaaaacgacgtatcgattctgcaatctgtgacgcttggcggtacgggtaaatctggtggtgaccgtcacccgaaaattcgtgaaggtgtgatgattggcgccggcgcgaaaatcccgggcatcttgacagttggcgccgggcgaagatggcgcaggttccgggtgctgcaacggtgccgcgcataccaccgccctggcgtccggtctattgccgtaaccaacgcgaaacctcatgatggtccgtacaaaacgctacatctggcggatgaaaaactgatccgtagcctgaagcccggagcgattctgattaacgcctgccgtggcgcagtcgtcgataatactgcgttgctgacctgcctgaatgaaggccagaagttaagcgtagtgctggatgtctgggaaggcgaaccggaactcaacgtcgagctgctgaaaaaagtggatatcggcacgtcgcatatcgcaggctataccctggaagagtatggtcgcattacgctgcatggcccgctcgatcaaccgacgctgaacaggctggtgcatttggtgtctgatgtgcgccgcgatgacgcaccgctgcgtaacgtcgccgggatccggttgactggcggacgtgtctctggtaccacgttcagtgacatgcgctgcgcatgcgatggaactgttacttgtaacacggggaaatcggcaaacggaacgcgctcgtttagtctctctacgcgactgcctgtttttctgttcggcgctatgtgggggatcggtaatatcaactacggcctgaccatgcgttatctcggcatgtcgatgggaattggcatcgccattggcattacgttgattgtcggtacgctgatgacgccaattatcaacggcaatttcgatgtgttgattagcaccgaaggcggacgcatgacgttgctcggcgttctggtggcgctgattggcgtagggattgtaactcgcgccgggcagttgaaagagcgcaagatgggcattaaagccgaagagttcaatctgaaaaaagggctggtgctggcggtgatgtgcggcattttctctgccgggatgtcctttgcgatgaacgccgcaaaaccgatgcatgaagccgctgccgcacttggcgtcgatccactgggatcttgtccgcctcaaaagcccgacttctcgctggcaaaatcgctgatcattcacaatgtgttactctcgacactgggcgggttgatgtggtatctgcaattctttttctatgcctggggccacgcccgcattccggcgcagtatgactacatcagttggatgctgcatatgagtttctatgtattgtgcggcggtatcgtcgggctggtgctgaaagagtggaacaatgcaggacgccgtccggtaacggtgttgagcctcggttgtgtggtgattattgtcgccgctaacatcgtcggcatcggcatggcgaattaa

SEQ ID NO: 143037 - DNA, 1449 bp, Homo sapiens
ttacgaaagcccgctccccgtaaggactgacgccaggtagtttctgtccatggctgcttttcgcatcttacgtcttaaccctgccttgaataccttatcattcgtcaaaatattaatagcaatgtgccgtatccctgaagataattctgctgcatttcctcttcttattttgcagtcgtcttcattcattaccacgtccagacgccagtgcagcttattctccacgtgccagtgatttcggatcgctgtggcgaatttctcagcggttaaatcagcagaactgatataatatctgaccgtcatttctggctctttcttttgttctgctattatggaccgaaaggagactgccacgcataatttcttcagccctttccattcaaacgtgaaatcaataagttcatcagggacatcgcaaacaatatgaagacggatttcttctctgccgtgactcttttcactgattgcgtaactgtcatgctctggattatttaattctttcagcggaaatttttcctcaaaggctttatttagccgcccctgggttccttttaccgcgaataaataatcacctccctgtttttgtatcttctctgcaatatctttctggcaacccatcgcatcagttgtgatgatttttcctttaatatccagcatgttaagaagttctgggatagctgtaatctcattagatttctcatccgtcttgatctgtccgatgaccagactgtgcattgttgagaacgcattattgatcatgaatcgctcccctgcggctgtactcttatcataagaatgccggtgtatttttccatcaattgcgatgacgtctttatcatctgaagaatggtagtcaagcatccagttaataaagctctcatgaaatttcgcaggacagatacaggatacaactctggcaatggtatcgtgaacaggaataccattttcaaaatcaccatattgcttcaaaaaatcgggatgtgtttccccaaaatcctctatatcttcccagccttgtcttaaccctgccttgaataccttatcattcgttaaaatattaatagcgatgtgccgtatccctgaaaataattctgcggcgtttcctcttcttattttgcagtcgtcttcattcattaccacgtccagacgccagtgcagcttattctccacgtgccagtggtttcggattgctgtggcgaacttttctgcggttaaatcagcagaactgatataatatctgaccgtcatttctggctctttcttttgttctgctattatgaccgaaaggagactgccgcggtaccgagctgaccgcttcccgttgtgtgtgttcttgcctgctctctgcttctttgtgtgcccttcctgcgagctcccggccgggaagaggcagcccgcgcctgcctcccagcagatgcccacagcgccaagcgacagcctcgtgctcat

SEQ ID NO: 143038 - DNA, 1263 bp, Homo sapiens
atggccgcactgccatgccggctcattcttcctcaccatctcaccgaccaattcgtggcttggcaagagcgctccagtctatcgcaacccagcccgcggcacactcaattgcgcttgcccacactccatcccagatcacccaatcctggcatcctgcactgccagccatcagcttcaagcccagccaccgacgacacccgaccaaccacaccgactgaacgcagcccatgcacgggacttgatcatgactccacgtgccatccagcgttacacagaccacagctggtgacaccagtctccgcggcagcctgcactgtcgtcagaagtttgtatcctttgactgaaatcttccatttgcctcggctgggaatccagcggtgcgaagtgcaggctcgcgccatccagacggacagacgccgtggtaaccaggacatcacccacattaatatgcggctgaatagcgcgcgggtaccgatacgcaggaaggtgcgaatgcccagctgtgccagctcttcaacagcaatagaggtagacgggccgccgataccggtagagcagacgataacaggtttaccatccagctctgcacgccagggtacggagaataccatggcaacaacacaacaatctggatttgcacctgctgcatcgcctctcgcttcgaccatcgttcagaccccggacgacgcgattgtggcgggcttcacctctatcccttcacaaggggataacatgcctgcttaccatgccagaccaaagcaaagcgatggcccactgccagtggtcattgtagtgcaggaaatttttggcgtgcatgaacatatccgcgacatttgtcgccgtctggcgctggaggggtatctggctatcgcacctgaactttacttccgcgaaggcgatccgaatgattttgccgatatccccacgttgcttagcggtctggtagcaaaagtgcctgactcgcaggtgctggccgatctcgatcatgtcgccagttgggcttcccgcaacggcggcgatgttcatcgtttaatgatcaccggattctgctggggtggacgtatcacctggctgtatgccgcgcattatccacagctaaaagccgcagtggcgtggtacggcaaactgacgggcgacaagtcgctgaattcaccgaaacaacctgttgatatcgcaaccgatcttaaagcgccgaatctcggcttatatggcggccaggatacagcattccgcaagagagcgttgaaccatggccagcgctga

SEQ ID NO: 143039 - DNA, 2919 bp, Homo sapiens; identical to SEQ ID NO: 136774

SEQ ID NO: 143040 - DNA, 1035 bp, Homo sapiens
atgaaacctgtaaaaccacctcgtattaatggacgagtgccggtcctgtcggcacaggaagcggtgaattatattcccgacgaagcaacactttgtgtgttaggcgctggcggcggtattctggaagccaccacgttaattactgctcttgctgataaatataaacagactcaaacaccacgtaatttatcgattattagtccaacagggcttggcgatcgcgccgaccgtggtattagtcctctggcgcaagaaggtctggtgaaatgggcattatgtggtcactggggacaatcgccgcgtatttctgaactcgcagaacaaaataaaattattgcttataactacccacaaggtgtacttacacaaaccttacgcgccgccgcagcccaccagcctggtattattagtgatattggcatcgggacatttgtcgatccacgccagcaaggcggcaaactgaatgaagtcactaaagaagacctgattaaactggtcgagtttgataacaaagaatatctctattacaaagcgattgcgccagatattgccttcattcgcgctaccacttgcgacagtgaaggttacgccacttttgaaaatgaggtgatgtatctcgacgcattggttattgcccaggcggtgcacaataacggcggtattgtgatgatgcaggtgcagaaaatggttaagaaagccacgctgcatcctaaatctgtccgtattccgggttatctggtggatattgtggtggtcgatccggatcaaacccaactgtatggcggtgcaccggttaaccgctttatttctggtgacttcacccttgatgacagtaccaaacttagcctgcccctaaaccaacgtaaattagttgcgcggcgcgcattattcgaaatgcgtaaaggcgcggtggggaatgtcggcgtcggtattgctgacggcattggcctggtcgcccgagaagaaggttgtgctgatgcctttattctaacggtagaaacaggtccgattggcggaattacttcacaggggagc

SEQ ID NO: 143041 - DNA, 1266 bp, Homo sapiens
ttattgagggctggcgatatcaatattaagatagctgttggtatcaagaaaactggttatatgaatacgcgatttttctggcgaatatctaatggcattaacaataagattcgataacattcgttgtagtaaaattttatccgcaaagatttgctgattgcactcgaccttaaagcaaatctctttctcgtcgcacagccactcgtaatcttttaccggcccaagtatacgggcgcagaaaaggccgtcacgttctggtttgaacgtacggtagttgatggtttccggctttttaacttcaccgaaagaccatgaacggatcatgtctggcgaagccagagcaattttgatcgcatcaaactcttcggttttagtctgcgctttcagaaactttaataaatctttcacggatttgctcccgtcggagttagcacaatccgccagcgaacgaatctctttcaacaatacgttgaaggattctggcatgcccggctccatctgatggttgccgtccacgatgtttttatacatcttggtacgaccgttcacgtcatcagacttaacggtgagcatttcctgcagggtgtatgctgcgccgtatgcttccagcgcccacacttccatctccccgaaacgctgaccaccgaacacccagcggctgctgacggggcccgttggaaccttttggggtcggaaacccccattatttccgaccccctgacccacgcgtctattattgatggtgcgcgtctgtccaaaccttaacgctatcgctatgccaacaacgatatgcaggagctggaagcacgtctgaagggcgtttgcgatctggcagataaatatgatgccctggtgatggtagacgactcccacgcggtcggttttgtcggtgaaaatggtcgtggttcccatgaatactgcgatgtgatgggccgggtcgatattatcaccggtacgcttggtaaagcgctgggcggggcttctggtggttataccgcggcgcgcaaagaagtggttgagtggctgcgccagcgttctcgtccgtacctgttctccaactcgctggcaccggccattgttgccgcgtccatcaaagtactggagatggtcgaagcgggcagcgaactgcgtgaccgtctgtgggcgaacgcgcgtcagttccgtgagcaaatgtcggcggcgggctttaccctggcgggagccgatcacgccattattccggtcatgcttggtgatgcggtagtggcgcagaaatttgcccgtgag

SEQ ID NO: 143042 - DNA, 2082 bp, Homo sapiens; identical to SEQ ID NO: 139930

SEQ ID NO: 143043 - DNA, 2518 bp, Homo sapiens
atggtggaagccaccctcaacagcagaacttgggtatctactcatgtaggagctgtcctgccctattcttgtgtcaactatggcgctgatgttcgtcagaaagttgacctgagtaccttcagcgatgaagaagttatgcgtctggctgaaaacctgcgcaaaggtatgccaatcgcaacgccggtgttcgacggtgcgaaagaagcagaaattaaagagctgctgaaacttggcgacctgccgacttccggtcagatccgcctgtacgatggtcgcactggtgaacagttcgagcgtccggtaaccgttggttacatgtacatgctgaaactgaaccacctggtcgacgacaagatgcacgcgcgttccaccggttcttacagcctggttactcagcagccgctgggtggtaaggcacagttcggtggtcagcgtttcggggagatggaagtgtgggcgctggaagcatacggcgcagcatacaccctgcaggaaatgctcaccgttaagtctgatgacgtgaacggtcgtaccaagatgtataaaaacatcgtggacggcaaccatcagatggagccgggcatgccagaatccttcaacgtattgttgaaagagattcgttcgctgggtgaaggctacgccacttttgaagatgaggtgatgtatctcgacgcattggttattgcccaggcggtgcacaataacggcggtattgtgatgatgcaggtgcagaaaatggttaagaaagccacgctgcatcctaaatctgtccgtattccgggttatctggtggatattgtggtggtcgatccggatcaaacccaactgtatggcggtgcaccggttaaccgctttatttctggtgacttcacccttgatgacagtaccaaacttagcctgcccctaaaccaacgtaaattagttgcgcggcgcgcattattcgaaatgcgtaaaggcgcggtggggaatgtcggcgtcggtattgctgacggcattggcctggtcgcccgagaagaaggttgtgctgatgactttattctgacggtagaaacaggtccgattggcggaattacttcacaggggatcgcctttggcgcgaacgtgaatacccgtgccattctggatatgacgtcccagtttgatttttatcacggtggcggtctggatgtttgttatttgtgttttgctgaagtcgaccagcacggtaacgtcggcgtgcataaattcaatggtaaaatcatgggcacccgaggatccctggcgctggaggggtatctggctatcgcacctgaactttacttccgcgaaggcgatccgaatgattttgccgatatccccacgttgcttagcggtctggtagcaaaagtgcctgagtcgccaggtgctggacgatctcgcatccatgtcgacagtggggcgttctccgcgaagacgctgggtctggactggaactacaccactagctttcctgggtctccatcttgcagacggcagattgtaagacttcttggtctccaaaatcaggggggcgaaacccgtggcaatttggccccccggtggtcccggtaaacttcgtccgctggcggaaagtgactggagaatcgcccgtcagatcgggccgaccttgaaagaaaaaggcctgatttttgtgggtctgaatatcatcggcgaccgtctgactgaaattaacgtcaccagcccaacctgtattcgtgagattgaagcagagtttccggtgtcgatcaccggaatgttaatggatgccatcgaagcacgtttacagcagcagtaacccaccttagcgagaaggatctcgttgagactctgagtgacagcgcccttctttccacgcatactgggcgctgttgcttttttgaaccaggaaacagaacctctgacaatgaatttacagcatcactttcttattgccatgcctgctctccaggatccgattttccgtcgttccgtggtctacatttgcgaacataataccaatggtgcaatggggatcatcgtcaacaagccgctggaaaatctcaaaattgaagggattctggaaaagctgaagatcacgccggagccgcgtgatgaatcaatccgtctggataaaccggttatgctcggcggtccgctggctgaagatcgcgggtttattttgcatactccgccctccaattttgcttccagcattcgcatttcagacaacacggacggtacgccggactggaacattatcgagcgtttactgaaagagtggcagccggacgaaatcatcgtcggtttgccgctgaatatggacggcaccgagcaaccattgactgccagagcgcgtaaatttgccaaccgtattcatggccgtttcggtgttgaagtaaagctccatgacgagcgtcttagcactgtggaagcccgttccggtctgtttgaacagggcggctatcgggcgctcaacaaaggcaaagttgactctgcctctgcggttattattctcgaaagctatttcgagcagggatattaa

SEQ ID NO: 143044 - DNA, 456 bp, Homo sapiens; identical to SEQ ID NO: 138895

SEQ ID NO: 143045 - DNA, 780 bp, Homo sapiens
atgatgctcaacgtgaaatggggcttcacctgtacttgggcattgggctctggtcctcaggcaaaaatcctaggcaagaggatcaatgactgggcccccaccaagctgggattccccgccaacaacatcccgatgttcggcatgatgaatcagatggatacccgcggcaaattcatcttctgcgccttcgccgtttccgctgctttcgccctgggcgaccacttaggcttcgccgctgccaacatgaacgccatgatcttcccgatgattgtcggcaagttgatcggcggcgtaacggcgattggcgtggcgatgatgctggtgattttctcccggctggagctggttaaccgtgcggcggtgtcgcaggtgccgcgctacgaattcattaaacgcgaaattagctggcaaagtccggtgttctttacccctgtcgataaacagggcggtttaaaagaagcggaactgaaaaccttaatactcgagcaatatcatgctgcgggtattgagccggaaagcgttgattctggtgccatcatcatcaccggtgaaagcgcgaaaacccgcaatgctcgcccggcggggatggcgctctctcagtcgctgggcgattttgtcgttgccagggccgggccgcaccttgaatccgtgaacgccgggtaccgaactcgaattcgaaatcatgggcatagctggttccctggggaaattggtatccgttcacaattcccacacacattacgaaccggaagcataaatggtaaagcctggggtgcctaa

SEQ ID NO: 143046 - DNA, 1434 bp, Homo sapiens
atggcaacactaaccaccacccaaacgtcaccgtcgctgcttggcggcgtggtgattatcggcggcaccattattggcgcagggatgttttctctgccagtggtcatgtccggggcgtggtttttctggtcaatggcggcgctgatctttacctggttctgtatgctgcattccggcttgatgattctggaagctaacctgaattacagaatcggttcgagttttgacaccatcaccaaagatttgctgggcaaaggctggaacgtggtcaacggcatttccattgcctttgtgctctatatcctgacctatgcctatatttctgccagtggttcgattctgcatcacaccttcgcagagatgtcactaaacgtcccggcacgggcggcgggttttggttttgcattgctggtagcgtttgtggtgtggttgagcagtaaagccgtcagtcggtaccgagagctcgacagcctcgatttaaccgcaaaagccattggtattgatatcgatccgcaggcgattcaggccagccgcgataacgccgaacgtaatggcgtttctgaccgtctggaactctacttaccgaaagatcagccagaagaaatgaaagccgacgtggtggtcgctaacatccttgcaggcccattacgtgaactggcaccgttaatcagcgtcctgccggtttcaggcggtttgctgggcctttccggtattctggcaagccaggcagagagcgtttgtgaagcttatgccgatagcttcgcactggacccggtcgtggaaaaagaagagtggtgccgtattaccggtcatgcgtttgcggtggacatgaaaccgtggaaaaacgtcaagatcgcgtcaattggcatcctgttcgcgatgattggcgtctatgccgggctggctgaattcggcggctacggtacgcgctggttagcgatgatcagttatttcattgccgccgtagtgattgtctacctgatttttgacagctggcggcatcgtcacgacccagccgccaccaatatggtcggttgctatagcggtaaaccgctgaatacgcaaaatattgatagtctggcggcggaaggtattcgctttaattccgcctacacctgttcaccggtttgtacgcctgcacgggccggactatttaccggtatctacgctaaccagtccggcccgtggaccaacaacgtcgcgccaggcaaaaacatctccactatggggcgctactttaaggatgccggctatcacacctgttacatcggcaaatggcatctcgacggtcatgactatttcggcactggcgagtgtccgccggagtgggacgctgattactggttcgatggggcgaactatcttagcgaactgacggaaaaagagattagcctgtggcgcaatggcctaacagcgtcggcccactcaacgtaa

SEQ ID NO: 143047 - DNA, 561 bp, Homo sapiens
gtcgactctagaggatacccatatggcagcagaggcgctggaaagtgccgcgaaagcgaaaggctgggaagtgaaagtagaaacccagggtcaattggtctggaaaatgaactgactgcggaagatgtggcgagcgctgatatggtgattctgaccaaagatatcggcatcaagtttgaagagcgttttgctggcaagaccatcgtgcgcgtcaacatcagcgatgcagagttcctcatgacgaatcgtatctctcgcctcaaaactgcactgtttgccaatacccgtgaaatctcgctggagcgggcgctgctttataccgccagccatcggcaaaccgaaggcgaaccggtgatattgcgccgggcgaaagcaacagcgtatatccttgaacatgttgaaatttcgattcgtgatgaagaactgattgccggtaaccgcaccgtaaaaccgcgcgccgggattatgtcgccggaaatggacccttactggctgctgaaagagctggatcaattcccgacgcgtccgcaggaccgctttgctatcagcgaagaagattaa

SEQ ID NO: 143048 - DNA, 3414 bp, Homo sapiens
atggaggatttgataaaactacggaaaaatgccgttaccagtgtcaggcttatgcgcaatttgtcgccagtcaccgccgaatgctgtggcgaagggggaatcaaagcctgggattatgtccggatgggttttttaagccgaatgggcgtacttaataactggttgagcgaagaagaaagtctatggatccagtcgcgcattcatctacgcgtgctctacgttattatagtaactggcggcaatactttgccggttataccttatggtcggcaatattggcagtctcccgaagatgatcatctgcctttattacgcgaattcttagcgcgtaaagaatacgagcgattccaggcaaaaaccgatccgcagggttttaaacaacttcgtcaggcgtatgaggaggcgctacggattgcgcagtcgcctgctaaatctgtttggcaaccagaagaatatgaggtagcagaacatgaaattctgctcgcctttcgtgcgttacttgcctctgatagtgaacgttttctgccctccgcctggcagcgattcattcagcaattaaattattgctcgatggaggagattgatgaattacgctggtcgctgtgcacaatcgccatgaacactgcccatttatccttcgagtgcgtggtgttatttagccaggaaacggccgagacacaacgcccggatacaatcagctcagtaccagcccttcattatatattgatgacctggtggataccggtggggtacaacaagcgagatccccgtcctaccgttggggtaatctgggccttgaggacttcagaccggttcgtggacctgctgtgggactccttttgtcgtgccgggggcactttttatcccccccacgacgggacaaattctccttcccaaacgattcgcacaagagccacgggtagatttcggtggaacttacacgctggcaattgtgccggcacaacaggcgacacgaacacgagctctcccgcgagaacggtccccacgagttgttcctgtacccccctgttggtcgctgtcgccattttcgggggcgtacaccagtctagtgttccgacacactatgtgggcccgggcgtaattattgcctccgatccttgtaccaaacgggggcactgtaaccgctttgatccctactatgttcagcaaggtgtgtcagcgtgtctgccagctgaagagtatgcagaaatcgctgggatcaactggaagcgggtgacgttaacttcattaaagatttttactaccgtctggcgcatcgtgtggaacgctggaatttgggtgaagagtactggggctacgcgaaaaataaactctggtcgccgtttggctatccggttcaccatgccaatgaagcgtcagcgcaggcgggaattattgctcatcgaaagcaatggctgctcgcatggcggtagtagattgggcgctgtacgaatagaaacacgaacctcatcacttacccccgcgagttgggcgctaaaaaagttgtgcaattgcgatgtgagattgctcgccgtacttaacggactgaacagtatcgcgatgatcgccacgctacgttttattatcagcattttcgcccccagccatttctacaactggctgatggcttctgacgtggtggactacgaggagagccgcagcggtcgccgcctcgacgggctggtgttctccacctacctgttcagcctgaagattggcctggcgattggcggggcggtggtgggctggatcctggcgtacgtcaactattccgccagcagcagcgtgcagccggttgaggtgctcaccaccatcaaaattctgttctgcgtggtgccggtggtgctctacgcgggcatgttcatcatgctgtcgctctacaagctcaccgatgcccgcgtggaggccatcagccggcagctgattaagcaccgcgcggcgcagggctccgccgtcagccttggttctacgaatatgaccattttccatatacaccactcggctggcggttttacgcgccacttcaacttcgtgggtgacgatcacctgggtaatattcgtttctgccagctcacgaatgatgctgacgatttgtgccgtaatttccgggtccagtgcggcggtcggttcatcgaacagcagtacctgcggttccatcatcaacgcacgggcaatagcaacacgctgctgctgaccaccagaaagatgcagcgggtaacgatcgctataaggtttgagacgcagacgttccagcaggttttctgcacgggccagagcatgatctttaatcaacccccagtacacggcaggtcaatcgagctcggcggtttaaaagaagcggaactgaaaaccttaatactcgagcaatatcatgctgcgggtattgagccggaaagcgttgattctggtgccatcatcatcaccggtgaaagcgcgaaaacccgcaatgctcgcccggcggtgatggcgctctctcagtcgctgggcgattttgtcgttgccagcgccgggccgcacctcgaatccgtgatcgccggtcacggagccggggcacaaaccctttctgaacaacggctgtgtcgggtactgaatatcgacatcggcggtggcaccgcgaactacgccctgttcgatgccggaaaaatcagcggcactgcctgcctcaacgtcggtggtcgcctgctggaaaccgacagccacgggcgcgtggtttacgctcataaaccggggcagatgattgtggatgagtgcttcggtgcaggcaccgacgcccgttcgctgaccggcgcgcagctggtgcaggtgttacgcccgaaatcattacgctttctggcggcgtgggcgaatgttatcgccaccaggccggcgaaccgttctgtttgccgatattgggccgctgctggcactgggctggatgacattcgggcctggttaaatgacgtcagctccgagcaaacggtgcccccgcgaattggcgggggcaatcctttagcacggacgacaatggctaaggacacgtcagccaaatgcggggaacccatgtaccgctttggcgcgaggcgctcagtagacaagcacgccagcaatccctttcgaggtcaccatcagcgtcagcaccagaatgatttcctgccagatggacaggtcaatgccatacaactgcgcgatgaagatagcggcaatactttgatacagcgtcgaaccatcaagaattgtattcgtgtgcgtaatattgaaacaaaactcgtcactggaaaagtaggtactcaacacacacaactgcttggtaatacgcttactggaagcactgccgccaaaggcgttggcgtactccttgcaggtttagcaaccagtaacaatccgctaatgacattaaaacctaatgataacgaattcttcccgtctaagtgttaa

SEQ ID NO: 143049 - DNA, 1809 bp, Homo sapiens
atgagtgatatcgataagctttcccgcaaggttccacagctgtgtaaagttgcgccgagcacccagaaataccatatggaagatgttcaccgtgctggtggtgttatcggtattctcggcgaactggatcgcgcggggttactgaaccgtgatgtgaaaaacgtacttggcctgacgttgccgcaaacgctggaacaatacgacgttatgctgacccaggatgacgcggtaaaaaatatgttccgcgcaggtcctgcaggcattcgtaccacacaggcattctcgcaagattgccgttgggatacgctggacgacgatcgcgccaatggctgtatccgctcgctggaacacgcctacagcaaagacggcggcctggcggtgctctacggtaactttgcggaaaacggctgcatcgtgaaaacggcaggcgtcgatgacagcatcctcaaattcaccggcccggcgaaagtgtacgaaagccaggacgatgcggtagaatttttcaccgatgcgtcaagaaaagcggctgaaatttttacgatcgggtacatagcgagggaaagtatggaacgttgcggctgggtgagtcaggacccgctttatattgcctaccatgataatgagtggggcgtgcctgaaactgacagtaaaaaactgttcgaaatgatctgccttgaagggcagcaggctggattatcgtggatcaccgtcctcaaaaaacgcgaaaactatcgcgcctgctttcatcagttcgatccggtgaaggtcgcagcaatgcaggaagaggatgtcgaaagactggtacaggacgccgggattatccgccatcgagggaaaattcaggcaattattggtaatgcgcgggcgtacctgcaaatggaacagaacggcgaaccgtttgtcgactttgtctggtcgtttgtaaatcatcagccacaggtgacacaagccacaacgttgagcgaaattcccacatctacgtccgcctccgacgccctatctaaggcactgaaaaaacgtggttttaagtttgtcggcaccacaatctgttactcctttatgcaggcatgtgggctggtgaatgatcatgtggttggctgctgttgctatccgggaaataaaccatgattcgggaagcgcaacgttcagaactccccgcgatcctcgaactgtggctggaaagtacaacctgggggcatccctttataaaagcgaattactggcgtgactgcattccgctggtgccggatgcctatcttgccaacgcgcaaaactgggtctgggaagaagacggtaagcttctcggttttgtcagcattatggaaggccgatttctggcagcgatgtttgtcgcaccgaaggccgtcaggcgcggtattggtaaggcgctgatgcagtatgtgcagcagcgccatccccacctgatgctggaggtttatcaaaaaaatcaaccggcgataaatttttaccaggcacagggttttcacattggcgattgcgcatggcaggatgaaacccaactacccacatggattatgagctgggcggtgggtcaaacgcttgtagtggcaggttcggaccggtggattttttcaagccttccagcgccggtttaaccggacaggccttttccagacgcgagattgggaaaaattttggtaacacggtcattggcgcgggttttcaaaaaccggcggggggttaaatccaaaccggcctgccccttttggaaagcgaatacacccgggtaatttccctcttatgaccgttccgcaaaaatttcccgggggggtcaaaacaaaaaataag

SEQ ID NO: 143050 - DNA, 2118 bp, Homo sapiens; identical to SEQ ID NO: 132436

SEQ ID NO: 143051 - DNA, 1536 bp, Homo sapiens
ttaccacgggtacgggggattaccaaaggcagcacctttaagctccgcaagacgttctgaccagtcatgcgccagcgcgttgtcttccgcagtgtaatacgcggcacatttggcgttatcaccatcagtaaacagatccagaacaaacgggccaaacagggtgttaattccccagaaaatgttgtccggcgtgcgccactgatcgcccacttccttcagttcatgggctggtttgttccgcagctccaccagcgcctggcaatatttattactcattaagcccccacgtaattcccggtatcgctggatatcgctgaaatgaagcctcgtatgtgccgggaaatcccggaagtccgcaatgtgcaccaggtacatgtatggatggtaggcgagaagccggtgaagacgttgcatgtgcaggtgatcccgccacacgatcacgatgccttgttggatcagatccaacactacctgatggatcagtgcgctgttgatccacatccggctgccgttgagcgcaataaaggtcaggatgatgtactccagagacatggcgtaaacgccctgaagtgcaaaaataacgacgctaatcacgttaataatcacccacaacagccagttttccacatacttacgcgtcatcagaatcattgccacgatagataacaccatcatgcatgaatcccagaacgggaaagcgtccggttgcagttcaggcatcacaacctgtaatcctaatgcttgcatgatcatgactgccacgcgggtcaaaaatgcaaacaccggattgataaataccgtcatcagaccaatcgaaacaacgcaaaccgccaaccagctgagtgccttcggcaatggcaaccagcgaattttcaactccgcctcgttctgactggtttgtcgcgaccacgcataccaaccgtaaatattcgcggcaaagaaaaacacctgtaatagcaggctggcatacagctgaatcgggaacagactgtgcggtgaagagagcagttgctcgcggatttcatcgaccccgagattagcgtcaacccagcttatttcaccgcgcggcgtcatgatcccgcgcagagaacgcgacgccagcgtcagtacgccgttaatcatgtaacgttcttcttcggcaaatgcaccttccgggatcggcatcggcatcgggttatcggcatcgtgctgaacattggcctgacgtttcccgcccatcaaacgcaggatggcatcggcagtacgcgctcgcagcggcaaagtcgactggtggcgaataaagttgcgacgcgcaatctggttaaacacttcgatgatgatcgagaagccaatcgcggcatacaggtaacctttcggaatgtggaaaccgaaaccttctgccaccagactcagaccaatcattaacaggaagctcagacagagcaccaccaccgtggggtgctggttaacgaatcgcgtcagcggtttggatgccagcaacataaccgccatcgcaatcactaccgccgccatcatcaccggcagatggttaaccat

SEQ ID NO: 143052 - DNA, 3273 bp, Homo sapiens
ttactttaagccttccgctgacagcgcgtcttgtacttccggacgttcagccatacgttgcataaatgctgcaatgtgctctaacccttccagattcagtttcaccgcgtatgcccagcgcagaaccgtaaacagataggcatcagcaattgtaaatctttgcccgcagatccagtgctcatccttcagtgcctcgttcacatattgcagcttcttctccagctgcgcgcgaactgtcggtttgtactcttccggtgtatcagggcgaaacagaggtgtgaaacctttatgcagctcggtggcgatgtaattcagccattcgatggttttatagcgggaaatactgtttaccggtgccagcaactggcggtcggggacgctgtcggcaagatactgcataatcgctacgccttccgtcagcaaagtaccgtcatccagcagcaatgcaggcacctgccccttagggttaacggcaaagtaatcgtcaccgttttcgagacgttttttcattaaatccacactgacgagggtaaaatcctttccgctctcacgcagggtgatatgggaagcgagagagcaggcacccggtttgtagaacaatttcatcggtaactccttttgtctgtggtttaaagtatggtagtgcgttgcaatcgcgcggaaacgctcggtgtcttcaacgtggatttgtgctttatgagtaacatccagaccggccatcaccaccgggatccctgactggaagacaatttctgccgcttccgggtcaacgtaaatattaaattcagccgcaggcgtccagttacccagccccatagcgccacccataatcacgatacgggcaattttgctatgcagttccggatggctattgagcagcaaggcaacgttagtttgcggtccggtagacacaatggtgacaggttccgcactttcacgcagcgttttcgccatcagctctaccgccgtacagttttgcggtgcgaatgtcggttccggtaatgccgggccgtcgagaccgctttcgccgtgcacattgtccgcgataatcaactcacgcattaacggttttaccgcgccgcctgctaccggaatatcggtgcgattaagcaaggtcagcatacgcagaacattgcgtaaggttttttctggtgtctggtttccggcggaagacgtaattgctttgacatcaagctctggtgaggcgagggcgagaactattgcgatagcgtcgtcatgacccttctcataaagatacccgattcccactttacggcaagcagcttgcatgcctgcagtgatcgtcaccgcgtatttgattcgcccctgacgctggagtaatggcacactggagaacggtacgctgtagctattgacgctgccgtccgcttctttgatttcaactaacaaatcaccgctcgacgacgtggaatagagatcactaatttcaaaagcaccaggcgatacataagtttggtaaatggtgtaaccattttgcttaatcgttatctgggcattgcttttggcgataccacgcaccacaggcgcaaaccctttcaggctgtctggcagcatgttgtcatctgacgccagctgcacaccacgaaagctgacactatcgaaaaaatcgcctgcagtataatcatcacctacggtcagttcgcctttcagaggcataaccgcccgttgcaaatagctgctgagattcttccattctgcggtttggccactactacgactccatgttgaattgttgcgcaatctccatgggcctaaattaacgccactgtttaaattcagaaaatagctgtcgccagaatcactgtctgcgctgctatgaatactgttagccccgctaaacgaatatcccagtaatagcgcgttgatcccttcatcccaacgttcagggggtacataaccacgggcattacttttgatggcgatttgcggtacagctcgttgctgccagatgatccaaccgagagtcatatcccatgccatgtattcgttatcgccgttttttgctctccgacgatctactaagtcaccgaaacgcttttccatgaataattcataggcttcgcgttcatctggctctacttccagagatacgagtgcgatttcataagcacggcgctcaatatcgtctcgaacctctaggctgctgattcgttctttgatttctttaatcagttctttattggtaaatgtggtcattatgctccagcctccggtgcttttggcattatccgataaatcgttaaaacgttccataaacatcccgtaggcatgacccggtgccagtggaatcacgttgaacatctctgttgccgggatgccttccagtacaggccagaaagagccatcatcaagcccgagatcacggcgttcggttgccagcataatgagatcggcatatttcactggcgtgctcataacaggaggtaacccgtatttctcacggattactgcatctattttttcttccatccgtttatagtcaggaagaaggcgtttcagtggttcgtggatgtcctggcaatacgcttctgttgcatcatgcattaatgccgcaattttattgacagttttcggatccagcaaacgctccgtacgggaacgaccgccttccacgaagtactcgacggaataaccacggctgaacagttcgccgagatactcccggaaaacggtggaataaagtttattgcctttaaacgtacggcgaataaagaacgcccccagacggcggaaaaatcgcccggcaggccagaaattcaggttgatcccggcggcgatatgcggcggcaccagccccccggtgggatcgcgataatccacagcgtgaatcttctgttgcagcaaaccgagcgccacggcgaaaccgtgaatggtggcggccggtgttggcgggcagccggggatccaaacatcaatggggacaatggtgtcgctaccgccccagacgctgtagagatcgtggaaaataccgccgccgacaccgcacgcgccgtaggaaacacaaattttatgatcgggggcagactcatacgcccgaagtgcaggcatacgcatcgcccgggtgactgcgccagtaaataacaaaatatcggcgtgacgcggtgatgaaacaaccttaatgccaaaacgttctgcgtcgaatactggtgtaatggcagcaaaaatttcgatttcacaggcgttgcagccgccgcaatcgacgcgataaacgtaagccgagcgacggatatcctgtagcaaatgccgcttcat

SEQ ID NO: 143053 - DNA, 1457 bp, Homo sapiens
gctgaactgccaccagcaaatgaaagtgttctgttatttgatgctaacggagaaggctggctgattggctggcgttctctctggtacacctggggacaaaaagaaaccggagaatggcagtggacatttcaggttggggaccttgaaaacgtcaatatcactcactgggcagtaatgccaaaagcaccggaggctggagcataatgaccacatttaccaataaagacctgattaaagaaatcaaagaacgaatcagcagcctagaggttcgagatgatattgagcgccgtgcttatgaaatcgcactcgtatctctggaagtagagccagatgaacgcgaagcctatgaattattcatggaaaagcgtttcggtgacttagtagatcgtcggagagcaaaaaacggcgataacgaatacatggcatgggatatgactctcggttggatcatctggcagcaacgagctgagcgtatttttattagtattacactgcgaaagacaccgcgctggcgcatgactggtcagaacgtcttgcggagcttaaaggtgctgcctttggtaatcccccgtacccgtggtaacccccagaccggcacgcctgccaccgatctggatgatgactactttgacatgttgcaggaggagctttgcagcgttgtggaggcctccggtgccagcctggagaaggggcggcatgaccagctgcttaccgcgcttcgtgcgctgctgttaagccgcaagaatccgtttggcgatatcaaattggacggcacggtgcaaaaggctctcgaaaaccttggtttgggagaagcggctaaaagaaatgtagggacaggggcgaatcagatacctgatatgggtagttttatgctttctgcttcagttcctggatatcaaaaattgccatccggtttaattattcaatgggggccaattgatgttccgctgacgtctcaggacacagtaacctattttccgattgcatttccgaatagatgtccgcgggtatttgcgactcaggattacactcccggcagtgcaaatgttggctatatagcttgtgccggttataaccaggacccggtgaaatttatttccagagcaggcgggtaccgagctagagtcgatcgaaagttcaaagaaggaagatacctgccgcggcattatacgctgcgtgctggcagagttgcgcaacaaagtggggatggtgatggccgtactgggatgcagggtcaggttcaggacgatatttaccagctttggttgcaaagccagcgccgattactgccgatgctcattcatcgtgatgaagcgatggctgaatgcctggcggctaagcaaccagtaggtgaatatcgcagtgatgcgctggcggctgaagagatactgacgctggcgaactggtgcctgttgaactactccgggctgaaaacgccagtcgggagtgcatcatga

SEQ ID NO: 143054 - DNA, 439 bp, Homo sapiens
atgcatacttttgaagtggctgccaggcatcagtccttcgccctgccggcagaggaattgtcgctgagccccagtgcggaaattcttgatatcaaaaatcaggagttatcgggaacgttaactctgtattcccggccctctatcgcccaatgctggttggtgcccgcattaggtgactttacacgccggtatccgtctatttcgctcaccgtgctcactggtaatgacaacgtcaatctgcaacgtgccggaatcgatttggcgatctactttgatgatgcgccgtcagcgcaactcactcatcactttctgatggatgaagaaatcctgccagtatgtagcccggaatacgctcaaagacatgctttaaccaacacggtaattaacctgtgtcactgtacgttgctccatgacagacaggcatggagcaacgactccg

SEQ ID NO: 143055 - DNA, 2808 bp, Homo sapiens
atggggaagcgaaatgttggacggatacttgtcgcaacccagttcgtggaacaatcactcgacgttgattttgattggttaattactcagcattgtcctgcagatttgcttttccaacgattgggccgtttacatcgccatcatcgcaaatatcgtcccgctggttttgagattcctgttgccaccattttgctgcctgatggcgagggttacggacgacatgagcatatttatagcaacgttagagtcatgtggcggacgcagcaacatattgaggagcttaatggagcatccttatttttccctgatgcttaccggcaatggctggatagcatttacgatgatgcggaaatggatgagccagaatgggtcggcaatggcatggataaatttgaaagcgccgagtgtgaaaaaaggttcaaggctcgcaaggtcctgcagtgggctgaagaatatagcttgcaggataacgatgaaaccattcttgcggtaacgagggatggggaaatgagcctgccattattgccttatgtacaaacgtcttcaggtaaacaactgctcgatggccaggtctacgaggacctaagtcatgaacagcagtcatcatccatccgcctccttcgctaccgtccgttcattaccaaaccccatcagtatggaccaatcattcaaggatgtagcagcgttgatcgatcccgaaagcagcgttaccagcaagtaaacgcccagagcggagagaaccgccagcagtgtcgctttgccaacatcacgtttattacgcgcacgcgcagaaacaaccacggcaccttccacaccaatgaaaacccacagggtgatcagcatggtgtttttcacctgttcccaaacgggtacgccaagtgcaagtccggtgaagtcgagcttgaaggtatccagtttgaacatcatcatcgccagcacaacaaacagacccagcggcaacaattttgccagtgtcgccaccaggtgacggtacacgccggtatccggtctatttcgctcaccgtgctcactggtaatgacaacgtcaatctgctacgtgccggaatcgatttggcgatctactttgatgatgcgccgtcagcgcaactcactcatcactttctgatggatgaagaaatcctgccagtatgtagcccggaatacgctcaaagacatgctttaaccgacacggtaattaacctgtgtcactgtacgttgctccatgacagacaggcatggagcaacgactccggtacggatgaatggcatagttgggcgcaacattatgcggttaatttgccgacatcttctggaattggctttgatcgttctgatttagctgttattgccgcgatgaatcatattggggtggcgatgggaagaaaacgcctggtacaaaaaaggcttgccagtggcgtctatccgccccgatgcgcttatccccgcacacatctgctggaaacatccacaacatctggggtgaacggggtaggcacgtatagcgcgccgttctggcggatgttgcttaacagctttgtgatggcgttcagcattacgctcggcaaaattaccgtctcgatgctctcggcatttgccattgtctggtttcgttttccgctacgtaacctcttcttctggatgatttttatcaccctgatgctgccggttgaagtacgtatcttcccgacggtggaagtcatcgccaacctgcagatgctcgacagctacgccggtttaacgctgccgctgatggcctcggcgaccgctactttcctgttccgccagttctttatgacgctgccggatgagctggtggaagccgcgcggatcgacggcgcatcgccaatgcgcttcttttgcgacatcgtttttccgctctccaaaactaatctggcggcgctgtttgtgatcacctttatctacggctggaatcagtatttgtggccgttgttgattattaccgatgtggatctcggcaccaccgtggcagggatcaaagggatgatcgctacaggcgaaggcaccacggaatggaactcagtgatggtggcgatgttgttaacgcttatccctccggtggtgattgttttagtgatgcagcgtgccttcgtgcgcggcctggtcgataatccagcggcaaactacattcactacggggtgcgtgaatctggcatgaccgctatcgccaacggcatcgcgcaccacggcggctttgtgccgtataccgcgacgttcctgatgtttgttgaatacgcccgtaacgccgcgcggatggcggcactgatgaaagcgcggcagattatggtttatacccacgactcaattggcctgggcgaagatggtccgacgcaccaggctgttgagcaactggccagcctgcgcttaacgccaaatttcagcacctggcgaccgtgcgatcaggtggaagcggcggtgggctggaagctggcggttgagcgccacaacggaccgacggcactgatcctctcaaggcagaatctggcccaggtggaacgtacgccggatcaggttaaagagattgctcgtggcggttatgtgctgaaagacagcggcggtaagccagatattattctgattgccaccggttcagagatggaaattaccctgcaagcggcagagaaattagcaggagaaggtcgcaatgtacgcgtagtttccctgccctcgaccgatattttcgacgcccaggatgaggaatatcgggagtcggtgttgccttctaacgttgcggctcgcgtggcggtggaagcaggtattgccgattactggtacaagtatgttggttga

SEQ ID NO: 143056 - DNA, 2835 bp, Homo sapiens; identical to SEQ ID NO: 135962

SEQ ID NO: 143057 - DNA, 4356 bp, Homo sapiens; identical to SEQ ID NO: 138520

SEQ ID NO: 143058 - DNA, 2367 bp, Homo sapiens
ctacactttcagtgccgcatattcatgagatcctgggggctcctgggtggtgtctgaagctgcctcagacagggcgctggtgcttagctcagcataggtcactccttgggggtctgccgtcgagagagataccctttccatattggataaatctgcctcggcagcctcctgctccggaagtttggaatggctggttcgagaaaatccttcactccccctctctccctttgcgttctctgagctcactgtgctggctgcatctgtagatgatgaagactgagaggaagaggagaaggatggagatgcagctgaagatggcgacaaagatggttctggtgtctccattgccttgtcctcttcaggatcactcccagaacctttgctctcagtcaatgtagaccctgggatgactccaggtctcaggacacttcgatgtctcactccatacaatggaaccgaatgtattgtaattgctcgatgcaggatgagcaggaggcagatgaggccaacggcaaaggcccagcacaggtaggtgaccgccaggcgtgggcggggcgggtagaagccatagaagagaggggaccattccaggtaaccctcacccgagagcaagttgaagagctgggtggcaaaggtgaccaggccctgggagtgggggttataggagccgcagggcgaggagatgtcggggccgggagggcctgggggagcgcctcccaaccaggtgggcagcagcgtcatgcaggccatgagcacagaggccagcacgttaagaaggagcaggaagcgcagcagggagaagtaggactccgtgccggcgccaaactggcgagcctgcggcggcagggatgcttcctgggcccctgagagtgcagagattcctggatccagagctgcggctgggcggctgcagctgcgcttgttgaaaacaggttgaggctcttggaaacacgggcttcgaccacgtttgagggtacggcgccaggacccgttaaactctcggggctctaagtgccagcgcttcgccaccgcaaccggcccccttccgcggcgccagcgcgcagggccccggtgcgccgcccagccggcaaccgtgcaatccacaagcagtgcctgctgctcccaccgcactcgcaccaacaccaccacccgggccagggccacgactcgccgctcgcgggcgtctaagaccaagaaccggtcgagcctgcacaacaagggcttgtataacggttccctgcctgaacctggtgccatggccaccatgctgctgctgtaagtcactctagaggatcccactttccagtctttggctgttaacggctgacgcgcctctttcttcaccggcgcatcaccatccaccagaccgccgccatcacgaatgtaatccagttcagctttgctgatacctttggtcaggcgcggcggctgataaaccttaaaccaaatcagcgaccagataatgccgataccaccagtgacaatgaacacccagtgccagctcaacatctcctgaatccagatcagcagcggcgtcagaaacgccagaccgacaaactgaccagacgtataaaaaccaacggcagaagcgcgttcatgttccgggaaccagctggtcaccatccggttattggtcgggaaagcaggcgcttcgaaaataccggttatcgcgcgcagaccaattaatgacattaagcccgtggcaaagccctggaataaagtcgccactgaccagccaaatatcgcaataaaataagtcacgcgagaacctacgcgatctaaaaaccaaccgccggggatctgacatagcgtataaagccaggcgaaggccgaaaatacatagcccatttccgctttggtaatgccgaactcttcctgaatatgggcggaagccacggccaggttggcgcggtcgacataacaaatgactaccgtaataaagatcatcaccagcgtcagataacgccgacgccccggctttgctgcattaacgggaatatccatagcgagctttctccagattttgggcatagcgaagccgctcaccatgccgctgttatcttcatgacgccagagcggattacgccagtccggggcatttttactgaactcaatcactttagcttcgtcgatttccacgcctaagcccggtttcgttaacggtttaaagaagccgccgaccatgctgaagtcttctttgtttttcacaaagtcgagtaactccgcgcctttgttgtaatgaattcccatactttgttcctgaagtacggcgttataggaaacaaagtcgatatgcaggcaagccgccagtgcaatcggtccgagcggacagtgcggcgcaagggtcacgtcataggcttctgccat

SEQ ID NO: 143059 - DNA, 1185 bp, Homo sapiens
atgacacaggatgaagttgctgtgacggaatgggactgttcacatgtgccatcgtacgaattcgcccaagttgaaaccatcaacgttgacagcaaaaccaacggacatggaacgaccattgccgtagacaactccccaaataaacggaacgcaacaagcctttcggcgcgcttattggcgcagtcgctggcggtgtttatcggccacaacgtcgggtctggcagcaattccgggaacgacggcaggtgcagttggcggcggagctggtacacgctaatatcgtcgctggataccctgaaccaggaaattcttgatatcaaaaatcaggagttatcgggaacgttagctctgtattcccggccctctatcgcccaatgctggttggtgcccgcattaggtgactttacacgccggtatccgtctatttcgctcaccgtgctcactggtaatgacaacgtcaatctgcaacgtgccggaatcgatttggcgatctactttgatgatgcgccgtcagcgcaactcactcatcactttctgatggatgaagaaatcctgccagtatgtagcccggaatacgctcaaagacatgctttaaccaacacggtaattaacctgtgtcactgtacgttgctccatgacagacaggcatggagcaacgactccggtacggatgaatggcatagttgggcgcaacattatgcggttaatttgccgacatcttctggaattggctttgatcgttctgatttagctgttattgccgcgatgaatcatattggggtggcgatgggaagaaaacgcctggtacaaaaaaggcttgccagtggtgagctcgtcgcgccgtttggcgatatgacggtgaaatgccatcagcattattacatcaccacattaccgggcaggcagtggccaaaaattgaagcgtttattatctggctaagagaacaggctagttatcttcgttctctcctcgtccgtgacatgaatcacccagtgccagctcaacatctcctgaatccagatcagcagcggcgtcagaaacgccagaccgacaaactgaccagacgtataaaaaccaacggcagaagcgcgttcatgttccgggaaccagctggtcaccatccggttattggtcgggaaagcaggcgcttcgaaaataccggttatcgcgcgcagaccaattaa

SEQ ID NO: 143060 - DNA, 769 bp, Homo sapiens
cgcccttatgtccttccgggtggcgggttctaatgctctgggcgccgttaggttatgtggaaagtgccctggaaatcggcccaacagtgtgaaggggcggttaatatttcatcggtggtagtcgcatcgggcagtgccggaactcacgccggactggctgttgggctggaacacctgatgcctgaaagcgaactgattggcgtgaccgtgtcgcgttccgttgccgatcaattgccgaaagtggttaacctacaacaggcgattgcgaaagaactggagctgaccgcatcagcggaaattttactctgggatgactattttgcacctggctacggcgtgccgaacgacgaaggcatggaagcagtgaaattgctggcgcggctggaaggcattctgcttgatcctgtgtataccggaaaagcgatggcggggctgattgacggtatcagtcagaaacgcttcaaagatgaagggccgattctgtttattcataccggcggtgcgcctgcgctgttcgcctatcatccccacgtttagctccggaaacgctcatgcaagaaagtatacaactggttattgattccttgccgttcctgctgaaaggggctgggtatacgctgcaactcagtatcggcggcatgttttttggcttactgctcgggtttattctcgcgctgatgcgtctgtcgccaatctggcccgtgcgctggctggcgcgtttttatatctctatttttcgtggtacaccgctcatcgcacaactgtatat

SEQ ID NO: 143061 - DNA, 1953 bp, Homo sapiens
atgttcaacgatttgttttatctcgtcaccgggatattgcggccactcatcgcggaattaaaaacggatctttgcgcaaggttttactgggagagcaagtttatccaggggctgttctttgctggtcagattaacggcactaccggttacgaagaagccgctgcgcaaggtttgctggccggtcttaacgctgcccgtctgtctgctgacaaagaaggttgggctccggcacgttctcaggcgtatctcggcgtactagttgatgacctgtgcactttaggaaccaaagaaccgtatcgtatgtttacttcgcgcgcagaatatcgtctgatgctacgcgaagataatgcggatctgcgtttgactgaaatcggtcgtgaactgggcctggtggatgacgaacgttgggcgcgctttaacgagaaacttgagaatatcgagcgtgagcgtcagcgtctgaaatcgacctgggtaaccccgtcggcggaagctgcagccgaagtgaatgctcacctgactgcgccgctttcccgtgaagccagtggtgaagatctgctgcgtcgtccggaaatgacttatgaaaaattaaccacgctgacgccgtttgcccctgcgttgacagacgaacaggcggcggaacaggttgagattcaggttaaatacgaaggttatatcgcgcgccagcaagatgagatcgaaaagcagctgcgtaacgagaacaccctgctacccgcgacactggattaccgccaggtatccggtctttctaacgaagtgatcgccaaacttaacgatcacaaaccagcctctatcggccaagttcgcgtatttctggcgtcacctgcggccatctccattctgctggtgtggctgaaaaaacggggcaacgcatcaagaacagtggaaattttcatcaaacgggatgacgtcacccccatggcaatgggcggcaataaattacgtaagctggaatttctcgcggcagatgctctgcgtgaaggtgccgatacgctgattactgccggggcgatccagtctaaccatgtgcggcagactgccgcagtcgctgccaaactcggtctgcactgcgtggcgctgctggaaaatcctattggcacaaccgcagaaaactatttaaccaacggcaatcgcttgttgctggatctgttcaatacccagattgaaatgtgcgacgcactgaccgatcccaatgcccaactggaagagctggcgacgcgagtcgaagcacaaggctttcgcccgtatgtcattccggttggcggttctaatgctcttggcgcgctaggttatgtggagagtgcgctggaaatcgcgcaacagtgtgaaggggcggttaatatttcatcggtgcttcgggatggcgatttgcggtcgtatgctggaacgcagggctttcgcgtcgggatcatcgcccagccggactggagcagcaaagacgactttatgcgtctgggtaaaccgaatctgtttttcggtgttactgctggcaacatggattcgatgatcaaccgttataccgccgatcgccgtttacgtcatgacgatgcctacacgccggataacgtcgcgggtaagcgcccggatcgcgccacactggtttatacccagcgttgtaaagaggcgtggaaagatgtaccggtgatcctcggcggtattgaggctagtctgcgccgtaccgcgcattatgattactggtccgataccgtgcgccgttccgtgctggtggattcgaaagccgacatgctgatgtttggtaacggtgagcgtccgctggtggaagtggcgcatcgtctggcgatgggcgagccaattagtgaaatccgcgatgtgcgtaataccgcgattatcgtgaaagaggcgctgcctggctggaacggcgtggattccaccgtcttgataccctggaaaaatcgacccatcccgcatccgtat

SEQ ID NO: 143062 - DNA, 1426 bp, Homo sapiens
atgaaactgatggccattcaggaacaggcgcgcggcgaacaatgcttccgtgattccgagtgggatttgcagttccacattcaggtcgctctggcgacgcagaactccgccctggcggctatcgtggaaaaaatgtggacccagcgtagtcataacccgtactggaaaaaactgcacgaacacattgattcccgtaccgtcgataactggtgtgatgaccacgatcaaatcctcaaggcgctgattcgcaaagatcctcatgctgctaagctggcaatgtggcagcatctggaaaacaccaagatcatgttatttaacgaaaccagcgacgacttcgagttcaatgccgaccgctatctattcgccgaaaacccggtggcgattgcgaaagaactggagctgaccgcatcagcggaaattttactctgggatgactattttgcacctggctacggcgtgccgaacgacgaaggcatggaagcagtgaaattgctgccgcggctggaaggcattctgcttgatcctgtgtataccggaaaagcgatgcgggggctgattgacggtatcagtcagaaacgcttcaaagatgaagggccgattctgtttattcatacccggcggtgcgcctgcgctgttcgcctatcatccccacgtttagctccggaaacgctcatgcaagaaagtatacaactggttattgattccttgccgttcctgctgaaaggggctgggtatacgctgcaactcagtatcggcggcatgttttttggcttactgctcgggtttattctcgcgctgatgcgtctgtcgccaatctggcccgtgcgctggctggcgcgtttttatatctctatttttcgtggtacgccgctcatcgcacaactgtttatgatctattacggcctgccgcagtttggtatcgaattagatcccattccgtcagcaatgattggtctgtcgttgaacactgccgcctatgctgccgaaacgctgcgcgccgccatttcttctattgataaaggtcagtgggaagcggcagccagtattggtatgacgccgtggcagaccatgcgtcgcgcgattttgccacaggcggcgcgtgtggcgttgccgccgctgtcgaacagctttattagcctggtaaaagatacgtcgctggccgcgacaatccaggtgccggagctgttccgtcaggcgcagttgattacctcgcgtacgctggaggtgttcaccatgtatctggcggcttcgctcatctactggatcatggcgactgtgttatcgacgttgcatctgacaaatggcagcgcattagctgggaagaagcattctccccaacgaaaccgggatgctgacccagaaatttgcccgctccctcgggatgctggcggtagacaaccaggcgcgcgtctgacacggaccaacg

SEQ ID NO: 143063 - DNA, 2786 bp, Homo sapiens
aaccagaccggtggctacaacgacgaaatcgaaggcaagctgaaaggcatcctcgattccttcaaagcaacccaatcctggtaacgtctggcggcttgccttagggcaggccgcaaggcattgaggagaagctcatggccggcgcaaaagagatacgtagtaagatcgcaagcgtccagaacacgcaaaagatcactaaagcgatgtagatggtcgccgcttccaaaatgcgtaaatcgcaggatcgcatggcggccagccgtccttatgcagaaaccatgcgcaaagtgattggtcaccttgcacacggtaatctggaatataagcacccttacctggaagaccgcgacgttaaacgcgtgggctacctggtggtgtcgaccgaccgtggtttgtgcggtggtttgaacattaacctgttcaaaaaactgctggcggaaatgaagacctggaccgacaaaggcgttcaatgcgacctcgcaatgatcggctcgaaaggcgtgtcgttcttcaactccgtgggcggcaatgttgttgcccaggtcaccggcatgggggataacccttccctgtccgaactgatcggtccggtaaaagtgatgttgcaggcctacgacgaaggccgtctggacaagctttacattgtcagcaacaaatttattaacaccatgtctcaggttccgaccatcagccagctgctgccgttaccggcatcagatgatgatgatctgaaacataaatcctgggattacctgtacgaacccgatccgaaggcgttgctggagcagtgcagctgcatgcttaggtcaccggcatgggggataaccagtacagatacaactcgagctcgtaccgacttggcatgtcccatctggcttcttttagatccctaccccaagcttatgggtaatgcgccaaaagcgctggcgtctgtcgataaacgtggtgtaccagtaaataccattctggtgtctgcactggtaacggcgttgtgcgtactgattaactaccttgccccagagtccgctttcggactgttaatggcgctggtggtatctgcactggtaatcaactgggcgatgattagcctggcgcatatgaaattccgtcgcgccaagcaggaacaaggcgtggtaactcgcttccctgctctgctttatccgctgggtaactggatctgcctgctgtttatggcggcggtactggtgattatgctgatgaccccaggaatggcgatttcggtatacctgatcccgcccttacaaaccaacaccttcaactccacgaccattgcgatggcggattaccagatggaatccctgtcggcggaaatcaactttgcggcggcgaaactggcgcgagcttgtgctgacgagtggaccgcgcgcacgccagagaaaccgcgctacgttgccggtgttctcggcccgaccaaccgcacggcgtctatttctccggacgtcaacgatccggcatttcgtaatatcacttttgacgggctggtggcggcttatcgagagtccaccaaagcgctggtggaaggtggcgcggatctgatcctgattgaaaccgttttcgacacccttaacgccaaagcggcggtatttgcggtgaaaacggagtttgaagcgctgggcgttgagctgccgattatgatctccggcaccatcaccgacgcctccgggcgcacgctctccgggcagaccaccgaagcattttacaactcattgcgccacgccgaagctctgacctttggcctgaactgtgcgctggggcccgatgaactgcgccagtacgtgcaggagctgtcacggattgcggaatgctacgtcaccgcgcacccgaacgccgggctacccaacgcctttggtgagtacgatctcgacgccgacacgatggcaaaacagatacgtgaatgggcgcaagcgggttttctcaatatcgtccgcggctgctgtggcaccacgccacaacatattgcggagatgagtcctggccgtaaaaggttaacgcgcgcagaatcgagctcggtaccctcgacgctgccgggtaaagcctggctggaacatgcactgccgctaattgctgaacagttgcaggtcgccgctcagcggtgtttattccctttcgctggcgtaacgcagacctgggatgattacacagcgaaaacggctgcggttctcgctccgctgggtgtttctgtcaccggtattcatagcgttgtcgatcccgttgccgcgattgaaaatgctgagatcgtgattgtcggcggggggaatactttccagttggctgaaacagtggccgcgaagcgcgggctggtggcaccaattactggacgtgggcggcaggggctaaacttggttggccaaatattcgtaccaacaacgatatgccgattgtcgatccgcaagggtttcgatggcgctaaatctgttcccgctggcaaatcaacccggcacttcaccaacgcgctggcggaagggcataaaggtgaaacccgtgagcagcggtattcgcgaactggtggtcgtcgcgcccgaactgacgattattggtctaccggaaggttactggatcacggaaaaacattaaccgtaaaaggtaattatgtctataatggtcatttacgcaccgtattagtgatgaaatcggacggagatagtagtatacttcgggttcctagctatgtgaaaaatgctggaggaagcggcgcggccacgctaaacgggatcgaactcataactgtgaatggcgatgaatctccagcagatgccttcagatga

SEQ ID NO: 143064 - DNA, 1709 bp, Homo sapiens
atgaatggcacatttgttaccttgtgcgcattgccggatgcgatgctggcgcatcttatccggcctacgggtgccgataccatttccagcgccagcgttgccgctgccagagctagtgatttccgactgatcgtatgccggagccacttccactacgtccatacccaacaatgttagagatctttcaggccgcgtaccactttaatagcgcgatcggaggtcaggccgccaatcactggcgtaccggtgcctggtgcaaaagcaggatccagtcagtcgatatcgaaagtcaggtcaaccggcatatcacccacaatctgtatcacttgggcgataacgtcatccacgctgcgatccctacggcttctgcccgtttaccgctgacgctgatgacgcttgatgactgggcgcttgccaccattactggcgcggacagcgaaaaatatatgcagggtcaggtgacagcagatgtcagccagatggcagaagatcagcacctgctcgccgcccattgcgacgccaaaggtaaaatgtggagcaatttacgtctgttccgcgacggcgatggctttgcatggattgaacggcgcagcgtgcgtgaaccgcagctgactgaactgaaaaaatatgcggtattctctaaagtgaccatcgcgccagacgacgagcgtgtgctgcttggtgttgccggttttcaggcgcgcgccgcgctggcaaatctctttagcgaactgccttcgaaagaaaaacaggtagtcaaagaaggcgcgaccactttgctatggtttgaacacccggcagaacgtttcctgatcgtaaccgatgaagctactgctaatatgctgaccgataaatctgcgcgatcagattacaacctgtacgccaatactatcaccgtaactaacggcggtgtattggatgtgaacgttgatcagttcgatactgaagctttccgtactgacaaactggaactgaccagcggcaacatcgctgaccataacggtaacgtagtatctggtgtgttcgatatccatagcagcgattacgttctgaacgctgatctggtgaacgaccgtacctgggatacttccaagtctaactacggttacggtattgttgctatgaactctgatggtcacctgactatcaacggtaacggcgacgtagacaacggtactgaactggataacagctctgtagacaatgttgttgctgcaaccggtaactacaaagttcgtatcgacgacgcaactggcgctggcgctatcgctgattaccaagatccagaaattatctacggtaaaacggacgctcccaccaggcaaacgccgaacttctctggtgctacacagtcacccccaccggcttgccagaagataacggcaatcaatgcccaaacgaaggccgagagaaaaaacccgatcactgaaccggagtttgcctctgatattgtcgatcgttatgccgatcatattttttacggcagcggtgccacggggatggctctggttgttatcgacggtaaccagcgcgtctttcgcagttatggcgaaacgcgacctggttatgacccgcgagatgctggtgaaattgtcccccccgggggccccgaagttttaactggccgcaacatcatcgcccgaccacctttatgcccgttgatttcaccctcgaagcccatgaagacggtgcacagacggtgtgggtag

SEQ ID NO: 143065 - DNA, 2800 bp, Homo sapiens
atggcagaagatcagcacctgctcgccgcccattgcgacgccaaaggtaaaatgtggagcaatttacgtctgttccgcgacggcgatggctttgcatggattgaacggcgcagcgtgcgtgaaccgcagctgactgaactgaaaaaatatgcggtattctctaaagtgaccatcgcgccagacgacgagcgtgtgctgcttggtgttgccggttttcaggcgcgcgccgcgctggcaaatctctttagcgaactgccttcgaaagaaaaacaggtagtcaaagaaggcgcgaccactttgctatggtttgaacacccggcagaacgtttcctgatcgtaaccgatgaagctactgctaatatgctgaccgataaactgcgcggtgaagcggaactgtgggcaactggtatgagtgctggacccttcgctattgcaaggcgaagtggtatcagacggtccgttaagcccggccgaaatgaccatggaagtggcgcagctgctgcgcgatgctggcccgtgggggcagatgttcccggagccgctgtttgacggtcatttccgtctgctgcaacagcggctggtgggcgaacgtcatttgaaggtgatggtcgaaccggtcggcggcggtccactgctggatggtattgcttttaatgtcgataccgccctctggccggataacggcgtgcgcgaagtgcaactggcttataagctcgatatcaacgagacctcacggaacgctccgacgttcttagggggtatctttgactacgacgccaagaaagagcgtctggaagaagtaaacgccgagctggaacagccggatgtctggaacgaacccgaacgcgcacaggcgctgggtaaagagcgttcctccctcgaagccgttgtcgacaccctcgaccaaatgaaacaggggctggaagatgtctttagagcttcctcgttgtggtttggcgccctggttttggtgaagaaaccaacgatacgctgcaggacgggacgggaaattttcatcaaacgggatgacgtcacccccatggcaatgggcggcaataaattacgtaagctggaatttctcgcggcagatgctctgcgtgaaggtgccgatacgctgattactgccggggcgatccagtctaaccatgtgcggcagactgccgcagtcgctgccaaactcggtctgcactgcgtggcgctgctggaaaatcctattggcacaaccgcagaaaactatttaaccaacggcaatcgcttgttgctggatctgttcaatacccagatagaaatgtgcgacgcactgaccgatcccaatgcccaactggaagagctggcgacgcgagtcgaagcacaaggctttcgcccgtatgtcattccggttggcggttctaatgctcttggcgcgctaggttatgtggagagtgcgctggaaatcgcgcaacagtgtgaaggggcggttaatatttcatcggtggtagtcgcatcgggcagtgccggaactcacgccggactggctgttgggctggaacacctgatgcctgaaagcgaactgattggcgtgaccgtgtcgcgttccgttgccgatcaattgccgaaagtggttaacctacaacaggcgattgcgaaagaactggagctgaccgcatcagcggaaattttactctgggatgactattttgcacctggctacggcgtgccgaacgacgaaggcatggaagcagtgaaattgctggcgcggctggaaggcattctgcttgatcctgtgtataccggaaaagcgatggcggggctgattgacggtatcagtcagaaacgcttcaaagatgaagggccgattctgtttattcataccggcgctccggaaacgctcatgcaagaaagtatacaactggttattgattccttgccgttcctgctgaaaggggctgggtatacgctgcaactcagtatcggcggcatgttttttggcttactgctcgggtttattctcgcgctgatgcgtctgtcgccaatctggcccgtgcgctggctggcgcgtttttatatctctatttttcgtggtacgccgctcatcgcacaactgtttatgatctattacggcctgccgcagtttggtatcgaattagtcccattccgtcagcaaaagtgtgctgcgccagaccgacaaaaaacgccaccagcaggaagatttcaccccataccacaggggatttccattacggtgtacaaactgcgcttccgtgggattctgttcgcagcagaacgtggttacctggcggatgttgaactgtcgaaaattggcagcttcgaagccgctctgctggcttacgtcgaccgtgatcacgctccgttgatgcaagagatcaaccagaccggtggctacaacgacgaaatcgaaggcaagctgaaaggcatcctcgattccttcaaagcaacccaatcctggccgcaaggcattgaggagaagctcatggccggcgcaaaagagatacgtagtaagatcgcaagcgtccagaacacgcaaaagatcactaaagcgatggagatggtcgccgcttccaaaatgcgtaaatcgcaggatcgcatggcggccagccgtccttatgcagaaaccatgcgcaaagtgattggtcaccttgcacacgtgatgcggccgcggggaaaagggggtttaattgtgcaaagtactaaaatgggaaacaccgagaatgacgcggaagagccggagaagaagaagaggaaagttgaagagatattaccgctacgccaccgaagcctgttggctggggcccgaagctga

SEQ ID NO: 143066 - DNA, 423 bp, Homo sapiens
cgtttatccggcatacatgatctctgcaatatattgaatttgcgtgattatgtaggccggataaggcgttcacgccgcatccggcatgaacaaagcgcattttgtcagcaatctaaccctcttcttttaaagagggtattgatcactctgccacttttttcttcgccgcacgcttcgctttggtcgctgcagctattttctgcgttttcgccgatggctttttcgcttttctcgcgtctttcttcgccgctttcggcttcgtttttttctcaccgcggaaggcgctgtctggctcaaagtttacctttttaccgacctgacgacgcttgccgccttttttacctgcatcgccttttttcgctttctcgcgcgccgttttaccgacgttgcgcggtgcgcgttcgctggagatcctctagagcg

SEQ ID NO: 143067 - DNA, 1431 bp, Homo sapiens; identical to SEQ ID NO: 132019

SEQ ID NO: 143068 - DNA, 1172 bp, Homo sapiens
atgacggatttctctaaacacatgcgcggcgtaaatgtggttgctctgtacggcggccagcgttatgacgtgcaattacgcgccctgcgtcaggggccgcagatcgttgtcggtactccgggccgtctgctggaccacctgaaacgtggcactctggacctctctaaactgagcggtctggttctggatgaagctgacgaaatgctgcgcatgggcttcatcgaagacgttgaaaccattatggcgcagatcccggaaggtcatcagaccgctctgttctctgcaaccatgccggaagcgattcgtcgcattacccgccgctttatgaaagagccgcaggaagtgcgcattcagtccagcgtgactacccgtcctgacatcagccagagctactggactgtctggggtatgcgcaaaaacgaagcactggtacgtttcctggaagcggaagattttgatgcggcgattatcttcgttcgtaccaaaaacgcgactctggaagtggctgaagctcttgagcgtaacggctacaacagcgccgcgctgaacggtgacataaacaacgagtacattaatgagcgaaatgatttacggcatccacgcagtgcaggccctgctggagcgcgcccctgaacgttttcaggaagtctttattttaaaaggccgtgaagataaacgtctgttaccgctgattcacgcccttgagtctcagggcgtggttatccagttggcaaaccgccaatatctcgacgagaaaagcgacggtgccgtgcatcagggcattatcgcccgcgtgaagccaggacgtcagtatcaggaaaacgatctgccggatctgatcgcttcgctcgatcaaccgttcctgctgatcctcgacggcgtaaccgatccgcacaacctcggcgcgtgcctgcgtatgcggacgccgcagcttcatgcggtgattgtgccgaaagatcgctccgcacagctcaacgctacggcgaaaaaagtagcctgcggcgcggcagaaagcgttccgctgattcgggtgactaaccttgcgcgcaccatgcgtatgttgcaggaagagaatatctggatcgtcggtacggcaggcgaggcggatcatacactctatcagagcaaaatgaccggatcgctggcgctggtgatggggtcggaaagtgaag

SEQ ID NO: 143069 - DNA, 1218 bp, Homo sapiens
atggacgagcgcaaaatcgactttagcctgatctccagcgaacgcgcaccgcgcaacgtcggtaaaacggcgcgcgagaaagcgaaaaaaggcgatgcaggtaaaaaaggcggcaagcgtcgtcaggtcggtaaaaaggtaaactttgagccagacagcgccttccgcgtgcaggccctgctggagcgcgcccctgaacgttttcaggaagtctttattttaaaaggccgtgaagataaacgtctgttaccgctgattcacgcccttgagtctcagggcgtggttatccagttggcaaaccgccaatatctcgacgagaaaagcgacggtgccgtgcatcagggcattatcgcccgcgtgaagccaggacaaaaaccaaaaagcagtcgcttcgcgaatcgccacaacttcaacgttgaatttcaggttctgaccggccagcatgtggttaccatcaaccacgacgtgatcgtcttcaaccgcagtgatttcaaccggtaccggaccctggtcggtttcagccaggaaacgcatacctacctgcagttcatcaacgcccataaatacgtctttaggaacacgttgcaccaggttttcgtcgtactgaccgtaagcgtcgttcgcgccaacagcgacatcaaatttgtcgccaacttcatgaccttccagcgccgtttccaggccagagatcagggaaccgtgaccatgcaggctgtgcggctccgtggttaccgtggcaacagacggcaacaactcgggcggcgcatggaaagtgcgggcggcttcaaactgggtatggagcccctcaacggcggcgggaggatccccgatttgcttggcggccaaatccagaccgcctcacgcagccaggcactatttgaagctattcgcgattatatcgacgaacgctatgcctccgggcttacccgcgaatctgttgcacaggcgttttatatttcgccaaattacctctcgcacctgtttcaaaaaacgggggccattggttttaacgaatacctgaatcacacgcgactggagcacgctaagacgttattgaaaggctatgacctgaaggtaaaagaagtggcgcacgcctgcggctttgtcgacagcaactacttctgccgtctgtttcgtaaaaacaccgaacgctcgccgtcggaatatcgccggcagtaccacagccaactgacagaaaaaccgactactccagaataa

SEQ ID NO: 143070 - DNA, 864 bp, Homo sapiens
ttaatcttcaatcaccaataccctttcttccacttgattgaatcggctattgaagcttgtgcatgcatcacaaagttctcgtgccatggttttcagctccatcaggtcatttatgttcttctctacactgtttattctagttagacgacagttttcaaggtaaacaatcatgttgtcagcaaacagtgacagtttgacttcctctttaccaatttggttgctctttatttctttctcttgtctgactgctctggctaggacttctagtactgtgttgaagaggagtggtgagagtgggcatccttgtcttgttccagttttcagagggaatactttcaacttttccccattcagtattatgttggctgtgggaggagtgctccactgtgaaatcaactgccgcatctgttccacaggacgatccgcaaacccgccgcttgattcatgtattttataagctaggatctgataccatagggatccattgagggggtggccagaaggaagacgggtaaaactccacagggagaaggaaatctctagctgaactgtgtaacaattcgaacaggacaagacatccgggatgcacactccttttgtcagttcgacttgcggcgaccagcgtgctgcgttcatttgcgcaagcagagttaagctgaatatttcaaccagaatgcgatgggtggtgtagatagcaatggtgttggagccaatcacattcagcaggctggtggagcgcataccgaatcgttgctcgtattgataaaacagcttcatgatcaccacaatcgataccagcgacaacagcagcgagatagtaaacaaccaggcaccgaccgccagaacggtaagcaaagaagccat

SEQ ID NO: 143071 - DNA, 1875 bp, Homo sapiens
atgttcggcattagcgccaaaccgataaacgccatttatcttgcacgtaaattactgcgttatatgagagaacttgaaaactttcccgttgatacccaagttccagagcaagtttgccactggcgatatcgcccacaccttgctgaccggcgtaggcgtaatgacatcaacgctgtgtttggttacgacgactctgtgccactgctcaatctgtacaatccggtgaataccgatttcgacttcattgccaaagatccggcaaactcggccccttaccgcattctgaataaacagaaacaaacgggcgtttatgtcaaggatcaggcgcagtgggataaagtgctggtcaccctaggcggtcgttatgactgggcagatcaagaatctcttaaccgcgttgccgggacgaccgataaacgtgatgacaaacagtttacctggcgtggtggtgttaactacctgtttgataatggtgtaacaccttacttcagctatagcgaatcgtttgaaccttcttcgcaagttgggaaggatggtaatattttcgcaccgtctaaaggtaagcagtatgaagtcggcgtgaaatatgtaccggaagatcgtccgattgtagttactggtgccgtgtataatctcactaaaaccaacaacctgatggcggaccctgagggttccttcttctcggttgaaggtggcgagatccgcgcacgtggcgtagaaatcgaagcgaaagcggcgctgtcggcgagtgttaacgtagtcggttcttatacttacaccgatgcggaatacaccaccgatactacctataaaggcaatacgcctgcacaggtgccaaaacacatggcttcgttgtgggctgactacaccttctttgacggtccgctttcaggtctgacgctgggcaccggtggtcgttatactggctccagttatggtgatccggctaactcctttaaagtgggaagttatacggtcgtggatgcgttaggcttgtctacttttggtggattatccctaatacccaacagaagcatgttggtgctgtgcattagcatggcagtgctgggattgttcctcggtatagaagtacagaaacggcgactgtgctcgatgggggcactggccagcaccataaatattatcgtgctggataacccgatgactttccatttcagtcagtttctcgacagcgcattagggcaaatcgtcggctgtgtgctcgcgttcaccgttattttgctggtgcgggataaatcgcgcgacaggaccggacgtgtactgcttaatcagtttgtttctgccgctgtttccgcgatgactaccaatgtggcacgtcgtaaagagaaccacctcccggcactttatcagcagctgtttttgctgatgaataagttcccaggggatttgccgaaatttcgcctggcgctgacgatgattatcgcgcaaaagcgcctgcgtgatgcaccgatcccggttaacgaggatttatcggcgtttcaccgacaaatgcgccgcacagcagaccatgtgatatctgcccgtagcgatgataaacgtcgtcggtactttggccagttgctggaagaactggaaatctaccaggaaaagacgcatctgggaagcgccaccgcaggtgacggaaccggtaaatcggctggcgaccgcgtgacgtcggaaattccccttccaagcgttccacaacttcatgatcaccacaatcgataccagcgacaacagcagcgagatagtaaacaaccaggcaccgaccgccagaacggtaagcaaagaagccatcagcagatggcggcgcaacggcacctctttaacacaggtcattattgttgcgccaaaccaggggatcctctagagtga

SEQ ID NO: 143072 - DNA, 4401 bp, Homo sapiens
tcaacagcaagggttcttcttcagtccacggatacgcccttgcaaatcagccgtaatatttttcgctgtcaccagattaatccttcggcaattcgcaacgtaacgggaccgcgagtccccagatgccaggcccatcggcaaaacggaaaggcaggacaaaatcgacaccgttaacctgatatctggcatccaggcactaccgcctttcaacacgccgtgtcctcccgcgggaatcccgaaccgggccaatctcaccagcatgtaaatccctttaaagaggaaataggtaggatcgcgcccatcgacgctaaattttaggttgatggcggtaacacactgccgccagtgaacagcgtttgcacccgggtaccagtgacagcggcgcgcgtcttgtcctgcgacatcgccaggtggcattgcatacgcgtgtaaaactccctttccccagtagcgccaggccagctccagcgaccatcgcttacggtcattgttgacgagtaatttgccacggcaaatcgagcaacggatcgccgttacccgtgccagcacgatcaattgcccgctattttcctgccagtccagctcgcatccaccagtgacggttcctgcggcaagtttaacgtcgcagtagcatcccacatatgcgtcgaagccacctagcgccgtggaacatatagtgggtagaactgtagatgttgcacaataccggacgagcataggccgaaatggtcgaaggaatgagacaaccgatgatctcaagtagcgctggagactgatgtgcccaacggagagagagggtccatggagggcacacgagccactctctccaagtgctccaggcccgtcgttatgggcaaaaggtgcataagctgacgctgcaggcggttttagctgccctaaccgtgacggtaccatcgggcgtggtggctcacattctgtaatgttgcctcgtttgccgatgaagcgcagcagcatcgtccattgccgagcaaccgcccggactgcgtgccggatgcggtgctggactgctttgcgaatataaggaccagggttacgaagtgtggctggagctgggccggtcagccaggattcactttccagccggtcgagcatctgcaccagcaccggcgggaacacccactgccaccgtcttcgccgccggactgctgaagggtatgcgccaggctcggcgctgcgttttcgccagctcaccggtggcggtttcaaccctgatgatggcgtgaagctccccggctgataaatcgtctggatgcgggttctgtcgtctgtatcgtggtcaggcggtcgccgtcccagccgtaccaggtcattgggtttccgtgacagcgacatccagcccgtcaggtcccgttcacgtcgcccacccgttttgccaccctgcggcccagcgggtcgtaaagatagcggcttcgaccagcggctctgcatattgtgtccgcgtgtagtgcaccagccggtgtgactgtcgtaatggtaccggtgggtgcgctcatcatccgtgcggataacccttccgggatgaggtcggttttctccgtcagcgggcgatacggttatccggccacatctgagggtgctgtccgggtgcagctccgggtcgggcaggcggttacctgcgggtttaatacaaaactttagcggtatggtgtttctcgatttttcaatcaataacctgacactgatggcgttactatcgccaccggattcgtggtcgatgacgccatcgtggtgatcgaaaaatttcccgctgggtgccacagttgatggaaaaactccagcaactgcacagctttctgatgtctccagcgactggcaggacaaagggctggtggctatgtcaatgttgatcgcgacagcgccagccgtccggaagacgacatgcagatggtcaggatagtagacgagggaatgcggcaagacgacgacccaaaagtagcggcaaacaccagacctgcgtccacgtcgtcgcttgtcccagatcttcacatagaatgcagactgcgctacgaccacggtatctccacgagcctcgcgcatacagccgggcagtgacgtcatcgctgcgcggaaatggacgaacagtggggatacgtcggggctaaatcgcgcagcgctggctgttttacgcgtatgacaggctccggaagacggttgttgccacgtattcggtgaacgcacctttgacgtggtgatatggatgacggatggctggccgctgatgaatcccgcctgaagggaaagctgcacgtaatcagcaagcgatataccagcgaattgagcggtataacctgaatctgaggcagcacctggcacggcgggacggaagtcgctgtcgttctcaaaatcggtggaggttccaggcgctaaagtttgccagttggatccagccctgccagtccgcgtgcgtagccgcacttcatgccggaggctttcagtttcgcggcatagtcgccagatcctgccagcgtttacggcgggctgttccgggtctaatcctgcttcttgaaggcgtctttgtcgtaatagagaacgggggtcgagctgttgatggctgggagagtaagtggcccgttttgctgtcggagtagtaacccagtaggcctgataagcgcagccaatcaggcagggatcctctagagtcactgacgcatgagctgctgctcggacgatgttgcgcgtggcggaacgcccagcgaggctggtatccctgatggcgttttcaatgtcgtcaccgggcaggtgctgttgcacagataaccctttggtttctcgtgcgcactgcgacaaagtgtgttcattcctccacgatgcgcaggcacagcaagcagagctgattcgcgggtcgaatggaccgccggagaggggtattatgttgcgccaacgctggtggtaaatcccgatgtaaattgcgcttaactcgtgaagaggtgtttggtccggtggtaaaccgtttggtgggatgaagcagtcaggaacgggcgtgattttggccccgactggctggacggttggtgtgaaactaagtcggcgcagatcatcttgcgcggaccgccaattttgggaagcgcttacgcagcgcgtcgtcacatcagacgtgtcatccaccgacagcgtgatctgggtcataaaggaagcttctcttcgtttttgaccgtcagtttccacacatcgtccggcgattgaccagatacattcccccttccgggttactgtactggcccattgtccctccacttccgggtgcccggcgtgaccgatgagaatagattcttcgccacgcgactggcgcgggcgacttccatatgcacacggcgactgggcatcagggcaatcgccaaaagggtcatcgccatggtccttgctcactgcgcaccggcagatggcactctgtttccagtacgtgacgaccggcatcatgcctttgcagatgtccttatcaataacgcgtatatcgtctcgacaaccagcaagagaacatctggcctcgggcaccactgctacagtggtggtcactggcaaacagatcgcgacgaagccaggattcgttccttcacgtaaaatggcccatcgcctgcgtgagctatggttaatcacgatgggtattttctccattgctaaccaacatattcgcttccggtaaaactggcgaccgccattgtactggcgctgtttgttggctttacttccagctggaaacgccatcgctgggcggtactgacagcggcgattgtgccgccggtccggcctttgcacggcgctaccaggcatgcgcagcaacctgaatatggaatcttccgctgggcgcgggccatcgacgttaaaagcatcggccaggcttattctcaagacgctctgagctgctcgttcggctatggcgtaggcctcggtgaatcgcagaatccgggacccataaggttgttttaacaaccggttccttgccgcccaaaagtccctttcgttaattgtctgatatcgcagaaatgtctcaatgacggtggcctgggctacaggtaccaggcccgctgatggcggtccggcacggatgatgtcgccaaacgctgactgggcacccgtactgccattcgccagaacgcagctactctgtggtatcacgccaatactcccaacgcacggctcagcaggtctataacggccttgccggaatgtggcgggaagcggcggctttgttggtgatacgctgctggtaacggtgtacaaagcccgtacgttgaagtctcgcgtggctgggtgcgctgcgactgctgaacgcgtcgaactctcgtcgctatcaacgggcgagcgccgagagttctggtggatatgagcaacggcgatgaagtgtcgatcacctgtggcgattggcggtacgggaatacacat

SEQ ID NO: 143073 - DNA, 2475 bp, Homo sapiens
atgagcgccgaaatcaccgcgccgtggtatcggctacagctggacttgttcacgaaactggtcgctacctgcatggagcagtttcgcccgaagaccatcccaccgctggcgatccctgaacgtttgaatgcgcattgtgaagagttgtatgagcttatcgcctcgttaaacaacattctcaatctctacatgcctgccgggcaggaggcagagcaccgttttgcgatgggcgaactgccagatgaagtgctggagatctgccagcggctggcaaaactcaccgagatgctgcgtggcctggcggagttatttcttaacgatttaagtgagaaaaccggcagccatgacattgtacgtctgcatcggttgattttgcagatgaaccgcgcgttggggatgttcgaggcgcaaagcaaactctggcggctggcttcgctggcgcaatcttccggtgcaccggtgaccaaatgggcgacgcgggaagagcgcgaagggcagctacacctctggtttcactgcgtgggaatacgtgtcagcgatcagctggaaaggctgctgtggcgcagtattccgcacattattgtcacctccgcaaccttgcgttcgctgaacagtttttcgcgtttgcaggagatgagtggtctgaaagagaaagcgggcgaccgttttgtggcgctggattccccctttaaccactgcgaacagggcaaaattgttattccccggatgcgcgttgagccttccatcgacaacgaagagcagcatattgccgaaatggcggcctttttccgtaagcaggtggagagcaaaaaacatctcggtatgttggtactgtttgccagcggacgggcgatgcagcgctttctcgactatgtgacggatttacgtctgatgttgctggttcagggcgatcagccgcgttaccgtttagttgaactgcaccgcaaacgcgtcgccaacggtgagcgcagcgtgctggtgggcttacagtcatttgccgaagggcttgatttgaaaggtgatctgctcagccaggtgcatatccacaaaatcgcttttccgcccatcgacagcccggtggtgatcaccgaaggggaatggctgaaaagcctcaaccgctatccgtttgaggtgcaaagcctgccgagcgcctcgtttaacctgattcagcaggttgggcgactgattcgaagccacggttgctggggcgaagtggttatctacgacaggtacagagctcgatttgtggtgcgatggttcggacggtttacacatatgcagttcaactggggcatcgagagcgtctgttctggggccaccgggattaacgtcatggccatctggcgcgcgttattacaggtacttcaacacggcgatccacgtcgcgtggcgtgggatgatactacgcatgacttccccagcgtgactggcgatacccgctcgttgcgcccgttaggtcaaattctgctggaaaatcaggtcatcactgaaggactactcgatacagcactgcgtaatcgcgtcgaaggtctacgcctgggcggttcaatgctgatgcaggggctgattagcgccgagcagctggcacaggcgctggcagagcgatacggcgtggcgtgggaatccatcgatgcctggcagatcccttcctcgctgattgccgataatgccggcctccgtggcgctgcattatgcgcatcagtggctcacggatacagcaggcacggtgaaatctggcggcaatatgtgccgcatcagttcctgttcgccgaaataatgaccacgctcagtcatataatcgttaaaaccgctttcaagaaagcaggattagacccggaccagccgccgaaaacctggcaggatctggcggactatgccgcgaaactgaaagcctccggcatgaagtgcggttacgccagcggctggcagggctggatccaactggaaaactttagcgcctggaacggtctgccgtttgccagcaaaaacaacggctttgacggcacggacgcggtgctggagttcaataagccggagcaggtgaaacacatcgccatgctcgaggagatgaacaagaagggcgacttcagctacgtcggtcgtaaggatgaatccaccgagaagttctataacggtgattgcgcgatgaccaccgcctcttccggttctcttgccaacattcgcgagtacgccaaatttaactacggcgtaggcatgatgccttacgacgccgatgcgaaagatgcgccacaaaacgccattatcggcggagccagcctgtgggtgatgcagggtaaagataaagaaacgtataccgggctgcgtctgggcaacatgccgcagatccgcgtgattgtggatgaagagctggagagcgtgtggaccggtaagaagacaccacagcaggcactggataccgccgttgagcgtggaaatcagttgctgcgccgctttgagaaatcgacgaagtcttaa

SEQ ID NO: 143074 - DNA, 2025 bp, Homo sapiens; identical to SEQ ID NO: 138931

SEQ ID NO: 143075 - DNA, 3042 bp, Homo sapiens
tcagtaaggagtcctggtaagtctaccaagggagggttgcttcatggaggtggtgtggtgcaggtgtggggggtggttagtgttgtggtgacggtgcttagatggagaaagagtgatgggggtggtggttgtgtgggtggtgttgtgtgggtgttggttgaagtgtggggagtgtcgggtgtgttggggcatttgtgtgggcgacgggatgggtggagaggtgtaagccgcgggtggtttgcgccgcgagggagtggagagagcgaaggcggagagcgttcgggctcgcgctttagcctgggtagcggccattgaccgcggtgcataactgagtggtaagtcgaccacaccaagatgatcgccccacatgccgggcatgaccgccggaacaccattcagcgtgcctttggcgatatcagccccttcgatatcagcaaaatctttacctgggaaaacggcgtgagcatggccaaacataatggcgttaacgcccggaatttcactgaggtaataaactgagttttccgccatcactttatacggatcggcagatagcccggaatgtgccagaacgacaacaacatcggcacctttctcgcgcatttcaggcacgtatttgcgcacggtttcggtaatatcattcaccgtcactttcccggataaattagctttatcccagcccatgatttgtggtggcacgacgccaatatagccaatcttcagcgtctgtttttttccgtctttatcgaccacttcggtgtctttaattaaatacggtgtaaacattggctgtttggttctggcgtcaatgacgttggcatttacataagggaatttcgctcctgccagcgcatttttcaggtaatccagaccgtagttaaactcgtggttgccaagcgttccgacggtatagtccagcgtatttaatgccttatagaccgggtgaatatcacctgcttttaatcctttcgccgacatgtaatcggccagcggactcccctgaatcaaatcgccgttatcaaccagtacgctgtttttcacttcattgcgggcatcgttaatcaggcttgccgtacgtaccagtccgaatttttccgtggcggtgtctttgtaataatcgaaatccatcatgttgctatgcagatcagtggtttccatgatacgcagatcgaccgtcgctgcattcacactggcggcaatcagcgtggccaggagcgttgcgctaaatcgattcttaataaaatcgaccgggaacgcctgcaagtaacgataggtcgcataacccgtaccaaagtcatccagcgcaaacgtaatgttgtgctgatatacacggcgttcaataagcgaagtagattgcgagcgcataatggcgtcatcgcgccagttcgcctgctcgtcggtgacatcgttgcccatcagacgccaggcgacgatatcgcgcagctcctgaatctgatcttcattaagctgctgcgcctgggcaagcgatgggatcatcagccgtgcattctcagcatcctgccgcgccacactggcaaacgccaccgccgccatttgacgggtaaaatcgttcgcgccagttgtacgcgcgaaggtcagtaccgtattagggttgttcgccagtgaaatgattgccgaggcgatagtctggtaatcggcaggcatctgccctgccagcactgttaccaggcctgtgttacccgctttcatcgccagacggatacgctctaaatacgccagcggatcttgtttacctgacgcacgccagacgctaaataacttgtcacaggcgttaggctggctcttgccggttagccacagctctttcgccccttgccaggcttcttcactctgcccggtgttccatttcgcatagtagtaattacattgcgcttcggtagttccgggcttttccgggctaaaggctaacaagccacgccagtcttcacgccgcgccagttcattgacgaaacgagattgcagcgtgcgagcgggaggaagcgtggggttagcgcgaacaaagttagtgaccgtcaccgccggttgattcatcagatcatcggtgatctggcggtattccaggtagggataaagcggataatccttcagtccaggcatcatttgttcgaccacatccatttgtcgattatcccaggcctgcttgatttgcgcgtaacgactacgctgctcatccagtgagtcggctcgcgccacgctgctgaccgtcagcagacagacaccggcagccaacagccgccaggtaacttgtttggctttttccacaagcgcatcctcgacgtagctgaagtcgcccttcttgttcatctcctcgagcatggcgatgtgtttcacctgctccggcttattgaactccagcaccgcgtccgtgccgtcaaagccgttgtttttgctggcaaacggcagaccgttccaggcgctaaagttttccagttggatccagccctgccagccgctggcgtagccgcacttcatgccggaggctttcagtttcgcggcatagtccgccagatcctgccaggttttcggcggctgttccgggtctaatcctgctttcttgaaggcgtctttgttgtaatagagaacgggggtcgagctgttgaatggctgggagagtaagtggcccgttttgctgtcggagtagtaacctgaaaccgtcggcacaaactgcgactcatcgaactgaatccctgcctctttaaacacgtcatacaccggtttaatggctttcgacgccatcatggtggcggtgccaacttcataaacctgcaaaatagccggcgcgttgccggtacgaaatgcggcaatccccgcgcttaaattctgttcgtagttgcctttataggtcggtacaattttgtaatccgggttttcggcgttaaaacgttgggccagagaatccacctctttacccagttccccttccatagaatgccagaacggaatggtcgtcactgcctgtgcattccccattaacgccagtccgagcgccagtgctgaagctgtataatgtaacggtttcat

SEQ ID NO: 143076 - DNA, 2306 bp, Homo sapiens
cgagattcaatgtcgcgtccctgacaacgagctgactgggaataccctgtgcaggaccctatctatatctcgacttgaaacaggattacagaattatctcataacaagtgttaagggatgttatttcccgattctctgtggcataataaacgagtagatgctcattccatctcttatgttcgccttagtgcctcataaactccggaatgacgcacagccgtttacggtgcttatcgtccactgacagatgtcgcttatgcctcatcagacaccatggacacaacgttgagtgaagcacccacttgttgtcatacagacctgttttaacgcctgctccgtataggagtgggggcagtgacgaccattccgttctggcattctatggaagggaactgggtaaagaggtggattctctggcccaacgttttaacgccgaaaaccggattacaaaattgtaccgacctataaaggcaactacgaacagaattaagcgcggggattgccgcatttcgtaccggcaacgcgccggctattttgaggtttatgaagttggcaccgccaccatgatggcgtcgaaagccattaaccggtgtatgacgtgtttaaagaggcagggattcagttcgatgagtcgcgtttgtgccgacggtttcagccattcaacagctcgacccccgttctctattacaacaagacgccttcaagaaagcaggattagacccggaacagccgccgaaaacctgcaggatctggcggactatgccgcgaaactgaaagcctccggcatgaaggcggctacgccagcggctggcagggctggatccaactggaaaactttaggcctggaacggcatgatgccttacgacgccgatgcgaaagatgcgccacaaaagccattatcggcggagccagcctgtgggtgatgcagggtaaagataaagaaacgtataccggtgtggcgaagttcctcgatttcctcgcgaagccagaaaacgctgccgagtggcatcagaaaaccggttatctgccaatcaccaaagcagcgtatgacctgacccgtgagcagggcttttatgagaaaaacccaggggcggataccgcgacgcgtcagatgctgaataagccgccgttgccgttcaccaaagggctgcgtctgggcaacatgccgcagatccgcgtgattgtggatgaagagctggagagcgtgtggaccggtaagaagacaccacagcaggcactggataccgccgttgagcgtggaaatcagttgctgcgccgctttgagaaatcgacgaagccggataagcgaagcgcatccggcacagttcaggaattaaccgtaatgtcatcatcccgtccggtgttccgctcgcgctggctgccttatctgctggtcgcgccgcagctcatcatcaccgttatcttttttatctggcctgcgggcgaagcgttgtggtactcgctacaaagcgtcgatccgtttggtttctccagccagtttgtcggcctggataacttcgtcacgctgttccatgacagctactatctcgactccttctggacgacgataaaattcagcacctttgtcaccgtcagcggtttgctggtatcgctgttctttgcggcgctggtggagtacatcgtgcgcggcagccgtttctatcaaaccttaatgttgctgccttacgccgtggctcccgccgttgccgccgtattgtggatcttcctgtttaaccccggtcgcgggctgatcacccattttctcgcggagttcggctacgactggaaccacgcgcaaaacagcggtcaggcaatgtttctggtggtgtttgcctcagtatggaagcaaatcagctacaacttcctgttcttctatgccgcgctgcaatccattccccgttcgttgatcgaagccgcagccatcgacggtgcagggccgattcgccgcttctttaagatgctgcttttttcgcggggtttgtacgggcccgcccttcccgtgggccggtctttcgtgttcgcccattcctggtccgcccgtgacgctgtggatcgaactgggggtcctggggcaagaggcccagaggttggcattgccagtattggtgagcgcataccaatcgtgctcgtattgataaacagcttcatgatcaccacaatcgataccagcgacaacagcagcgagatagtaaacaaccaggcaccgaccgccagaacgataccacaagctggtgctggcggtgatcatcccgtgcaggaactcaccggtggaatcggcataagcggcattggaggcattgcttaa

SEQ ID NO: 143077 - DNA, 518 bp, Homo sapiens
ttaaggcgctccgcaacatcagatgatgtctacgtatcgtattaacggtcgtgaaagtcctatgttgacctatccttcaacgccgaacttcttttggttggcttggcaggcgcgtgattttatgagcaaaaaatacggccagccggttcccgatcgcgcggtttctttggcgatcaactcccgcaccgggcgtacgcaaaaccattttcatattcatatctcttgtattcgtcctgatgtgcgcaaacagctggataacaatctggcgaacatcagcagccgctggttgccactgccaggtggtttgcgcgggcatgaatacctggcgcgtcgggtaacggaaagcgaactggtacaacgcagcccatttatgatgctggcagaagaagtacctgaggcgcgggaacatatgggacgctacgggctggcgatggtacggcagagtgataactcatttgtattgctggcgacacaacgaaatctactgacgcttaaccgtgcttcagccgaggaaattc

SEQ ID NO: 143078 - DNA, 2085 bp, Homo sapiens
atgccatctacacgctatcaaaaaatcaatgcccatcactatcgccatatatgggtcgttggtgatattcatggtgaatatcagttattacaatcccgcttacatcaactctcttttttccccaaaatcgacttacttatttctgtcggcgataatattgatcgtggaccggagagtcttgacgtcctgcgcctgctaaaccaaccctggtttacgtcggttaaaggcaaccacgaagcgatggcgcttgaggcattcgaaactggcgatggcaatatgtggcttgccagcggtgtctataggattcccttggcggttatctggattattggcagtctgacaagcaaagcgtacaaagcagaagttcagcaacgccgtgaggcatttaatcgtgcgaaaatggactatgaccatttagtccgccagatccagcaggtaggcggcctggaaggttttatcgccaaacggacgatgctcgaaaaaatgaaggacgaaattctcgggttaccggaagaagagaaacgcgctctggcagcacttcatgacactgcaagggaacggcagaagcagaagtttctggagggattttttattgatgttgcctctattcccggcgttggccctgcgcgtaaagcggcgttacggtcttttggtattgaaacagccgcagatgttacccgtcgtggcgttaagcaagtgaaagggtttggcgaccatctgacccaggcggttatcgactggaaagcgagctgtgaacgccgttttgtgttcaggccgaatgaagcgataacgccagcagacagacaagcggtaatggcgaaaatgaccgccaaacgacatcggctggaatcggcgttgacagtcggcgcgacagagttgcagcgattccgccttcatgctccagcacggaccatgccgttgatggaaccgttacagccaaccgtgtcggtggtcgataaagtggtcgagaaaaaaggtactaaagaggtggcggaagcctacctgaaatatctctactcgccagaaggtcaggaaattgccgcgaaaaactactaccgtccgcgcgacgctgaggtggcgaaaaagtacgaaaatgcgtttccaaagctgaagttattcaccattgatgaagagttcggcggctggacgaaagcgcaaaaagagcattttgctaacggcgttatcgccgttgtggctgccggtattggttactggaaattaaccggtgaagagtcggatacattacgtaagattgtccttgaggaatgtttgaccaatcagcagcaaaatcaaaatccttcgccatgtgcggaagtcaaacccaatgccggatacgtggttttaaaagatcttagtggcccactgccatatctgttgatgccaacgtatcgtattaacggtactgaaagtcctttgttgaccgatccttcaacgccgaacttcttttggttggcttggcaggcgcgtgattttatgagcaaaaaatacggccagccggttcccgatcgcgcggtttctttggcgatcaactcccgcaccgggcgtacgcaaaaccattttcatattcatatctcttgtattcgtcctgatgtgcgcaaacagctggataacaatctggcgaacatcagcagccgctggttgccactgccagcccaccggaatagcgcaggcgttgttatcaacccggcaacatggaggagcccagtgcccgttattgccattatcgccattgttatcatcgtcatcattctgaacaaaaccggagtgtccgacagcctcacggccctgacacttgcaaccgttgccgcactactgacgggaggtggtgcagccggtgctgccagtgtcgcgctgacgccgttcgtcggcgtgccggtgcgactcatccggacgatgcaaatagatgtggaagccggactagacccggatgtaccgtataactatttcccgcacaatgatccgcaaaatacaccgcgagcgagctggcgtagtcacggtaatttactgtttaccaactggctcaactattacgtctaccagatcacgccatacgatctacggcacatgaatccaacgctggattaa

SEQ ID NO: 143079 - DNA, 1009 bp, Homo sapiens
tcatgagaaaagtatattcttattattcccctttagcagatgagaaaaccaaggctcagagaggttaagtatcttgtccacaatcacagagctggcaagataatagagccaggatgtgaacacaggcattccaaccctcgaagctgaaaatgaaggcgcacaagttaagaagtttgcgcacgtcagatcgacgcggtactgaaaactcagggtgctgcggcattcgaaggtgcggttatcgcttacgaacctgtatgggcaatcggtactggcaaatctgcaactccggctcaggcacaggctgttcacaaattcatccgtgaccacatcgctaaagttgacgctaacatcgctgaacaagtgatcattcagtacggcggctctgtaaacgcgtctaacgctgcagaactgtttgctcagccggatatcgacggcgcgctggttggtggtgcttctctgaaagctgacgccttcgcagtaatcgttaaagctgcagaagcggctaaacaggcttaagtctgacaggtgccggatttcatatccggcacttactttccttaactcttcgcactgatgatcctgaatttcctcggctgaagcacggttaagcgtcagtagatttcgttgtgtcgccagcaatacaaatgagttatcactctgccgtaccatcgccagcccgtagcgtcccatatgttcccgcgcctcaggtacttcttctgccagcatcataaatgggctgcgttgtaccagttcgctttccgttacccgacgcgccaggtattcatgcccgcgcaaaccacctggcagtggcaaccagcggctgctgatgttcgccagattgtgatccagagatgcggggcataatctaaaccgtccgtggttgtccgatgaagatagttgagtggactcggagtagatccatcggtaaagcagcacagaacagactcttcgccagatcctctcttttcgcttcttcgcggcggtaagtactggcctgctgccgtgggtg

SEQ ID NO: 143080 - DNA, 2493 bp, Homo sapiens
ttaacgcaaaatctcacactgatgatcctgaatttcctcggctgaagcacggttaagcgtcagtagatttcgttgtgtcgccagcaatacaaatgagttatcactctgccgtaccatcgccagcccgtagcgtcccatatgttcccgcgcctcaggtacttcttctgccagcatcataaatgggctgcgttgtaccagttcgctttccgttacccgacgcgccaggtattcatgcccgcgcaaaccacctggcagtggcaaccagcggctgctgatgttcgccagattgtgatccagctgtttgcgcacatcaggacgaatacggggatcctctagagtaacgcgtggctgacgaacgcaactcgaaacaccaaccagctgaaagtaacaaccatccataaccggggtgtaactgagtggacagggcatgagtaaaataacagcgacaaccagcccatgaatcagcaaggaaagccatctgctcgccgccattgcacccaaggtaaatgtggagcaatttacttgtccgcgaggcgatgcttgcatggatgatcgatttaagttaaagccagcttggtccagatttgttttcttcgttctggcgttgtgcacacaacggcttgtgtcattccaggattcgcgggacccgtcgctgtcgaggtcaatagttgtgctgtgtggcgtttcaaggagctttcttatttgccgctgccgttgccgctcttttgttagcggcggcctgggcatttgcgcgacgttgcttctcttgctggatttcctgttgcgctccgcgacccattcgtcatgctgcctttgctcttcatttttactgctgttccgcttctgcgacagcagagagttgatctggtggtcgtgcattggtccgttggtctcgttggtgtgctccctcgtgcggctgtgttgcggtcgtgggcttgcaccctttccggctgcgtttgtatcgtgcgccgtgtcgtcggagggcgtgggcgcccatatgtggtggtcttcttgcgcccggctgacgtggagtcggatgcttgtggttggatggggcggatgcgtggcacccaggtgcagtgtgaccatgatgagtattcgggctcgtacccgtccagttgctgatgtggtttgatcgcacgcgatagagtatatcggtgcggtagttgggattgagatcgaccgcgccacagtgcgtcctatcacgtcagctattgttgatccaaatgtcttagtcattcgacacatcaagtaacaatgtctcattgcatcggcggccccattatgagctccggcaacaatagcatccatatcataaccgaactggtgaagcactgttagtaatgctgtttggagcagcccatttatggctttgaaattccttcgtcgtgaggtggggcgaggagcactgacaagcaacacgggtgcacctatttgtggtattctcttgtgccccgtttttacccggtgtctcctcataaagatgtgtccgtgaaccaacttgttcccatttgcgtaagatggtttccaacccgtgggcctgtggcaaccagtcacgaaggtcagttcattgcctatgtgccatttagtccggtgatgtgccagggcgaagacctgcaatggttcggcatggcaccgttgtcgtttgatgaaaaataccgtggacaggggctggcacgccaactggtctatgaaggactcgattcgcttaatgagttcggctatgccgcagtggtgacgctgggcgatccggcgctgtacagtcgtttcggctttgaactggcggcgcatcacgatctgcgttgccgctggccgggcacctgcgccttccgctaccagacgctctttttgccgtttggtcagttgcttaacgcgatattccgcccgtaacgccagcgaacgatcgcccactggcgcggaaaacaccagcgttagttctcctttcccgcgcagtgctttcgcccctttgccgctttggtgctgctgatagcggcgttcgacatccgtggtgatcccggtataaagcttattgtcggcggtacggatcaagtaaagaaaccagggtgtcatcgtctgcgtcgcatgttaagccgttggctggcaaaacaacatgttgtcacttggtgtgtgcagcaggaaggggaactctggtgcgctaatgccttttatctttttgatgcgcagaaagtcgccttctacattttgacggaagaaaaaacgcgccacgcgcagatgagtgggccgcaggctgcggttgccggaacggtaaacggtcagccgaaaacggtagcgttaattcgcggtgtgcagtttaaaggtgagatccgcaggctggaaggtgaggaaagcgacctcgcgcgcaaggcgtacaatcgtcgcttttcggttgccagaatgctgtccgccccggtgtgggaaatccggctcgatgaaatcaaattacgctttttttcttttcttcgtcttctcttgcgttctcgcgagagtagataa

SEQ ID NO: 143081 - DNA, 1557 bp, Homo sapiens
ctagaagccacccccaaggcctgcgagataggccgcacccaatgcggtgacttcgcgcattcccgggcgctcaacgcgggtgccgagaatatcggactggaactgcatcaggaaattgtttgctactgcgccaccatccacgcgcagggcgtgcagacggataccagagtcggcctgcatcgcttccagcacgtcacgcgtctgataagcaatagactccagcgtcgcgcgtataatgtggttagcgttcaccccacgagtcagaccgaaaatcgccccgcgcgcatacgggtcccagtacggcgcacccagcccggtaaatgccggaaccacatacacaccattggtgttttgcactttggtggcgaaatattcggaatcgtaggcgtcgttaatcaacttcatttcatcgcgcagccactgaatggatgcgcctgccataaacaccgcaccttccaacgcatagttcacttcgccagtcgggccgcaggcgatggtggtcagcaggccgttttctgatttcaccgctttctcgccagtgttcatcagcataaagcagccagtgccataggtgttcttcgccatcccttctttcacgcacaactgaccagggtccgccagtgagaaaagcaccagcatgcctgcgaaccacaggcctatccaaatccagaaatcacggcgtccaatacgcccgttaaggtttaatagtgcaccgccggagttaccgcggttaatggaagcatctgtctggataaagttttccagaccttcaagattcaacccgctgcggcctaatgcggaaacaatgccagaggtggcggtttgcccaaggccaaatgggttaccgaccgctacggcaaaatcaccgacgcgcaatttatcggagtcggcaatagcgatttgcgttaatttgctcgggttttgaatttgtaacagggcgatatcgctctggtcatcgctaccaatcagttttgcatcaaactcgcgcccatcattgagctgaatactgattttctgtgcctgattaatcacatggttgttggtcagcacatagcctttactcgctgtgataggcgacatcgtagcatggacgaagccaagtaagggataatagttggccaccccctggtctcttttatcacaggctttcctcatgggcttgaagtcatgaatgtccacccaggcaaggctttccccagatacctctgtgcccccgagacgaggatattcaatgaccttgggatgtggcttattttgcaggccggaaaaacgggaaaagtgctggtcgtcggtacagatggcattccggaagcccgcaaaatggtggaagccggacaaatgaccgcgacggttgcccagaacccggcggatatcggcgcaacgggtctgaagctgatggttgacgctgagaaatccggcaaggttatcccgcaaatggctgcgataaaacatgcagaacaccttgttaaaagcaatgaagagctggccaaaattctgcttttcattatcagcgtagattagtaataacaccgacccatagtcatcaattcgagtcat

SEQ ID NO: 143082 - DNA, 978 bp, Homo sapiens
atgggaccaggagcccgggaaatgccagtcctggccctggccctggccggtctgtgtgctcccaggctgcgcccaatccgaagcctccgtgtggatgcagagcccgaagctggaggccatccccaggtccacactcctgtgactgcaagtgacagaaaaccggggcagaagcggctggggccaaagggggaatgcggggctcagggcggcagcccaggcctcccgcacggtttcagctcagccgccctccccagaagaggttgttgtgaagacatagtgagatgtgtctacaagccagagaggcctcaccaggagccgaccatgcaagcacgctggtcccagattttcagcctccagagctgcatttatctggttaatctcgatgaaaaaatcgacatggataatctgaaaaaagctggcggcaatgtggaagcttttgtcaccaccgataacgttgctgtcggggcgaaaggcgcgtcgttcattattgacaaattgggcgctgaaggtggtgaagtcgcaatcattgagggtaaagccggtaacgcctccggtgaagcgcgtcgtaatggtgccaccgaagccttcaaaaaagcaagccagatcaagcttgtcgccagccagcctgccgactgggaccgcattaaagcactggatgtcgccactaacgtgttgcaacgtaatccgaatattaaagcgatctattgcgcgaatgacacgatggcaatgggtattgctcaggcagtcgcacacgccggaaaaacgggaaaagtgctggtcgtcggtacagatggcattccggaagcccgcaaaatggtggaagccggacaaatgaccgcgacggttgcccagaacccggcggatatcggcgcaacgggtctgaagctgatggttgacgctgagaaatccggcaaggttatcccgctggataaagcaccggaatttaaactggtcgattcaatcctggtcactcaataa

SEQ ID NO: 143083 - DNA, 1968 bp, Homo sapiens
atgaatctctggttaatgaccagcccggaataccatatgaaacgcctgctggttgccggttgtgggccggtattccagctgtgccgcagcttccgtaatgaagagatggggcgttatcacaaccctgagttcactatgctggagtggtatcgaccgcactatgatatgtaccggttgatgaacgaggtggacgatctcttacaacaggtgctggactgcccggcagcagaaagcctttcttatcaacaagctttcttgcgttatctggaaattgacccgctctctgccgacaaaacgcaactgcgggaagtcgcagcgaaactggatttgagcaatgttgctgataccgaagaagaccgcgacacgctgctacaattgctgtttacctttggcgtagagccaaatattggcaaaaaagaaccgacctttgtgtaccactttccagccagccaggcattactgggcgcaaatcagtaccgaagatcatcgggtcgtgaatttcagtatcgaaccctagcaacgtaccctggtttccgggtttacttttttcagcacttccgcgatgtgagtcccatcgacgttagaaacaaagtgcatgttcaggtggtttttgtacggacgcagagcttcggtcaccatgtatgggccgaggtcagaaccgccgatcccgatgttcactaccaccgcgttgacttccggcattacgtctttgccatcaaccaaaatcggggtattgctacggttacgcagcgctacgtgcagcacggcgcggtacggtatattccgttttttacaggagaatttatgctgcccgactcatcagtccgtttaaataaatacatcagcgaaagcggaatttgctcacgccgcgaagcggatcgctatatcgagcaaggcaatgtgttccttaatggcaagcgagccaccattggcgatcaggtgaaacccggcgacgttgtgaaagtaaacggtcagttgattgaacctcgggaagccgaagatttggtacttatcgccctgaacaagcccgttggtattgtaagcaccaccgaagatggcgagcgcgataacattgtcgatttcgttaaccacagcaaacgcgtgttcccgattggccgcctggataaagactcccatgggctgattttcctcaccaatcacggcgatctggtgaataagatcctgcgttgctggcatgatcatgagaaagagtatctggtgacggtcgataaaccgattaccgaggagtttattctcggcatgaaggcgctgaacgcggcgcaggccatcggcgatgaccgtttacaacagcaaagtcaggggcgagtagtaccagacagtttcactcatggcacttctcagcaacgctacagctggtttaaacgtggtttcgacagcggcgatccggcacaatgcaatacttttggaaaacatcgcgtgactatcgaaaagcacaacgatgattatcgtatttcgctggaacaaggtacgccgggctttgagccaccgctggaaggtgaaacacgtgcggcgattatcaacgcgcttcatctcactgaggacgatattctgccaggcttgccaattcaggtggcaacaacaggacactcaaaagtgatgatcccactgaaaccggaagtggatatcgacgccctttctcctgaccttaatgcgctgaccgctatcagcaaaaagattggctgcaatggtttcttcccgttccagatccgcccaggcaaaaacgaaaccgatggtcgcatgttctcgcctgcgattggtattgtggaagatccggtgactggcaatgccaatggcccgatgggtgcatggttggtacatcacaacgtattgccccacgatggcaacgtgttgcgtgttaaaggccatcaggggcgcgcattagggcgtgacggtatgattgaagtgacggtggctgttgtcataccttgtggaaggagtggtatttag

SEQ ID NO: 143084 - DNA, 7410 bp, Homo sapiens
ttattgagtaccagcgcactcgcagacaatatcggcaccagcgcagaagagctggggctgagcgattatcgccattttgttatttatccccgtctcgataaagcgcagatccacatcctgcggttcggtactcatttcgacgatttgacgataggcctctttacgctcatctttcaacgacttgatttgcggtgtgtactcggccagccacgccttcgccagtctatcggcctcgccatcgaagtaatcctgcacctccatcaccagccccatgccagcaacggtaacacgagcctccatgattgcttccagatattcctctgcatcctcttctcgatccgcaaccttatcggccagatattcgacataggtacgtgaaacatccgggagccgggcagtgacgtcatcgtctgcgcggaaatggacgaacagtggggctatgtcggggctaaatcgcgccagcgctggctgttttacgcgtatgacagtctccggaagacggttgttgcgcacgtattcggtgaacgcacctttgacgtggtgatatggatgacggatggctggccgctgtatgaatcccgcgtgtttctgttcaccatattgctggcgctgaattccccagcctgccatcagcattgtgcgattcgccgccatcagttcagcgagtttgactatctgcgcttccggtacgccagtaatttccgccgcccagaccgcgctcttcggcgtattatcgctcttacctgtcagatactcttcaaactgcggatacccggtagtgtatttttcaaggaacactttatcgtgtttgccttgtgtcatcagggtatgcgcaatccctaacatcagtgccacgtcggtgcccatattcggcgcgatccaggtggcattatcgtcaaagaattcgatggtttcggagcggataggatcaatggcaatcactggtttgccagattttttcagctgatggaagtattccagcccttgctcatcggtactgctccaggcaatttttaaggtattcagcgggttcattccccacagcaccacaacctggctgttttccagaatcagcggccaggaggtctgctgttcatacacctctacagaaccgaccacatgcggcatgatcacctgtgctgccccggttgaataatcgccgctatgcccggaataaccgcccgccaggttcatataacgttgcagtaaggtttgcgctttatgcaacacgccagaagagcgccagccgtaagatccggcaaaaatggccgatggtccgttagctttacgaatacgatcatgttgctcatgaatcagttttaatgcctgttcccagctcacctgtacataggtatcttcgccacgacctttcgccggttgcagtggattatcgagatagctttttctcaccatcggatgctgaatacgcgccgtggtgtgtacctgatccgccgccgtagactgtaaggaattcggtatggttttcgccagcgcgcctgttgaagaaacaatcttgccgtccttcacttctacgttcatcgctccccaacgtcccgcggtgaggattttaccgcccttctcttctgcccatgcggggagcggtgctgccgatgtcaccaccagcgctccagcggcaataccgtgtttctcggtaatatctttggcgttgtactggaaataccgcgttaaaatgtccagttcgttttcgctcatgctggttcgtgcccccattcctttggcaatggacggccacgcattgacggtgtaatggtcggcggcaataggggcatgacaaccagcgcaataggtatcgtcaagtttttcagcgtattgccatagcggtttacggtccgctaatgcgggatcggtaagcgcaccctgtaaagacgcctgacgccattgattgccgtattcgtcagcctgccattccccgtttacagtgagcgccttgataccttcttcacttaatgtggctagcgccagccgttgacctgccgccaggtagagcgtgttttcactgccctgcatttgataaccctgcaacagaacgatcggctgtttgccactggcatcaacgacggtgagatcggttccaggattcacggtagccagctcgcctatgtgagaagttttgaaaggataaatatgtgcgccattagtaactgaagtagcggcctgactttccagctcatgcgccgcgttgtcattgttcgtctgactgccgctgtaggcttcgtcgccgcgcatcatcgcagcctgcatgctctgcgtcaccgccccggtgccgctgtcggtcagtaaatcgataaaaacatcttcgctatccagcaggaacgggttcataccggatttaataattgcctcaatacagaagctggagaaaatccgccccagcaggtcgtctgaagtaaattccccggtgatttcgcttaagttctgctgtgccagacgcaactcttccgccagcagttcacctgcccaggctcccaacagttgcgctttgccctgttgtagatgttccgctgcctgttccagcgcctgtaggtggcgacgacgcgccaggaagccgccttccatgttggtgtcaaagcccatgctctgtttgagatggttacgcagcacgtccacgccttcaccagtccggcaattgccgacgactctggtctggcggtagatgtgcttggcggcgcgccgggcatttactccgcgcgttattccggtgaagacgcgaccgatcaaaagaatctgcaaaaactgctggaaacaatgaaagacgtaccggacgaccaacgtcaggcgcgtttccactgcgtgctggtatatctgcgtcacgcggaagatcccactccgctggtatgccacggtagctggccgggcgtgattactcgtgaaccagcgggcactggtggctttggttatgatccaatcttcttcgtaccttccgaagggaaaaccgccgccgaactgacccgcgaagaaaagagcgccatttcccaccgtggtcaggcgttgaaactgctgctggacgctccgctgagtctctacattcacatcccgtggtgcgtgcagaaatgcccgtactgcgatttcaactctcacgcgttgaaaggagaagtgccgcacgacgatatgttgcaggtaccgagctgataccatatcccagtctccggcttcaaccacaggttgaatgatggtgaagacgttcgcaaatgtcaccaccagtacgacaaccactgtcgcaatcattgccgacaaatgcgttttgaaaatcacaaacggtctgtcgagatcctgacgtgctttaaagaacgggaaagccagcgcgaggaacaggtaaggaagcgtcatagacacgttcgccatcagcgtcagcttgttaaagaacgccgatgcggtaccgccaccaaacgaaaccagcaggatgaagacagtaaccaacccgcactgcatccacatggcgatagacggcatccccatcgcattcaggcgcgtcatcggttccggccacaatgctttcggcgtcccctggatgatggctttcaacggtgaatagcaaagcgtaaagaacgcaccggtataggcgaggaacatcgaaagtccagtaatacgcgcaaaccatacgcccagcgacaatgacgcttcaggtgacaaatgcagtgcattacccagcgtcatcccaaggctcttcatcagcacataggtaatattgccgaggttaacggaaccattacttaatacctgctgccagtttgtgctgacgccccataaaaatattgccagcgaataaccgattgaaataacaatagcggcaaaaacaatacctttggcaaagttcttttctggattttccgttttatcgaccagaccaccaaccgcttcaattccgccataggcaaaaatggcaaataccacaaacgatagcattgccagaccggactgataacccgggttcggtgatgcaaggaaattaatatcctgcgcgaaatgcccaccatttaataacaaaatagtaatgcttactaacagcaatactaaattcagacacattactgcaataccgcccaccgcagtaatgcgggcaattttattaatccccttagaagcaacgacggtgaccagaatcatccatgccacagccagcagaccaaccacctgcgtaggctccagtccggcaatacgccagtgctgggtcatgtcgctaccatagaggaatgttgagaacggtacccaaactttcgcggaggtactcaccatccagatgatataagaggaaaaccacataaacgtaccaatgaaggcaaaacgtggtccgacactattattcatccaggaatagataccgccttcttctttgcgataagcagctcccatttcagccatcattaaggcgaatggaataaagaataacaatgcagaaaatatataaaagggatcgcactccagcgttttggcatcaacgaagcgggcaaagcctttgattacatcaacgttatttttaccgagcacgttttcataggaagtatgaatacggtcgatataggcggtacggctggcgatcaacgtttcccagttgaatttattgatagtggtatcaaaaccataatccgggccgtacatatggatcgcttcacggatttgcgccgcgtgccacatcacttttttcggcacacagccaacatttacgcaggtgccgcccagctctttggcttcaatcagcgcacatttctggccgtacatagccgcgcggttgatggaggcgataccgccgctgccgccgccgatggcgatgtaatcatagtgtttagtcatgacaaagtgtccgcgattgtagcgcgagacgtaataggtgccagcaatggctgcaattactccggcacgatccagggtggcgtgcccggtgcctgccggaaccagtttgctgtgcagccacggcagcacgttattcatctgttgttccagtttccacggcgggttaatcacaatcatgccggaagcggtcatgccacggcgatcgctgtctggcagtaccgccagttcaatttgcagaattttgcgaataccggtcgcttccagatcgtggatcatgcgcttaatttgctgacgcagcaccaccggataccacagtgcgtaaataccagtggcgaaacgtttgtaaccttctgctatcccgctgaccaccgcttgatagtcagttttcatgtcatacggcgggtcgataaggattaaaccacggcgggaaaccggcggcagtttggccttaagctgctggaaaccgtcggctttttcgacacgcgcacggctatctttctgaaattcagaacgcaacaacgggtaatcgctcgggtgcagttcggtcagttgcaggctgtcctgttcacgcagtagcaggcgagcaatcaacggcgaaccggggtagtaacgcaactgaccgctacggttgaagtgttttaccacattgatgtacgcctccagttctgcgggcaaatcgtcctgctgccagatacgggcgatgccttcgagatattcgccggtacgctcggcatgttcgctgcctaactgataacgcccggcccctgcgtgggtgtcgagatagagaaacggtttatctttctctttcagcgactcgatgatcaggctctctttaaccaggactgcgcgaatgacgaatccgttactgactccctttgaattgcctccgttttctaaaattctcccggaacatgtcgttccagccgtgactaaggcattgaacgactgccgcgaaaacgtggagcgcgtagtagcgcaaggggcaccgtacacctgggaaaatctctgccagccgctggcggaagtggacgatgtgttggggcgtatcttctccccggtcagatcagctcggtaccgagcgtaggctggtttctcttcgccgaacacacatttatccagccgcttttgcgcgtaaacaaacaacgcctcgtaatgctccggctccgctgacgccatcacgccgcagctttctaccgaagatacgcactgctgctgattgatttgggcaaaggcaataacgcgctgggcgcaacggcgctggcgcaggtttatcgtcagcttggcgacaaaccggcagatgtacgcgatgtcgcgcaactgaaaggcttctatgacgcgattcaggcgctggttgcacagcgtaagctgctggcgtatcacgaccgctctgatggcggcctgctggtaacgctggcggaaatggcctttgctggtcattgtggcattgacgcggatatcgccactctgggtgacgatcgcctggcggcgttgtttaacgaagaactgggtgcggtgattcaggttcgtgccgctgaccgtgaagcggtcgagtccgtactggcacagcatgggcttgctgattgtgtccattatgtagggcaggcggtttccggtgaccgttttgtgattaccgccaacgggcagactgtattcagcgaaagccgcaccacgttgcgtgtctggtgggcagaaactacctggcagatgcagcgcctgcgtgacaacccggagtgtgccgatcaggagcatcaggcgaaatctaacgacgccgatccgggcctgaatgtaaaactgtcgttcgatatcaacgaagatgtggcagcaccgtatattgccactggcgcacgtccgaaagttgccgtactgcgtgagcagggcgtgaactcgcatgttgaaatggcggcagctttccaccgtgcaggctttgatgctatcgacgtgcatatgagtgacctgctgaccggacgcacgggcctggaagatttccacgccctggtcgcgtgcggtggtttctcctacggtgatgtgcgtgtacgcgatgagtttgcaaccttcttccaccgtccgcaaacgctggcgctgggggtatgtaacggttgccagatgatgtctaatctgcgtgaactgatcccaggtagtgagttgtggccacgttttgtgcgcaatacctccgatcgctttgaagcgcgtttcagcctggttgaagtaacccaaagcccgtctctgctgttgcaggggatgttgggctcgcaaatgccgattgctgtctctcatggtgaagggcgcgtggaagtgcgtgatgcggcgcatctggcggcactggaaagcaaagggctggtggcactgcgctatgtcgataacttcggcaaagtcaccggctaacccgaacggttcaccgaacggtattacggcagtcacgactgaaagtggtcgagtcaccattatgatgccgcacccggaacgtgttttccgtactgtcagcaactcctggcatccggaaaactggggcgaggatggcccatggatgcgcattttccgcaatgcgcgtaagcagttggggtaagtcgtcagcccattggttttgcagcccggatgcggcat

SEQ ID NO: 143085 - DNA, 1291 bp, Homo sapiens
atggtgtacacactcatccctagagactttgacgaatgcctgacatttggtttactaggaggaaggcttgatgaaggatggatcgggttgttagaggatcgccagtgctgtcgtgacggcgttgaccgatatatcgagagtgcggttggatggtgtggttgtgttcgtgtcgtgtgtggttctcttgtgttggtggtgcgtctggcgggtgtgcgaagaggtgcgtataagcataatcgtgctgtggtctggaccgtgtgtggtactggcctctggttgcccgtattaccgtattgcgccgattgcggcggtcttgcttcgcctgcggtgttgtccctgcacgatcgtgagtccgcgggttcgcgtgagtttgcgcgcagcttggcggcgtcgccgccattcggaaactgcttttctgctgcacagcgacgacagcgatgtgcgcatccgctactttacgccaacggttgaagtgccgatttgcgtcaacgcgacaggaaaacatcgcgtgactatcgaaaagcacaacgatgattatcgtatttcgctggaacaaggtacgccgggctttgagccaccgctggaaggtgaaacacgtgcggcgattatcaacgcgcttcatctcactgaggacgatattctgccaggcttgccaattcaggtggcaacaacaggacactcaaaagtgatgatcccactgaaaccggaagtggatatcgacgccctttcgcctgaccttaatgcgctgaccgctatcagcaaaaagattggctgcaatggtttcttcccgttccagatccgcccaggcaaaaacgaaaccgatggtcgcatgttctcgcctgcgattggtattgtggaagatccggtgactggcaatgccaatggcccgatgggtgcatggttggtacatcacaacgtattgccccacgatggcaacgtgttgcgtgttaaaggccatcaggggcgcgcattggggcgtgacggtatgattgaagtgacggtgacaattcgtgataaccaaccggaaaaagtcaccatttcaggcacagcgggtgcgcttcccgatcccgcattagcggaccgtaacccgctatggcaatacgctgaaaaacttgacgatacttattgcgctgtttgtcatgcccctattgccgccgaccattacaccgtcaatgcgtggccgtccattgccaaaggaatgggggcacgaaccagcatgagcgtaaacgaactggacattttaacgcggtatttccagtacaacgccaaagatattaccgagaaacagtga

SEQ ID NO: 143086 - DNA, 735 bp, Homo sapiens
atgcagaaaatgcaggaagagatcgcgcagctggaagtcaccggcgaatctggcgcaggtctggtaaaagtgaccatcaacggtgcacacaactgccgtcgcgtagagatcgacccgagcctgctggaagacgacaaagagatgctggaagacctgcttatggaagcactgcgctgtctgccgggcgttggcccgaagtcggcgcagcgtatggcgttcacgctgcttcagcgcgatcgtagcggcggaatgcgtctggcgcaggcgctcacccgggcgatgtcggaaatcggccactgcgccgattgccgcactttcaccgaacaggaagtctgtaacatctgttcgaatccgcgtcgtcaggaaaacggtcaaatctgcgtggtggagagtccggcggacatctacgccattgagcagacggggcagttttcaggtcgttattttgtgttgatggggcatctgtcaccgctggacggcatcggtccggatgatatcgggcttgatcgtctggaacagcgtctggcagaggaaaaaatcactgaagtgatcctcgccaccaaccccacggttgaaggtgaagctaccgctaactacattgccgagctttgcgcgcaatatgacgtggaagccagccgaatcgctcatggcgttccggttggcggcgagctggaaatggtcgacggcaccacgttgtcacactcccttgccgggcgtcataagattcgtttttaa

SEQ ID NO: 143087 - DNA, 675 bp, Homo sapiens
atgctcgatgaaaaagggatcgcatggagtctgcacagctctattgaagaagtgatggcggaagtagacatcctgtacatgacccgcgtgcaaaaagagcgtctggacccgtccgagtacgccaacgtgaaagcgcagtttgttcttattcactcaaggatctgcacctttgctgccaaaattacaactgcagaccccaaggagcccagttcaattgatgaagtttattcagaggagaaggagcatgcagaaggaatacaatactacagatttagaggccaagaaagactcttaatcagagttgagataagggtgggacgaagtggactgggggcaaagagcaaccacgaggtccgaatcacaatggaagggtcaagaatgaaataccgcatcgctttagctgtttctctctttgctcttagtgccggtagttatgccactaccctgtgtcaggaaaaggagcaaaatatccttaaggagatcagctatgccgaaaaacaccaaaaccagaatcgtattgacggtctgaataaaaccctgagtgaaatccgggccaactgttcagatagccagctgcgtgccgatcatcaaaagaaaaacgcaaagcagaaagatgagggggcggaacgccagcaaaatttagccgaggcgaaacaaaaaggcgatgccgattag

SEQ ID NO: 143088 - DNA, 424 bp, Homo sapiens
cgcaagaaatgaagtcgcgcagccgggcgttcacgaaacgctggatgagctgacaacacgtctggcagaaggtctgctggaagcggcagaagaagccggaattccgctggtcgttaaccacgttggcggcatgttcggtattttctttaccgacgccgagtccgtgacgtgctatcaggatgtgatggcctgtgacgtggaacgctttaagcgtttcttccatatgatgctggacgaaggtgtttacagcatggaagatatcaataacaccatcgatgctgcacgtcgggtgtttgcgaagttgtgatccagcatggtttgtcggatgcggcgtgaacgccttatccgacctacgattcggggccgtttgtaggcccgataagacgcgccagcgtcgcatcgggcatccgttgtcgcgtaaacg

SEQ ID NO: 143089 - DNA, 1482 bp, Homo sapiens; identical to SEQ ID NO: 138830

SEQ ID NO: 143090 - DNA, 2413 bp, Homo sapiens
atgattgtgttcatcgaaaactttaagacctcatcgccaaaatatgccgacattctgctgccagacctgatgaccgttgagcaggaagatattattcctaacgactacgccggtaacatgggatatctcattttcctccagcctgtcaccagcgaaaaattcgaacgcaaaccgatttactggatcctgagtgaagtcgcgaaacgtcttggacctgacgtctatcaaaagttcacagaaggtcgcacgcaggaacaatggttacaacatctgtacgccaaaatgcttgccaaagatccggcgttaccgtcttacgacgaactgaaaaaaatgggtatctataagcgtaaagatcccaatggccattttgtcgcctacaaagcatttcgtgacgaccccgaggcaaatccacttaaaacgccttccggtaagattgaaatttattccagcaggctggcggaaattgcccgtacctgggaactggaaaaagatgaagtgataagcccattgccagtttatgcctcaacctttgaaggctggaactcccctgaacgtagaaccttcccactgcaactgtttggtttccattacaaatcccgtactcactcgacctacggcaatattgatctcctgaaggctgcctgccgtcaggaggtgtggatcaaccctatagatgcgcagaaacgtgggattgccaacggcgatatggtgcgggtgtttaaccatcgtggcgaagttcgggctaccagccaaagtaacaccacatcctgtggggacgtggactgccgaaccatcgtaaattcgggtgaacggcgttctttccggaatcggttcccggttgaagcccacgcttcgcccttgggattttgcgtagcccctcgcaggaaaggccttgccactgggacgtttgtacagcaccattctattgtgtgcgggaggcgttgtgatgtctcaatcatggtttacgcagttattgcgttgctgggtgtggcaattggctggctgtttgccagttatcaacatgcgcagcaaaaagccgagcaattagctgaacgtgaagagatggtcgcggagttaagcgcggcaaaacaacaaattacccaaagcgagcactggcgtgcagagtgcgagttactcaataacgaagtgcgcagcctgcaaagtattaacacctctctggaggccgatctgcgtgaagtaaccacgcggatggaagccgcacagcaacatgctgacgataaaattcgccagatgattaacagcgagcagcgcctcagtgagcagtttgaaaacctcgccaaccgtatttttgagcacagcaatcgccgggttgatgagcaaaaccgtcagagtctgaacagcctgttgtcgccgctacgtgaacaactggacggtttccgccgtcaggttcaggacagcttcggtaaagaagcacaagaacgccataccctgacccacgaaattcgcaatctccagcaactcaacgcgcaaatggcccaggaagcgatcaacctgacgcgcgcgctgaaaggcgacaataaaacccagggcaactggggcgagcccaatcctgtgcgcttgcgctttataaaaatccttaccgggaacattcgtaacgttttaaagcactatgatgagacgctcgctgtcgtccgccactgggataacatcgaagttcgcgcaaaagatgaaaaccagcgtctggctattcgcgacgctctgacccgtattccgggagaaaccgtgatgcagacccaggtccttgttgaacatccactaaatgggaaaatgcgtacatggctgcgcattgagtttttgattcagcaactcaccgttaatttacccatcgttgaccacgctggcgcgctgcatttcttccgtaatgtcagtgaattactggatgttttcgagcgcggcgaagtccgcactgagctgttgaaagaacttgaccggcagcaacgtaaactccagacctggattggcgtgcctggcgtggaccagagccgtattgaagcattaattcagcagttaaaagcggcggggagcgtattaatttccgcgccgcgtatcgggcaatttctgcgtgaagatcgtttgattgctctggtgcgtcagcgactgagcatcccaggcggctgttgcagctttgatttacctacattgcacatttggctgcatctaccccaggcgcagcgcgacagccaggtagaaacctggattgccagcctgaacccgctcacccaggcacttaccatggtgctggatttaattcgccagtcggcccccttccgtaaacaaaccagcctgaatggtttttatcaggataacggtggcgatgccgacttgctgcgcctgaatctgtcgctcgattcacagcgtttatccgcaaagtttccggacataagaggccgga

SEQ ID NO: 143091 - DNA, 1757 bp, Homo sapiens
ttacggtttatagtacagccccgactcctcatcatgctgctgccttgtcagacggtacggctggtgcagctgatgcgggttctcctcattaagctggttgccccattcatcatactccccgcgccacgccgtattgccgtcttcgctgatgagcgccagcggcaggccccggtggtcgcagtggtaaaaatgaacttttcgcgccggtgtgtattccggctccacctgtctggccagttgctccaccgtcagcccgcactgcgcaagccacgcccggctttcactgctcacgcggtctgcccggatttcttcctccagcctgtccagcagccgcaccagttcagccgggaacaccacgccgtggccgttctcactcccttcctgctggagcgtctctgccaggctgcgccgctgcgctttttcccgctcgccgttctctgtctcgacccggatgagcggcgtgaagcttcccggctcgtataccgtctggatacgtgtggtgtcagtctgcaccgtcgtcagcctgtctccgtcccagccataccacgtcacctccggtttacgcgacagcgacatccaccccgtcaggtcacgctcccgccgccagacccgttttgccattcgccgtcccagcgggtcgtagaggtagcggctctcgaccagtggctcgccatgctgtatccgcgtgtagaacaccaggcggtgctggctgtcgtagtggtagtggtgggtccgctcgtcgtccgtccgtatcacacccgccgggatgcggtccgtcttctccgtgaggatcctgctagagtcgacctgcgcatcactcgttcctgttcttgttgctctgtgtgtgatgggtgtgttctgctgtctctctcgtctctgtgtctctgtctttccgtgtgtcttgcgttctgtatcgctcgctcgttgttgtttcttgtcgtctcgtctccgaacccgcgtattgttccctacggcctcgttaaaaaggcttgcacaaggccgttcgagggaccctgttgaatgttgatcggccatcgttttcacggcctgaccagagatagccgctaacgatagcgcacaagtaccaataattccctcggcgcaatacgtgccgtcattgaatcccagtgcacttagctgctgcaaggtttgcggatcgccattacggctgagaatgcaggcggtttcatcgaggataaacagcgcacactctcgcggtgccatatattcccaggcatcttccagcgcagcctgcccgagcgtcagcatcgctttcttacgccgataaatagaagcaaatgtcacgccctgggcctgatgtggtacgttccatgtctcccgtttcatcagcttattgcatcgctcccaggaggttgcaattaagggagatatgccccgaccatcgttgttaaaagcgccactcatatcccgcatcctccagtggttccatgggttgtccataagagaacgcttgggtactattaaattgatgcgcctgggtttcatcgtttcgccagtgctgatgttcacgcagtaacgcttcaagcgccggttctcattctccatcctggaggtgtcctttaacgcgtcctgcgtcatcctcttcgcttcatccagaagcctttccctgaaacaccatcctggtgtgtcctgcagaagtgtcatcatcctgatgttcacttcgttgtctgactccctgtcgacgaagatagaatcgtctttttcgcgaagtcttacaaggcgcttacagacaatgc

SEQ ID NO: 143092 - DNA, 2727 bp, Homo sapiens
  misc_feature (1)...(2727): n = a,t,c or g
atgagtcttaacctggtaagtgaacaattgctagcggcgaacggcctgaaacatcaggacttgttcgcgatcctcggtcaactggccgaacgtcgccttgattatggcgatctctattttcagtcgagctatcacgaatcctgggttttagaagaccgcattattaaagatggttcttacaacatcgatcagggcgttggtgtgcgtgcaatcagcggtgaaaaaaccggatttgcttacgctgaccaaatcagcctgctggcgctggaacagagtgcgcaagcggcgcgcaccatcgtccgtgatagtggtgatggttgccgcgaagcggacaagcgcgtacaggaagtgactgccagcctcagtggtgtctatgaattaattttggttgcggccaccgacggcacgctagcggcggatgtccgtccgctggtgcgtctttccgtgagcgttctcgtcgaagaagatggcaaacgcgaacgcggtgccagtggcggcggcggtcgttttggttatgaattcttccttgccgatctcgacggcgaagtccgtgcggatgcatgggcaaaagaagcagtgcgtatggcgctggtcaatctttctgccgttgctgcaccagcgggcaccatgccggtagtacttggcgcaggttggccgggcgtgctgttgcatgaagcggttggtcacggtctggaaggcgacttcaaccgccgtggcacttcagtatttagtggatcaaaggttttcgcgttagcgggatgcgtcgtgttgatgacgaccatgcccgacagttgcaattcgtggcaaaaatgcaggaataaaacaatgaacaagaagattcattccctggccttgttggtcaatctggggatttatggggtagcgcaggcacaagagccgaccgatactcctgtttcacatgacgatactattgtcgttaccgccgccgagcagaacttacaggcgcctggcgtttcgaccatcaccgcagatgaaatccgcaaaaacccggttgcccgcgatgtgtcgaagatcatccgtaccatgccaggcgttaacctgaccggtaactccaccagtggtcagcgtgggaataaccgacagattgatattcgcggtatgggtccggaaaacacgctgattttgattgacggcaagccggtaagcagccgtaactcggtgcgtcagggctggcgtggcgagcgcgatacccgtggtgatacttcctgggtgccacctgaaatgattgaacgtattgaagttctgcgtggtccggcnagtgcgcgttatggcaacggcgcggcgggcggcgtggttaacatcattaccaaaaaaggcagcggcgagtggcacggctcctgggacgcatatttcaatgcgccagaacataaagaggaaggtgccaccaaacgcactaactttagcctgaccggtccgctgggcgacgaattcagcttccgtttgtatggcaacctcgacaaaacccaggtgacgcgtgggatatcaaccagggccatcagtccgcgcgtgccggaacgtatgccacgacgttaccagccggcgcgaaggggtaatcaattcttccatattcatactaagatcctcggaaaatggacgatatttgcgcattacctggcacaggtccgggacaaaatctcagcggctgcaaagcgttgcggccgttctccagaagaaattacgctgcttgcagtcagtaaaacaaaacctgcgagcgccatcgcagaagccattgatgccgggcagcgtcaatttgagcatttcgactggtgtcataccatcgaccgtttgcgcatcgctacccgtctcaacgaccagcgcccggcagaacttccccctcttaacgttctgattcaaattaacattagtgatgaaaacagtaagtccgggattcaactggctgaactggacgagctggcagctgcggtcgctgaactaccgcgtttacgtctgcgcgggttgatggcaatccctgcgcctgagtcagaatatgtaaggcagtttgaagttgcacgccaaatggctgtagcatttgccggactgaaaacgcgctacccgcatatcgacacgctctctctgggaatgtcggacgatatggaagccgccattgcggcaggtagcacgatgtttgtagtgaaggtaacgcagccaattatcgggccactgcgccgcgttattccggcaatggggccaattgacagcgcctcgctgctggttgcctatattctcagttttatcaaagccatcgtgctgtttaaagtggtgaccttcctgccaatcatctggattgccggtttactgattctgctgaaaaccatcggcctgctgattttctgggtcctgctggtgatggcgattatgagctggtgcaagacagaattaattatctttcgcgatcttccggcgctcggtaaactgttcagccagtcgccgccggtcgcgctggatcaacgcttctttggtgacttcattctcgaagccagcgccaaatatgctgatgttgcgctgatatatggcctggaagacgggcgagaatatcgtgataagcagcaaacgctgggtgaaattgtccagcagttgttaggcgcggcaccggttgtcggtgaccaggtagagtttgccgggatgatctggacggtggccgagaaagaagataatgaagtgttgaagattggcgtacgggtggctgaagaggaagctgaatcttaa

SEQ ID NO: 143093 - DNA, 2253 bp, Homo sapiens
atggccccctggcaacccgccgaggggcatcgctttaacccggcgaagttgttgattgatccttgcgcgcggcaaattgacggggagtttaaagataacccgctgctgcacgccggtcataatgaacctgactatcgcgacaacgccgccattgcgccgaaatgcgtagtggtggttgatcactatgactgggaagatgatgccccgccgcgcacgccgtggggcagcaccatcatttatgaagcccatgtcaaaggattaacgtacttgcacccggagatcccggtcgagatccgtggcacttataaagccctcgggcatccggtgatgatcaactatttgaaacaattgggcattaccgcgctggaactgctgccagtggcgcagtttgccagtgaaccacgtctgcaacgcatggggctaagtaactactggggttacaacccggtggcgatgtttgcgctgcatccggcgtatgcctgctcgccagaaacggcgctggatgagtttcgcgatgcaatcaaagcactgcataaagcgggtatcgaagtcattcttgatatcgtgctcaaccatagtgcggaactggacctcgacggcccgttattctcgctgcgtgggatcgataaccgtattgatgttgatatttgtcgtggtgttgccgctgctgtatttggtgacgacacgaaagtgaaatataccccgctcactgcaaaagaacgcttcaccgctttacagtcaggggaggtggatttgctctcccgtaatacgacctggacttcatctcgcgatgccgggatgggaatggcatttaccggcgtcacttattacgacggcattggcttcctgacgcacgataaagcggggctaaaaagcgcgaaagaactggatggcgctaccgtctgtattcaggcgggtactgataccgaactcaacgtcgccgactacttcaaggcaaacaatatgaagtacacaccggtgactttcgatcgctctgacgaatcagcgaaggcactggaatctggtcgctgcgatacgctggcctcggatcaatcacaactgtatgccctgcgcatcaaattaagcaacccagctgaatggattgtcttaccggaagttatctcaaaagaaccgcttggtccggtagttcgtcgtggcgatgatgaatggttctcgattgcctacaaacggaacataaccgtaggtcggataaggcgtttacgccgcatccggcagccgttgcctgatgcgacgctgtgcgtcttatcaggcctacaaacggaacataaccgtagcctgctggcgctggaacagagtgcgcaagcggcgcgcaccatcgtccgtgatagtggtgatggtaaagtacagacgctgggcgcggtagagcatagcccgttgtatacctcggtagatccgctgcaaagcatgagccgtgaagagaagctggatatcctgcgtcgcgtcgataaggttgcccgcgaagcggacaagcgcgtacaggaagtgactgccagcctcagtggtgtctatgaattaattttggttgcggccaccgacggcacgctagcggcggatgtccgtccgctggtgcgtctttccgtgagcgttctcgtcgaagaagatggcaaacgcgaacgcggtgccagtggcggcggcggtcgttttggttatgaattcttccttgccgatctcgacggcgaagtccgtgcggatgcatgggcaaaagaagcagtgcgtatggcgctggtcaatctttctgccgttgctgcaccagcgggcaccatgccggtagtacttggcgcaggttggccgggcgtgctgttgcatgaagcggttggtcacggtctggaaggcgacttcaaccgccgtggcacttcagtatttagtggacaggtcggggagctggtggcttcagaactgtgtaccgtggttgatgatggcacgatggtcgatcggcgaagatcgggggggatggagagaaagtaccccagcagtaaagtgctgatgttttttttaaaggagtctcgctctgtcatcagcctggagtgcagtggcaggataaaggtggtaccgagctcgattgtaatcatgtcatataagtggcagagcaagaaaccaaacccaacactatccactttcaatgctgttaccgtccagctgtggccccagctcaaatcaccactaagaaaacagttttatttcagcaaacagcaaaaatacattgggaagaacgccggcctagttcccaagtag

SEQ ID NO: 143094 - DNA, 2853 bp, Homo sapiens
atgctgcaaggtgatttgcgcctgcttaacattggtcagagcattactttcggtgacttcaaaaataagttgccacgcttcaatctgatatttagccagcaactgactgacttcaacaggaaaacgagcctgacataccgaggttggagacagattaatagcaaacgcgtatgctcaatgacccacatgtcgatactcgacgataaaccaaattcgtgcgcgaccgacaagaaggtatcggggctgactcagttcatcatctcacgttggaccgccagcagtgctgctaataaaaagatacccacccaaatttcattttttttcgtttgcatgaactcaattcccaaacatcaatgcggtcagcacaaaatccagccccagaacagccagagacgagtggacaacgcggcggcagttttaccgatcaaccgcattattgaaggcttgcgcaagctggaaacggttatcgccatagataaccagtggacctcaacctgccgctttgccgatatcgtactgcctgcgaccacgcagtttgagcgtaacgatctcgaccagtacggcaatcactccaaccgtggcattatcgccatgaaacaggtggtgccgccgcagttcgaggcgcgcaacgacttcgatattttccgcgagctgtgccgtcgctttaatcgcgaagaagcctttaccgaagggctggacgaaatgggctggctgaaacgcatctggcaggaaggtgtacagcaaggcaaaggacgcggcgttcatctgccagcgtttgatgacttctggaataacaaagagtacgtcgagtttgaccatccgcagatgtttgttcgccaccaggcattccgcgaagatccggatctcgaaccgctgggcacgccgagtggcctgattgagatctactcgaaaactatcgccgatatgaactacgacgattgtcaggggcatccgatgtggtttgagaaaatcgaacgctcccacggtgggcctggctcgcaaaagtatccgttgcatctgcaatctgtgcatccggatttccgacttcactcgcagttatccttcgagcagtgcgcgggcttcttgcgcattaaccacggtgataacccgctggacgcgtctaccgttcacccggaagcctatccggtggtggaacgcattctggcagcaacacagcaggcactgaaagatctgatgggtaacagcagcgaactgcgtaacctgaaagcgtctgactttactgatgagaaattcggtgtgccgacggtaaccgacatcatcaaagagctggaaaaaccgggtcgcgatccgcgtccggaatttaaaaccgctcagtttgccgatggcgtcgagacaatgaacgacctgcaaccgggtatgatcctcgaaggcgcagtgaccaacgtcaccaactttggcgcgtttgtcgatattggcgtgcatcaggacggcctggcagaactgattaaagatgtttacggcattgatgacgcactgcgcgcgattgccggtgacagcgtttcaggcctcggaactggcggcatcaaccgtcacgttcgggcgcgcttcataaatcacgccaataacccccagcggtacgcgacgacgctcaacttgagtcatctttcagaggaattaagcaacctcccctatgccacacagctgagaaggaaagggatggatgaacctatggatttaaccgtgaccgcgcgcgctgtcgacgaatttggcgcgttgctgatcatcgatgaagtgatgaccggtttccgcgtagcgctagctggcgcacaggattattacggcgtagtgccagatttaacctgcctcggcaaaatcatcggcggtggaatgccggtaggcgcattcggtggtcgtcgtgatgtaatggatgcgctggccccgacgggtccggtctatcaggcgggtacgctttccggtaacccgattgcgatggcagcgggtttcgcctgtctgaatgaagtcgcgcagccgggcgttcacgaaacgctggatgagctgacaacacgtctggcagaaggtctgctggaagcggcagaagaagccggaattccgctggtcgttaaccacgttggcggcatgttcggtattttctttaccgacgccgagtccgtgacgtgctatcaggatgtgatggcctgtgacgtggaacgctttaagcgtttcttccatatgatgctggacgaaggtgtttacctggcaccgtcagcgtttgaagcgggctttatgtccgtggcgcacagcatggaagatatcaataacaccatcgatgctgcacgtcgggtggtttactgctggtgttcgctgactgatcccggcggggctgctgtcaacctttatcggcgcgccatattttatctatttgttgagaaagcagagccgttaatttttccatataacggccactgtacgcctggacggataaagcgtttacgcgacaacggatgcccgatgcgacgctggcgcgtcttatcgggcctacaaacggccccgaatcgtaggtcggataaggcgttcacgccgcatccgacaaaccatgctggatcacaacttcgcaaacacccgacgtgcagcatcgatggtgttattgatatcttccatgctatgatcgcgggtggcacaacgcacaccgcagcgcgcctctttatcactgacatcaacctcttttgcccactgtgcctgcgggaaacaatcaatcaaccgctggcgattctgctgctgatcgtcctcactgtacgccgtatcttcgctgccgcgatgataactggcaccaatacaatgatgttgattcgccggattttgtggcgtgagatcagcaagcaacacacagcgtag

SEQ ID NO: 143095 - DNA, 1434 bp, Homo sapiens; identical to SEQ ID NO: 115535

SEQ ID NO: 143096 - DNA, 918 bp, Homo sapiens; identical to SEQ ID NO: 136643

SEQ ID NO: 143097 - DNA, 1617 bp, Homo sapiens
atggtcactataaagccttatattcttggtgaaggtgacgatgaaacagcgaagaacgccgcagtgggcttcgcaaaagaaccggtagcccggaggaccgtatcatcaaactggcgctctggatcagagtgtctatatgatcatggtccgcaaatgacggcaatccgcgacggcgtccgcggcaaagataaactggatgtgcccattaagttcatctggaactacgcgggaaataccctcgttaatcagcattctgacatcaacaaaacgcatgaaattctgcaggacgaatcgaaatgcgaaatgattgtggtcatcgaaaactttatgacctcatcggcaaaatatgccgacattctgctgccagacctgatgaccgttgagcaggaagatattattcctaacgactacgccggtaacatgggatatctcattttcctccagcctgtcaccagcgaaaaattcgaacgcaaaccgatttactggatcctgagtgaagtcgcgaaacgtcttggacctgacgtctatcaaaagttcacagaaggtcgcacgcaggaacaatggttacaacatctgtacgccaaaatgcttgccaaagatccggcgttaccgtcttacgacgaactgaaaaaaatgggtatctataagcgtaaagatcccaatggccattttgtcgcctacaaagcatttcgtgacgaccccgaggcaaatccacttaaaacgccttccggtaagattgaaatgtattccagcaggctggcggaaattgcccgtacctgggaactggacaaagatgaagtgataagcccattgccagtttatgcctcaacctttgaaggtctggactcccctgaacgtaaaaccttccactggcactggttggttccattacaaattccgaatcatcaacttacggcatatgatctcctgaaggggaccaaaaaaatttcttcccccgaatggggcacggggctcacagaacacggacggtcaaccacacatcaaaggccgaagatgagcacacacgcacacacaaactctcgggagaaaacagcagagagaacaaccgaccgcactactgccaggcggcggctgaacagaaaccagccctttcaagagtccaccactgatatcaaccaaccagctgacactgcccctccttttctgcctgataagagaccaccaaccacagaacgattctggttagtctatggagaatgtgcagtaagggtgtcctttgcttcaccttttgacatagaagaactgaaaatgccacccttagatgatgctaatgcagccacttttgtacatgggacccacgaaggagcattgaactccattgcctggggcttagattgcgtctcgctccgcgcccttgtttgggtggtgtgcgggccgataggtatccttccgggatttaattccgatagaggaaatagccggacctctgacttccaggaatatgccaagttcagagtctccacaggtttttctcagggacagggtgtacaggaaaggggctcgttaagccatgcccaagggggagccttcagtcagagggcctgcccagcagagccagtggaaagagctggtttctggtccctggaacctggttaa

SEQ ID NO: 143098 - DNA, 2504 bp, Homo sapiens
  misc_feature (1)...(2504): n = a,t,c or g
gagttacttgcgcaacttggcgtgacctttgaacgtattgttacgggcattgaggagcagcgtcagccgcaggagagcgcgcagcagtatgttgtgcgtctggcgcgcgagaaagcacgggcaggtgtcgcgcaaacggcgaaggatctcccggtgctgggtgcggatactatcgttatcctgaacggagaagtgctggagaaaccgcgcgacgcagagcatgcggcgcagatgttgcgcaaattatcgggtcagacccatcaggtgatgacagcagtggcgttggccgacagccagcacattctcgattgcctggtggtcaccgatgtgactttcagaacgttaacagacgaagacatcgcgggctatgtcgccagcgatgaacagacacttttggcgaaggggttctatattgactccattcgcagccaccgccgtggattaaagccgagcgttatgcacaccgacgacacgctggtggatggcctgaagccggatatccccatgaaagagtcggtaaatctggtacgtcgcgacctgaatatggaagcggttgtcgcaccagagatttctccgacggtgggcgtggctgcggctttcgcggttaaccccattgttggcgcggcagtgtttgccgccagtaaagtgctggggccgctgtggagcaaagtctccattgtgcgctatcacatttcgggtccgctggacgatccgcaaatcaacgaagtgttgcgccaaccgcaatccggcagccgttgcctgatgcgacgctggcgcgtctttatcaggcctacaaacggaacataaccgtaggtcggataaggcgtttacgccgcatccggcatctcaatatcagatcttacatgcgccgctttcgcagccatccaactgctgcatcggcactttctgacgggaagcgtgacggatggcagcagctgatgccgcgtgtcgctctagaggatccattcggcaggtggaaatcgaagctgatggagcgcccgattgtggtcgcgaatggcaaagcgcggataggtcgtccaccggagcagggcagaaggtttacagttggagcccgagaagcgtgtcgatctagaggatccccgacgaaggtgtttacctggcaccgtcagcgtttgaagcgggctttatgtccgtggcgcacagcatggaagatatcaataacaccatcgatgctgcacgtcgggtgtttgcgaagttgtgatccagcatggtttgtcggatgcggcgtgaacgccttatccgacctacgattcggggccgtttgtaggcccgataagacgcgccagcgtcgcatcgggcatccgttgtcgcgtaaacgctttatccgtccaggcataaaatatggcgcgccgataaaggttgacagcagccccgccgggatctggaatggaaacagcaccatccgcccacaccagtcagcgaacaccagcagtaaaccacccaccagcgccgaaattacgatgtgtggcatcgtccgtcgaaagcccatcatccgcgcaatatgcggtgccattaaaccaacaaaactcaacggtccaatagtcatcgtcgcggtcgccgtcaggcaagccgctaacagcagcagcgcaattcgcgtcggcgtcagcgccattcctacggctcgggcggtatcaccacccagcggtaaaatggtcagccagccggcggcaacaagcgggggtaaatcgcccaaggcaaaaattccacccaatccaacaaattcccggtgcgccagacctgcgcatcggtcgcgtngtcgaaccggaaatccaggtcagcacttgcgccattcgcgggtcaccacttgcctgcaacatcatcaaaagcatgtgaacgcgtgcttaagcaaaatcaacagacaacagacgacccgcgaatgccggggaaaacgcagccttaaaataggccggatgcggcgtaaacgccttatccggcatacgattttattcggcctggctccccgtaggccggataagaacacatctattgttgttgttggtggtggtggtggttatgtaggcttgctgggcgaggatatcggcggcggtgatccagcgcagcgggatgcccggtgtgcgcgtatgcgggcggataaaaagctgctcgaaggcggtacgctgtcagcggcatgtctttgcaacatgtgtctggaacggacgtcaagtcacgtccggcgcaggaacgtggtcaacaatcgcctggtacagcggggtcatgtcttccgccatatcttcgtggtccagacccgcgataccgttcagcgcagaagcgtaaacgatcgggaagtccagctgctcgtcggtcgcgtcgaggttaacgaacagatcgaatacctgatccacaacccaatcaggacgcgcgccagggcggtcaactttgttgataacaacaatcggcttcaggccgtaagcaaacgcttttttggttacgaagcgcgtttgcggcatcgggccgtcaaatgcgtcaaccaccagcagcactga

SEQ ID NO: 143099 - DNA, 1602 bp, Homo sapiens
atgaatcaaatagacgcaataaaaaatgataaaggggatgtcaccgccgatcccacagaaatacgaactaccatcagagaatactacaaacacctctacgcaaataaactagaaaatctagaagaaatggataaattcctggacacatacactctcccaagattaaaccaggaagaagttgaatctctaaatagaccaataacaggagctgaaattgtggcaataatcaatagcttaccaaccggacagagtccaggaccagatggattcacagccgaattgggtaccgagctagaccataccagtgaaggccaccgcgtgtcggtccactacggctatgacgataaaggccgcctgaccggcgaacgccagacggtggagaacccggagacgggggaactgctgtggcaccatgagaccggacatgcgtacaacgaacaggggctggcaaaccgcgtcacgccggacagtctgccgccggtggagtggctgacctacggcagcggctatcttgcgggcatgaagctgggcgggacgccgctgctggagttcacgcgcgaccgcctgcaccgtgagacggtgcgcagcttcggcagcatggcaggcagtaatgccgcatataaactgaccagcacatacacccccgcaggccacgttacagagccagcacacttgaacagcctggtgtatgaccgtgactacgggtggaatgacaacggcgacctggtgcgcatcagcggcccgcgacagacgcgggaatacggctacagcgccacgggcaggatggagagtgtgcgcaccctcgcaccagacctggacatccgcatcccgtatgccacggacccggcgggcaaccggctgccggacccggagctgcacccggacagtacactcacagtgtggccggataaccgcatcgcggaggatgcgcactatgtctaccgccacgatgaatacggcaggctgacggagaagacggaccgcatcccggcgggtgtgatacggacggacgacgagcggacccaccactaccactacgacagccagcaccgcctggtgttctacacgcggatacagcatggcgagccactggtcgagagccgctacctctacgacccgctgggacggcgaatggcaaaacgggtctggcggcgggagcgtgacctgacggggtggatgtcgctgtcgcgtaaaccggaggtgacgtggtatggctgggacggagacaggctgacgacggtgcagactgacaccacacgtatccagacggtatacgagccgggaagcttcacgccgctcatccgggtcgagacagagaacggcgagcgggaaaaagcgcagcggcgcagcctggcagagacgctccagcaggaagggagtgagaacggccacggcgtggtgttcccggctgaactggtgcggctgctggacaggctggaggaagaaatccgggcagaccgcagcccacattccacaatccgcgctaccttccaatatacacccatcatcgcgttcggattgctccacatccacagaagtgcacgcggacgtgctctctacaagaaccaatgccgtggcctgatgcgcccattaagcgcgggg

SEQ ID NO: 143100 - DNA, 3794 bp, Homo sapiens
ctgtacttcagcagggccgcctgggggatctggtagttggtcatgggctttctgaaggagtagatcttctggagaataaactcccggatcttcgtcactgcatttcgggtccgctggacgatccgcaaatcaacgaatgtttgcgccaaccgcgtaaagaaaaagcgcaatgatttgacgagggcgcgtaattgccccaatctcataggataatcgttgccaaaggccaacgagccagaacataaccgtaggtcggatagggcgttcacgccgcatccggcagccgttgcctgatgcgacgctgtgctgtcttatcaggcctacaaacggaacataaccggaggtcggataaggcgtttacgccgcatccggcagccgttgcctgatgcgatgctgtgcgttttatcaggcctacaaacggaacattaccgtaggtctgataaggcgtttacgccgcattcgacagccgttgcctgatgcgacgctgtgcgtcttatcaggcctacataccggaacataaccgtaggctgaacggcctgaaacatcaggacttgttcgcgatcctcggtcaactggccgaacgtcgccttgattatggcgatctctattttcagtcgagctatcacgaatcctgggttttagaagaccgcattattaaagatggttcttacaacatcgatcagggcgtaggtgtgcgtgcaatcagcggtgaaaaaaccggatttgcttacgctgaccaaatcagcctgctggcgctggaacagagtgcgcaaacggcgcgcaccatcgtccgtgatagtggtgatggcatggttgtcggatgcggcgtgaacgccttatccgacctacgattcggggccgttgtaggcccgataagacgcgccagcgtcgcatcgggcatccgttgtcgcataaaatatggcgcgccgataaaggttgacagcagccccgccgggatctggaatggaaacagcaccatccgcccacaccagtcagcgaacaccagcagtaaaccacccaccagcgccgaaattacgatgtgtggcatcgtccgtcgaaagcccatcatccgcgcaatatgcggtgccattaaaccaacaaaactcaacggtccaatagtcatcgtcgcggtcgccgtcaggcaagccgctaacagcagcagcgcaattcgcgtcggcgtcagcgccattcctacggctcgggcggtatcaccacccagcggtaaaatggtcagccagcggcggcacagcgggcctgtccagcagccgcaccagttcagccgggaacaccacgccgtggccgttctcactcccttcctgctggagcgtctctgccaggctgcgccgctgcgctttttcccgctcgccgttctctgtctcgacccggatgagcggcgtgaagcttcccggctcgtataccgtctggatacgtgtggtgtcagtctgcaccgtcgtcagcctgtctccgtcccagccataccacgtcacctccggtttacgcgacagcgacatccaccccgtcaggtcacgctcccgccgccagacccgttttgccattcgccgtcccagcgggtcgtagaggtagcggctctcgaccagtggctcgccatgctgtatccgcgtgtagaacaccaggcggtgctggctgtcgtagtggtagtggtgggtccgctcgtcgtccgtccgtatcacacccgccgggatgcggtccgtcttctccgtcagcctgccgtattcatcgtggcggtagacatagtgcgcatcctccgggatgcgggttatccggccaactgtgagtgtttcggcccgctacgcgtccggcaccgttgcccccgggtccgcgcttacggattcgattccactctgtgccggttgcccccttctcgcggccgggccttacgtttccgtttttggcgctttacccatgacgttataacccgaagaggaaaacgaggaggggctataaccgggggttgtgacatagtacagatgttcacagaaggtcgcacgcaggaacaatggttacaacatctgtacgccaaaaggcttgccaaagatccggcgttaccgtcttacgacgaactgaaaaaaatgggtatctataagcgtaaagatcccaatggccattttgtcgcctacaaagcatttcgtgacgaccccgaggcaaatccacttaaaacgccttccggtaagattgaaatttattccagcaggctggcggaaattgcccgtacctgggaactggaaaaagatgaagtgataagcccattgccagtttatgcctcaacctttgaaggctggaactcccctgaacgtagaaccttcccactgcaactgtttggtttccattacaaatcccgtactcactcgacctacggcaatattgatctcctgaaggctgcctgccgtcaggaggtgtggatcaaccctatagatgcgcagaaacgtgggattgccaacggcgatatggtgcgggtgtttaaccatcgtggcgaagttcggctaccagccaaagccaatatgtctggcgataaaatcgaccatggcggctgtgtgaatacgctcaacactctgtgggcctttaacattggggaagggaacccgcagcaactatcggtccagatcggaaaatataccacgacacgtattcgggtgacctcggcgaagccacatggcacgcggaacctcccgagggccagaaggaacacagaactgaaactcgctggatgccgcagagacacgacggatacaggcggggaccgaaacaggggacccagcaccggactgcaaccgggcgaggcaactgagtccaaaaatcggagatatagagttgtcacggccgtacacgacacgcagcacccgcccaccagcccccccctccccgcaccggctcgcaacccccctcaccgcgtgaaacttaaactactacacgtccagcagcagacgcgtcggatcttccagcaactctttgatcgttaccaggaagcccacggattcgcgaccatcgatcagacggtgatcgtaggacagcgccaggtacatcatcggcaggatctcaacctgaccattcaccgccatcggacgatctttgatagcgtggatacccagaattgggctcttgggcgggttgataatcgggttaacattcggggaaccggaacacccccgtgcacgaagccacaaaggaggcgggagctgacgcagacgccgacgacagagactgagccagaacagggaaaacgcgaacaccgaggagaccgagggagggcagaggaagcagacaaggcgagagccgacgaccagcggcgaggcgggaggcgggagagaagcggcgagaccgagaacaagaccgagcagagggagaggaagaaacggcgaaaccacgcgcggggaggcagaccacccaaggacagacggcgagagaaagagagagacggcagagcaaccgctcgaacagcggcgcgcggggcgggaaccggaacaggaagagagagaacaaaaacggaacgcagagcaagcgaggaaggatgcaagagagagggaaggaggaagacgaacaggaacggggaggagacgagacaagcgcgagcaagaacaggacaaaaaagagaaggacgaagcacagggggagtagagacagcgacggaagaagacgaggagaaagagaagcagagacgagagagagacgccacgcaaggaagcgggacaaggcgtagcgaagacaacgcagcaagcaacacgaacaggcaagcggagcgaaaggagaaggagacagcagaggaacggacgagatga

SEQ ID NO: 143101 - DNA, 1182 bp, Homo sapiens
ctaagacgtgactcgtaatgccagcaacgaccagtccgtttcgcgcccttgatgtatgcgaatacctgccagcatgcgttgcggtaatttctggctgccatccatcgcgatttgccaggtcttatgtttcagcgccggattagcaaaacgtgcaattaacttatccgcatattgtgttaaatcgacatctttaatttgcagtgtcggcgcttgctcatccagcattaatgttctggcggcatggcgaaatgcgcgatcctgcatgcaatcactgatatgggcgaatcctgagaggtaacccagataagcgagaaaagagtggctgccattaagcatccgcagtttcatctcttcccatggcaggacatcattcaccatttgtacacctgcgacttcccaggcaggacgcccagcgacgaagttatcttccaccacccacgtcggaacccgtgaagaaagccagcgcgtcattgacgccttacgtgcggagcaagtttgatgagtcagaagtatctttttatcgatcgcgatggaaccctgattagcgaaccgccgagtgattttcaggtggaccgttttgataaactcgcctttgaaccgggcgtgatcccggaactgctgaagctgcaaaaagcgggctacaagctggtgatgatcactaatcaggatggtcttggaacacaaagtttcccacaggcggatttcgatggcccgcacaacctggtaccgagctagaatcgtctcaaccgagctaaggtgtatcaaaaatcccaaaggaaccgtgacgacaaagcccagtacgctcacagccaatgacgttgtaccagtacgggtgtagcacattaaacgccggctgcgcaataaattaatttcagggagaatgccggcggtaatgcgcttgccagtgcttatcatctgcagatgttcgctgttcaaatgacatgccataccaacgagaagcagtgccagtggcatcagaatcagcttcaggaaggtgttataagcaatttcggcactgaactcgaatttatgtgcagccagagtcaaccccgcagcgaataccgctacccctgagttagccttcgcaatcagattaaaggttgggtcccatgctgccggaatttttaccccaaccaacaccaggatcgttgccagaacaggtgcccatactactggctccat

SEQ ID NO: 143102 - DNA, 2163 bp, Homo sapiens
ttaaaacgccacgatctttgcagggcgattggtgaactgatcacctttgaggtgaaagatgtcgcgcaactgaccaatccgctgccgaaagggccgtacggcacagtgttgagcaacccgccatacggggaacgtctggacagcgaaccggcgctgattgcgctgcatagcctgctgggtcggatcatgcacaaacaagttggtggctgggaatctacatgatacattcagctcggtaccaatcccctggttacccgagccggagttactcatagccggaagcgtagcgccgcccatacgcgcatcggatgccgcgctggtacgaatcacaatggatgaagagagatctttcgccagcaaaccgcgctcgcactgtttttccagcgtcgcgccaatatgcagcccccacttaccgctcaaaccttcctgcgataacgcacaatttagcttcgcggaatcgagaataaagcggatcgccgcaaacgggacttcattgacgaacttcaggatctcagccagcgtcgttctggaaagcaccgtcagcggagactcttgctcgccctctgccacacacgcctgctgggtaaacaccacaccatcgtgcgtctcgatatgcacaatgttggtatgcccgccgacgatggtgacacacgcccacttctcaccgttccagactttggcgcgtgagaagaggatttcatcgcaaggttcctggatcttaacggagactttccccgccgccagcagtgcttccagttctggcggagcaaccgccgccgccagcgccatgaaatcgttttgaggaagaataaagatgttcggaaaattatcacttgatgcagtcccgttccatgaaccgcctgcgtgcgctttacgcccagtaattccgattaacgcttgcaccctccgtattaccgcggctgctggcacggagttagccggtgcttcttcatgtgtgaatagattttgagtaagcagggttgcagccacgagtgagtcttcccttgttattgtgtagccagaatgccgcaaaacttccatgcctaagcgaactgttgagagtacgtttcgatttctgactgtgttagcctggaagtgcttgtcccaaccttgtttctgagcatgaacgcccgcaagccaacatgttagttgaagcatcagggcgattagcagcatgatatcaaaacgctctgagctgctcgttcggctatggcgtaggcctagtccgtaggcaggacttttcaagtctcggaaggtttcttcaatctgcattcgcttcgaatagatattaacaagttgtttgggtgttcgaatttcaacaggtaagttagttgctagaatccatggctcctttgccgacgctgagtagattttaggtgacgggtggtgacaatgagtccgtgtcgagcgctgattttttcggcctttagagcgagatttatacaatagaatttggcatgagattggattgcttttagtcagcctcttatagcctaaagtctttgagtgactagatgacatatcatgtaagttgctgataggtttccagttttccgctcctaggtctgcatattgtacttttcctcttactcgacttaaccagtaccaacccagcttctcaacggatttataccatggcactttaaagccagcatcactgacaatgagcggtgtggtgttactcggtagaatgctcgcaaggtcggctagaaattggtcatgagctttctttgaacattgctctgaaagcgggaacgctttctcataaagagtaacagaacgaccgtgtagtgcgactgaagctcgcaataccataagccgtttttgctcacggatatcagaccagtcaacaagtacaatgggcatcgtattgcccgaacagataaagctcttcacacctggaggaaggggaccgggcagggggtgggaccacgatattcccagagggaaaagcaaaagctgaggggaaggagaggagggtccaggagatggaaactcaggtcccctagaccaacgagccggctgtctagttgctcgctgaatcttttcatgattgtgttcttcatggctcgattcaccgaaaaggcggatttccgtctggcagcttgaacccattctcaaggtcttatagtctcccaagcccaacttgtccccgctgcccat

SEQ ID NO: 143103 - DNA, 2453 bp, Homo sapiens
atgggtcaggaaaagctatacatcgaaaaagagctcagttggttatcgttcaatgaacgcgtgcttcaggaagcggcggacaaatctaacccgctgattgaaaggatgcgtttcctggggatctattccaataaccttgatgagttctataaagtccgcttcgctgaactgaagcgacgcatcattattagcgaagaacaaggctccaactctcattcccgccatttactgggcaaaattcagtcccgggtgctgaaagccgatcaggaattcgacggcctctacaacgagctattgctggagatggcgcgcaaccagatcttcctgattaatgaacgccagctctccgtcaatcaacacctgaccagctgcctgatcaaaccgccgttaacttcggtgcattgcccgtatatttttcgatatacaccaacgctgagttaccggcacaggcatttgccagctgcgagctggggatatccgccgttaacacccattttccagatctggccatgcaccttcatgcacgcataccacgccttttttgatcccgtcagtcaccaccgcgcctgtcaaaatctgaccacgtttgttccagacacgcaccagatcgccattcgcaataccaaagcgtgcagcatcttcgaacgcgaatacctgatggccgcactggaaagagatcccctgcgtagagcagttttcgactctgaaaccaactacattctggcgcgctttaaagcctccagtgcggtgtttaaatctttgtgggatcagggcattatcttacgtgatcagaataaacgaccctctttaagcggctgcctgcgaattaccgtcggaacccgtgaagaaagccagcgcgtcattgacgccttaccaagtttgatgagtcagaagtatctttttatcgatcgcgatggaaccctgattagcgaaccgccgagtgattttcaggtggaccgttttgataaactcgcctttgaaccgggcgtgatcccggaactgctgaagctgcaaaaagcgggctacaagctggtgatgatcactaatcaggatggtcttggaacacaaagtttcccacaggcggatttcgatggcccgcacaacctgatgatgcagatcttcacctcgcaaggcgtacagtttgatgaagtgctgatttgtccgcacctgcccgccgatgagtgcgactgccgtaagccgaaagtaaaactggtggaacgttatctggctgagcaagcgatggatcgcgctaacagttatgtgattggcgatcgcgcgaccgacattcaactggcggaaaacatgggcattactggtttacgctacgaccgcgaaaccctgaactggccaatgattggcgagcaactcaccagacgtgaccgttacgctcacgtagtgcgtaataccaaagagacgcagattgacgttcaggtgtggctggatcgtgaaggtggcagcaagattaacaccggcgttggcttctttgatcatatgctggatcagatcgctacccacggcggtttccgcatggaaatcaacgtcaaaggcgacctctatatcgacgatcaccacaccgtcgaagataccggcctggaatcagctcggtacctaaattgcgctcaaatgcgaaagcatcagcgcacgcgccagccgttcatcatcgccgaagtgttctgctaccaccaccacaggcattgttgcggtttggaccggaaactttcaaggatctcaagccagcgtcgttctggaaagcaccgtcagcggagactcttgctcgccctctgccacacacgcctgctgggtaaacaccacaccatcgtgcgtctcgatatgcacaatgttggtatgcccgccgacgatggtgacacacgcccacttctcaccgttccagactttggcgccggtgatatcgcacagtcgcgggaaatgctcgaaccggcgcataaagggcttccggacgatccggcactgatccgacaactggcctacgtgaaccagcgtctggatgacatgcctgcgacgcagcactacgcccggctggtgattgatgacattgataatcaggcgctgataaccccactgaccccagaacaaaatcaacaacgcttcaatttccgccgtttgcatgaggaggtcggtcgccgctggacgttcagtttcgattcttccatcggcttgcgttccggcgcaatgagtaccgctaacaataatgtcggcggcgcagcgccagggaaaagctatcgtagctacggacaactggaagccgagtaccgcatcggacgcaatatgctgctggaaggcgacctgttctcagtttatagccgcgtctttgccgataccggagaaaacggggtgatgatgccggtgaaaaataagatgtccggcaccggtatgcgcaggaatccgctgctcgatcagatctccgggtcggacgcttgaattagataatgagg

SEQ ID NO: 143104 - DNA, 175 bp, Homo sapiens
tcagtgtagactggcattatccaatccttgcagatcttcttcttcttcttcttcttcttcttcttcttcttcttcttcttcttcttcttctccttctccttctccttctccttctccttcttcttcttcttcttcttcttcttttttgagacagagcctccctctattgcccagc

SEQ ID NO: 143105 - DNA, 414 bp, Homo sapiens
atgaagaagaagaagaaggagaaggagaaggagaaggagaagaagaagaagaagaagaagaagaagaagaagaagaagaagaaggaagaagaagaagaaggaagaagaagaagaagaagaagaagaagaagaagaagaagaagaagaagaagaagaagaagaagaagaagaagaaagaaagttctttctccttcttcaactgacctgaaatccagcagtgccaagctgagatctgcagccagcactcaagtgggagaggagcccacacagaacactaagagggagaacaggtgcaaatgtgagaaaacacaggagagccatgtggctaagcaaaagcctacatacaggccattaagtgtaaatgccatctactggattacaggatacattgaaccaccaaaaatacttcgctaa

SEQ ID NO: 143106 - DNA, 391 bp, Homo sapiens
  misc_feature (1)...(391): n = a,t,c or g
tttcgcaaacatgcgccgctgttggtgcgccagctctataatgtcggggtcctgtcgatgctgattattgtggtttctggcgtgttcatcggaatggtgttggggctgcaaggttatcctggttctgaccacttatagtgcggaaaccagtctgggtatgctggtgagcngttatcgctactgcgtgaactggggccggtggttgccgcgttgttgtttgccgggcgtgctggttcggcgctaaccgcagaaatcggcctgatgcgcgctacagagcaactctccagtatggagatgatggcggtggatccgctgcgtcgggttatttctccccgtttctgggctggggttatttcattaccactgttgacggttaatttcgtcgccgtgg

SEQ ID NO: 143107 - DNA, 1641 bp, Homo sapiens
atggcaactgagtttatgactcaggtagcgaagctggaaggtatcaggaagatcaagcgaaaaaactggcgaaacagcaagttgaaggtgatcagcaatggggcagatgttccgtctgaccaccttgcaggacaatacctcaccaccagcctgcaatatgctaacggccggataaggcgttcacgccgcatccggcgatgtgcactgaagcctgatgcgacgcttaccgcgtcttatcatgcctacggttacgcattacgttgcaacaacatcgacttgatatggccgatggcgcgcgcggttcatgatgctgtgaagcggaatacgctgaatgcatcactcaaaccgtcgaggcggctgtcagttcggtatcacggctatcaatcaggaaacgatatgccgctaacaagcctgcgggccgataaacttatcgggattccaccagaaagacggacaagagcactgctggcggcgctgtttgtttgcctgaaggcggcgaacgtgactccatacgtactgaaccgacctacacgctttatgcgacgttcgataacatggcggcctgaaagcgcgctctccggtcagtattggtggcgttgttgtggtcgggtggcggatattacgctggacccgaaaacctatctgccgcgcgtacgctggaaattgaacaacgttataaccacattccagataccagttcgcgagcattcgtacttccggcctgctgggggaacaatatctggcattaaactcggttttgaagacccggaactggggactgctatcctgaaggatggcgaacaattcaggacactaagtctgcgatggtggacctgcaggcatgataaatcaaagcccacagcagtccccggtgttgacatcaaacccacgattcacgccagacgtttcgcggttgagaagttatcggatcgtaatgccatttctctttgccgctggcgcatcaagcgcaaacaggcgctggtgagcggtacacaggatcagccagatgccgaagaagaccagaatgtcgctgcgcggatcagcgcccagaagtcgaaaccaacttcccagacgccccaaatcatggtccgagcagcagggctgcgtatagccaaagcgcggcgcgtttactgcgcccagcatccaggcgacgccgagcatcacaaggccagcgatagggtactatcttcgacctcaataccatcagactgccagtatacgagtgtcaatgaggattcaattaaacggcataattgcttctacggcgcgcatcaggcgctgttcgatatcacgctggattcccacagggcgaaacgctggtgttacttggccccagcggcgcggcaaaacctgattgaagcgccctgcgtgtactgggggttgataaagatcaagcgctggcccgtgcagaaaaatctggaacgttgcgtctcaaaccttatagcgatcgttacccgctgcatcttctggtgtcaagcagcagcgtgttgctattgcccgtgcgttgatgatgacccgcaggtactgctgttcgatgaaccgaccgccgcactgaccccggaattacggcacaaatcgtcagcatcattcgtgagctggcagaaacgaatatacccaggtgatcgtcacccacgaagttga

SEQ ID NO: 143108 - DNA, 3039 bp, Homo sapiens; identical to SEQ ID NO: 132350

SEQ ID NO: 143109 - DNA, 1422 bp, Homo sapiens
atgaggactgggcacggcgggcccgcgaggagcagcagccttccggctgcggagctgctccaggaagtctcgggctccggaggtccctctgccgcccctaacccctgcggcgcccagtgccgcgcagagccgcattcgccctcctgcagggggctcatagaaacatcatacaagatggtgacaatgtccccagtcagccgcatgcaactggaagttcaaggacctgcagctcactctggaggagaaaacaccttcacttgggaatgggctgacccttctgcagctggcatcctaagctgtgtcaagcagtctggagccaagagtcactcacactgggccactgaggaacagcatgaaaacagaaggtggcgtggggaagatgacgatgagaaacttaacccaacagcaaaaatcaggaaaggaatgcatgcaagtataataagtaataagcaagatgcaaagaataaaatcaagtatatctggctcatcttcctttactcagctgttcgagggaacaccttgcagcacaaagaatgccttgaggaaaggggccctgttaatcccctggaatccccaacaattgactgccgcataaaaggaatgaggaaagcaatgagagccagtgaaggaattcggcttgatgcgcgctacagagcaactctccagtatggagatgatggcggtggatccgtggcgtcgggttatttctccccgtttctgggctggggttatttcattaccactgttgacggttattttcgtcgccgtggggatctggggcggatctctgcactgctggcggcgctgtttgtttgcctgaaggcggcgaacgtgacgtccatacgtactgaaccgacctacacgctttatgcgacgttcgataacattggcggcctgaaagcgcgctctccggtcagtattggtggcgttgttgtgggtcgggtggcggatattacgctggacccgaaaacctatctgccgcgcgtaacgctggaaattgaacaacgttataaccacattccagataccagttcgctgagcattcgtacttccggcctgctgggggaacaatatctggcattaacagtcggttctatagatgcgaaaagttccattaacttaatgtccaaaagcaagtttagtcctttggtttccctacttcaaaatgtagcatttgccttcttcatgaccaaaaaaagaggaagaagaagaaggagaaggagaaggagaaggagaaggagaagaagaagaaaagaagaaaagaagaagaagaagaagaagaaggagaaggagaaggagaaggagaaggagaagaaaagaaaagaagaagaagaagaagaagaagaagaagaagaagaagaagaagaagaagaagaagaaaaaatgtatgcatatggatgtccaagccagaaaaacaaataa

SEQ ID NO: 143110 - DNA, 1503 bp, Homo sapiens
atggtggagcttgacgcactggcaaaaccttatcgcttcccgttagcgggcgtgcatggggcggagcgccgtgacatcaatggtaaaacacatatcgttcatctgccggatgcgattgcgcgtgatattagcgtgcaactgcatacagtcatcgctcagtatcccggcgcggagctggaggcgaaagggatggcttttgcgctgcattatcgtcaggctccgcagcatgaagacgcattaatgacattagcgcaacgtattactcagatctggccacaaatggcgttacagcagggaaagtgtgttgtcgagatcaaaccgagaggtaccagtaaaggtgaggcaattgcagcttttatgcaggaagctccctttatcgggcgaacgcccgtatttctgggcgatgatttaaccgatgaatctggcttcgcagtcgttaaccgactgggcggaatgtcagtaaaaattggcacagtatctaaccggattgcaccaccagacgagcacgccgccagtgccggtggccttgccgttggcatactgggggcactgaaagccgcaggcggactgtggtttggctggagtggtgaaacagggaatgaggatcagccgctaaaaaaggtgaaaaaaggtaaaaacagcaaaatcggtgcaggttcgcgtctctgggcgaacgtaaccatttaccatgagatccagatcggtcagaattgcctgatccagtccggaacagtggtaggcgcagacggctttggttatgccaacgatcgtggtaactgggcgattgatttgccgtcgcgcctgctttcgccggatgcgcagcactggctgggcaccgatcacttaggtcgcgatattttctcgcggctgatggcagcgacccgcgtgtcgctcggttcggtaatggcctgcctgctgctggtgctgacattagggctggttattggcggcagcgccgggttgattggcgggcgcgttgatcaggccaccatgcgcgtcgccgatatgtttatgaccttcccgacctcgattctgtcgttctttatggttggcgtgctcggcaccgggctgaccaacgtaattatcgccatcgccctgtcgcactgggcgtggtatgcacgcatggtgcgcagcctggtgatttcactacgccaacgcgagtttgtgctggcgtcacggctttccggtgcgggccatgtgcgggtgtttgtcgatcatctggcaggcgcggtgatcccttcgctgctggtgctggcaacgctggatatcggccatatgatgctgcacgtcgcggggatgtctttccttggcctcggtgtgaccgcgccgaccgccgaatggggcgtgatgattaacgacgcgcgccagtatatctggacccagccgctgcaaatgttctggccggggctggcgctgtttatcagcgtgatggcctttaacctggtgggtgacgcactgcgcgatcatctggaccctcatctggtgacggagcacgcacactaa

SEQ ID NO: 143111 - DNA, 1762 bp, Homo sapiens; identical to SEQ ID NO: 138380

SEQ ID NO: 143112 - DNA, 1122 bp, Homo sapiens
atgtcgctagcctttttgccggatatcaaaaccgaatcaactaccgcttctggtctgccggtgttctataaaaacaaaatggatacccacgccaaagccattgacggctatacgccgcgcgattacttaacccactggttaagtcagtgggtccgcgactatgggattgatggttttcgggtcgataccgccaaacatgttgagttgcccgcctggcagcaactgaaaaccgaagccagcgccgcgcttcgcgaatggaaaaaagctaaccccgacaaagcattagatgacaaacctttctggatgaccggtgaagcctggggccacggcgtgatgcaaagtgactactatcgccacggcttcgatgcgatgatcaatttcgattatcaggagcaggcggcgaaagcagtcgactgtctggcgcagatggatacgacctggcagcaaatggcggagaaattgcagggtttcaacgtgttgagctacctctcgtcgcatgatacccgcctgttccgtgaagggggcgacaaagcagcagagttattactattagcgccaggcgcggtacaaatcttttatggtgatgaatcctcgcgtccgttcggtcctacaggttctgatccgctgcaaggtacacgttcggatatgaactggcaggatgttagcggtaaatctgccgccagcgtcgcgcactggcagaaaatcagccacgcaatattgtcctgcatccatttaccgagccacggcttcaggtcgatgtcatccgcctggagccagacgcgaccattgcttaacaacccctcatcatcgcgcaaatccatgcgcacctgcatcacgccgtgctgtccggcgttttatatttcgccaaattacctctcgcacctgtttcaaaaaacgggggccattggttttaacgaatacctgaatcacacgcgactggagcacgctaagacgttattgaaaggctatgacctgaaggtaaaagaagtggcgcacgcctgcggctttgtcgacagcaactacttctgccgtctgtttcgtaaaaacaccgaacgctcgccgtcggaatatcgccggcagtaccacagccaactgacagaaaaaccgactactccagaataa

SEQ ID NO: 143113 - DNA, 2600 bp, Homo sapiens
cgccgcctcaatggcgattgttcagggacggcgaatatacgctgcaaatagacacccgctccggtacgccaacattgatgatttccatccagaacgccgccgaaccggtagcaagcctggtccgtgaatgcccgaaatgggatggattaccgctcacagtggatgtcagcgccactttcccggaaggagccgccgtacgggattattacagccagcaaattgcgatagtgaagaacggtcaaataatgttacaacccgctgccaccagcaacggtttactcctgctggaacgggcagaaactgacacatccgcccctttcgactggcataacgccacggtttactttgtgctgacagatcgtttcgaaaacggcgatcccagtaatgaccagagttacggacgtcataaagacggtatggcggaaattggcacttttcacggcggcgatttacgcggcctgaccaacaaactggattacctccagcagttgggcgttaatgctttatggataagcgccccatttgagcaaattcacggctgggtcggcggcggtacaaaaggcgatttcccgcattatgcctaccacggttattacacacaggactggacgaatcttgatgccaatatgggcaacgaagccgatctacggacgctggttgatagcgcacatcagcgcggtattcgtattctctttgatgtcgtgatgaaccacaccgggtatgccacgctggcggatatgcaggagtatcagtttggcgcgttatatctttctggtgacgaagtgaaaaaatcgctgggtgaacgctggagcgactggaaacctgccgccgggcaaacctggcatagctttaacgattacattaatttcagcgacaaaacaggctgggataaatggtggggaaaaaactggatcagaacggatatcggcgattacgacaatcctggattcgacgatctcactatgtcgctagcctttttgccggatatcaaaaccgaatcaactaccgcttctggtctgccggccggcaaaacccgccaggaagcaggggacctgcccgacaataccccccagatgcagacctccgtcgtcatcaggaacagcggtgtgtacgggcgatcaggtagccaccgccggttaccatggtttacggcgtggatcagcgcggagacaggcgtcggggcccgccatcgcgtcggcaagccatgtctgcaacggcaactgcgcagatttaccgcccgcaccgcccagcagcatcagcgtcgcccacatcagcatgttattgccgtcagcaaagtgcgctggtgccagttccaccatttcgcggaagttcagggtgcccagttcgttgtaaagaatgaacagtgcgaaagcgaggaacacgtcacccacacgggtcacgacgaacgctttcattgccgctgcgccattcttcggatcggtgtaatagaacccgatcagcagataggagcacaggcccacgccttcccagccgaggtacatcagcagcaggttgtcggcaagcaccagaaccaccatgctggcgatgaacagggttatatcgacaggaaaggagatatggcaaaggggattggattttttgcacggtgcctcatgtgccagcctgcttcaacacaaggtaacagaaaaatttccaacccaattttttcaaatgaacatttgccggtatttcaccaacgtcttatggaaattgttaatgagagcatcattaaaattaatgaaaataatcgcatctgcctccgattctctgcagaagcagaaagacattggatcgaattctacaaccaggtcgagtcagaaatgagaatgattggccttctttatgattttaaggattatgcttctaaaatggcggagaacatggcgaggcttgctgccttacttcattacttcagcggtgatggaggcgatatatctgttaccgcagtaaaagcagcagtggagatagtggcttggtatattgaagaatacatccgcttgttctctaaaaaagaagagttttctttagatgtttcagaagcagatgagctttattgttggataaaagattactgcacgcaaaaattttcttcctgcatcaagaaaaatgtttctttagagcgcatcacaattatcgcccgggagaagatgatgaaaaagactgccgcaattatttctgcctgtatgctgacttttgccctgagcgcctgttccggttcgaactatgtgatgcacaccaatgacggacgtaccatcgtctctgacggcaaaccacagactgataacgataccgaatatcagataattatctccccggagtatcaggggaaaggtctggcaacccgtgccgccaaattagcaatggactatggctttaccgttctcaatctctataagctgtatctgatcgttgataaagagaatgaaaaagcgattcacatttaccgcaagcttggcttttcggttgaaggtgaattgatgcacgagttctttattaatggtcaatatcgtaatgccattcgcatgtgtatattccagcatcagtatctggcagagcacaaaacaccgggtcagactctcctgaagccgaccgcacaatag

SEQ ID NO: 143114 - DNA, 1248 bp, Homo sapiens; identical to SEQ ID NO: 142723

SEQ ID NO: 143115 - DNA, 1633 bp, Homo sapiens
ttggggtccattgcaacccgaggcgagactagagttcccaagcgagaagggaagaggcagtgggtgcacgtggaaggcggacagagggctggaaacaagacgctccagaatcaggagcttcccctcaggaaatagcatcctgtgtccccgcactgcagttgtctggtctctccagcagtttggtacttccggctgctgcaatgcgtgtggtggtgattggagcaggagtcatcgggctgtccaccgccctctgcatccatgagcgctaccactcagtcctgcagccactgcacataaaggtctacgcggaccgcttcaccccactcaccaccaccgacgtggctgccggcctctggcagccctacctttctgaccccaacaacccacaggaggcggactggagccaacagacctttgactatctcctgagccatgtccattctcccaacgctgaaaacctgggcctgttcctaatctcgggctacaacctcttccatgaagccattccggacccttcctggaaggacacagttctgggatttcggaagctgacccccagagagctggatatgttcccagattacggctatggctggttccacacaagcctaattctggagggaaagaactatctacagtggctgactgaaaggttaactgagaggggagtgaagttcttccagcggaaagtggagtcttttgaggaggtggcaagagaaggcgcagacgtgattgtcaactgcactggggtatgggctggggcgctacaacgagaccccctgctgcagccaggccgggggcagatcatgaaggtggacgccccttggatgaagcacttcattctcacccatgacccagagagaggcatctacaattccccgtacatcatcccagggacccagacagttactcttggaggcatcttccagttgggaaactggagtgaactaaacaatatccaggaccacaacaccatttgggaaggctgctgcagactggagcccacactgaagaatgcaagaattattggtgaagcaactggcttccggccagtacgcccccagattcggctagaaagagaacagcttcgcactggaccttcaaacacagaggtcatccacaactatggccatggaggctacgggctcaccatccactggggatgtgccctggaggcagccaagctctttgggagaatcctggaagaaaagaaattgtccagaatgccaccatcccacctctgaagactccagtgactgctgcctccccccacaagaactcccttctcccctcagccaatgaatcaatgtgctccttcataagccattgcttctccctcacttctttcctcaaagaagcatgaggtgagagaaagccacraagtcagtgcctggagaagggttcagcccaacatggggcccctctcatcactgaaatccctctaccttctctgggtctggcattataaagaacagctgaggctgtcattccatgagtcttcagaagaaaggacagctcagaaagtcaaagaggccaactgcccagagccacagaaaatggaggataattgaggctaagtaacctgattacaagttgtactaacatattaaaggttctgaaaagtcctgcaaaa

SEQ ID NO: 143116 - DNA, 2827 bp, Homo sapiens
atgcccaggcataccccatcactccagcccacagctgtcaaccaccagatatgtgagggaggccaccctagaccacccagacatgagctgacgttccagctgacacactcacagccaagccagaccccagaatggttaactgagaggggagtgaagttcttccagcggaaagtggagtcttttgaggaggtggcaagagaaggcgcagacgtgattgtcaactgcactggggtatgggctggggcgctacaacgagaccccctgctgcagccaggccgggggcagatcatgaaggtggacgccccttggatgaagcacttcattctcacccatgacccagagagaggcatctacaattccccgtacatcatcccaggggacatttaccccaaagaggacaaaggaatgagtgagatagtaatacgccacgcagaaacacgggattacgaggccatcaggcagattcacgcccagccggaggtgtattgcaacacactacaggtgcctcatccttccgatcatatgtggcaggagcgactcgccgatcgtcccggcatcaagcaactcgtcgcctgtattgatggagacgtcgtgggccatctcaccattgacgtgcaacagcgcccacgccgcagtcatgttgccgattttggtatctgtgtcgactctcgttggaagaaccgcggcgtcgccagcgccctgatgcgagagatgattgaaatgtgcgacaactggttgcgggtagatcgcattgaactaaccgtgtttgtcgataacgccccggcaattaaggtctataaaaaatacggctttgaaattggagggactggtaagaagtacgcattgcgtaatggtgaatatgtcgatgcatattatatggcgcgggatcaatttgcccacatctatttcgagctcggtacctgcttgttgttgtgcgtcttcgctaacacctcactcgaaaacaccagagtgagtaacataagaatcatcgccccatatcgtcgtatgggagtcaaaatcatcagcgaacaggggacaggaacatttgtcagccacgcgcagttgcccaaaggtacgcgtccactaacgctaaattttgaccaacagtgctggcagcctgcggatgcgataaaactcaatcagatgctttccctgcaaccttgtagcaacacgccgcctcaatggcgattgttcagggacggcgaatatacgctgcaaatagacacccgctccggtacgccaacattgatgatttccatccagaacggcggcgaaacggtatgcagcctggtccgaagtatatcccccggtgtggacaaaacacatgatgatgagctggaccggcatagctttaacgattacattaatttcagcgacaaaacaggctgggataaatggtggggaaaaaactggatcagaacggatatcggcgattacgacaatcctggattcgacgatctcactatgtcgctagcctttttgccggatatcaaaaccgaatcaactaccgcttctggtctgccggtgttctataaaaacaaaatggatacccacgccaaagccattgacggctatacgccgcgcgattacttaacccactggttaagtcagtgggtccgcgactatgggattgatggttttcgggtcgataccgccaaacatgttgagttgcccgcctggcagcaactgaaaaccgaagccagcgccgcgcttcgcgaatggaaaaaagctaaccccgacaaagcattagatgacaaacctttctggatgaccggtgaagcctggggccacggcgtgatgcaaagtgactactatcgccacggcttcgatgcgatgatcaatttcgattatcaggagcaggcggcgaaagcagtcgactgtctggcgcagatggatacgacctggcagcaaatggcggagaaattgcagggtttcaacgtgttgagctacctctcgtcgcatgatacccgcctgttccgtgaagggggcgacaaagcagcagagttattactattagcgccaggcgcggtacaaatcttttatggtgatgaatcctcgcgtccgttcggtcctacaggttctgatccggtgcaaggttttccgtttgacctgcaatactttacgacgctcttcaagagcgcccagcttatctacatccagcttaaagccccggcgtgccagtttttcagcgactgcgtctggctcattacgcagcagatagggatcgagcatgcttatcctgtgcttatcgaattaaatgggagatgtggccacagcctgcgaccacagggatacagtaacaacattaccgcaacgataacattaacggtagcgttttatggggctattttgatcctgttcagccagccaggcgagcttttcgccaatcttgccttcaaggcccctgtttgtcgggaaataatagcgtgtttgtgctatttccggcgggaagtaaacctcaccggcagcataagcgttcgcttcatcatgagcgtaacgatattcctgcccgtagcccatttccttcattaatttcgtcggcgcattacgcaaatgaaccggcacgttattaatccgggcgttcgcgagcatcggccagcgcggctttaaacgcagtgtagacagcgttgctttttggcgcgcaggccaggtaaacaatcgcctgagcaatggcgcgttcaccttccgccgggccaacgcgagtaaagcaatcccaggccgcaattgccacctgcatcgcccgtggatcggcattaccgacgtcttcagacgcaatcgccagacagcgacgcgcgacatataacggatcgccaccagcggtaataat

SEQ ID NO: 143117 - DNA, 1086 bp, Homo sapiens
atgaccaccgtgaacatcaataccggagcgtttgtcggtcatcgcaatctggacgacaccattttcaataccaatattgaagcgacgcaggctatcgctcgcaagtcccggttgcgtaatctgggcgggattatcattattgatttcatcgatatgaataatgaagatcaccgccgccgagtgctgcactcgctggagcaggcgttgagcaaagaccgggtgaaaaccagcgttaatggtttttcggcgctggggctggtggagatgacgcgtaaacgcacccgcgaaagcattgagcacgtactgtgtaacgaatgcccaacctgccacggtcgcggaacggtgaaaaccgtggaaacggtatgctatgaaatcatgcgcgagattgttcgtgtccaccatgcttacgactccgaccgtttcctggtctatgcttctccggcagtagctgaagccttgaaaggcgaagagtcacactcgctggcggaagtggaaattttcgttggcaaacaggttaaagtacaaattgaaccgctctataaccaggagcagtttgacgtcaacgtgcgggaacgctgtgggcacctggcaccatcgacattttccggtggcgaacagcagcgcgtcaacatcgcccgcggctttatcgtcgactaccccattctgctgcttgacgaacctaccgcctcgctggacgccaaaaacagcgccgcggtggtggaactgattcgcgaagccaaaacccgtggcgcagccatcgtaggcatcttccatgacgaagctctggtgctggaaaacgaggtggtaagcggttcgctggaggtgcagaacggcgaaatccgcgcctttgccgaaagccagagccgcctgccggaggcgatggacggcgaaggcggctggctgctgccggggctgattgagctgcataccgataatctggataaattcttcaccccgcgcccgaaagttgactggcctgcccactcggcgatgagcagccacgacgcgctgatggtggcgagcggcatcaccaccgtactggatgccgtggcaattggcgacgtgcgcgacggcggcgatctatag

SEQ ID NO: 143118 - DNA, 1440 bp, Homo sapiens; identical to SEQ ID NO: 115661

SEQ ID NO: 143119 - DNA, 996 bp, Homo sapiens
cggcgaggtaaaacccattaccttaatgacaaaaatcacaattacttctgcaccaacctaatagaagcccagagaatggcagcctctgaggaaacagaggaggaagaaatgaagaagagcaatcagcaggcctttcagcgacgtcggtttcagggtcagggttttctcctgccagttcaggccggaggtgaagtccatcaccgataccgtggtgtcatcaatcttaatgttgacgttgtccagtgccacccgtgtcagggtgatgggatacggcgtggagagatccagcggaccgctatcttcctcttcttcaacctgttcagaaggaggcatttttttactgtcgatgttgacctgaatgtctttcagcgccagatcattaatacaaacactgctgttccacaggcactcaagcccgacagccagatgcagattgcccgcttttaccgccacgcctggctgctcataacgaacgtcagacaaggtgagatcgcgccagccgccggtgaccttgccaatatccagtcctggcacccagcgatccgccgctttaaataccagatgcaggccgctggtggtgcccaccagaaacgccaccgatgcccagcaacactcaggcacttggccacagtgataaccacatcagacttcgatgcagaaaagcccacacataactttcatccctgttgccatggccacctaataccccctgacaccagactaaatgctctggctgcaaggaaatacagtaccttacatgtcaagttaatgcttgagagtcaagaaagaaatcttttgcaagccttaaggcaccctaaggctgtggcatttggagaaatgggcttggattactcttacaagtgcaccacgcctgtcccagaacagcgcaaggacccttgtgattacattcggcccacatggacattccaggatggtctccccttctcccgatccttaccattacccacatcttccaagttcttcttgcccttgtaa

SEQ ID NO: 143120 - DNA, 1425 bp, Homo sapiens
ttagagacccatggtgaagaactggctggcaatttctggaataaaccaggcattaacgatcacgccccaaatcacccagaccattacggcggtcaggacaatcaataccagccagtcaccaaaggtaaacggacgttgttcaacatcagcctgcttttcacgaaagaagcggtcggactcatgcacgcgtgacagaagaggattctttttcactcgtgaggcgtacaccatggtaaagatcaggccaatcagagtggcgataacccacaccacgatgcgcaacccggagccagaaagcaccggaacgccggcaatcccctgagcaacgaccacacaaaacgggttcatccacgaactggcaaaaccgatttgcgtggcaatataggtcaccaggacggtggtaatactgtcatagcccagccggaccattagcggtgcgatgataatggcaaaggcgacggcctcttctcccataccaaataccgcgccgccaagtgaaaacagaataaacagcgcaggaataaagagaatttcattcccgcgggtatggcgaataagcgccaggataccgttatcaatggttccactgtcgatgttgacctgaatgtctttcagcgccagatcattaatacaaacactgctgttccacaggcactcaagcccgacagccagatgcagattgcccgcttttaccgccacgcctggctgctcataacgaacgtcagacaaggtgagatcgcgccagccgccggtgaccttgccaatatccagtccgatgtaaaactgtaacccgtgttcgtctttatccgcgaccggtacggcaaaatcgagtttgattggcccgaccggcgattcccagcgcacgccgaccccggtaccggttttaaagtcgctgcggcgaatatcgcttaccgcttcgccactatcgacaaacaccgcgccccaccattttccggtcacgttgtactggtattccagcgatccggttatcaacttcgaggcccctttcaggtcaccgttggcgtatttcggagcgatagatttgtatttgtagccacgaatactgcggtcgcccccggcgaagaaacgcagatccggcggtactttgtcgaaatcaccggtttcaatccagcccagcgtgccgcgtgtaacaaaacgatggcgatcgtacagtgtgcggatccagacgttctgcgcctggggctggctcgcagaatagcccggtgggcgctgtccatggtcctgccacaccactggggccatctgcctgctagtaatttgggactccacataacagctgaaaggaatctccttgaccagttccccaaattgctttatattgtgagttttggaagagaacttggtcaagtgaggaagatcctgctctcgcacgccatgtaagccaatgttatgctgctgggccat

SEQ ID NO: 143121 - DNA, 1916 bp, Homo sapiens
atgtgctgcaacagatgcaggaattacgcgccgggcaaaggctttagcgatgtctcttttgatttatggccgggggaagtgctgggcattgtcggggaatccggctccgggaagaccacgctgctgaagtcgatctccgcgcgcctgacgccgcagcagggggaaattcactacgagaaccgttcgctgtatgcaatgagcgaggccgaccgccgtcgcctgctgcgtaccgaatggggcgtggtgcatcagcatccactcgacggcctgcgccgccaggtgtcggcaggcggcaatatcggcgagcggctgatggcgaccggggcacgtcattacggcgatattcgtgccaccgcgcagaagtggctggaagaggtggagattcccgccaaccggatcgacgacctgccgaccaccttttccggcggtatgcagcagcgtttgcagattgcccgcaacctggtgacgcatccgaagctggtgtttatggatgaaccgaccggcgggctggatgtgtcggtgcaggcccgcctgctcgacctgctgcgcggcctggtggtggagctgaacctcgcggtggtgattgtaacctcttccccagaccaggactggggctttaccccagagcctcgcctcgccgcccgcttcccaggatccactcactcgtcccggagccgccgcaaccgcggccgccgccatccccggccccggagcctgcccacacccagcgcaccccacagtcgggcgcccggagatggcgtcaagctcgtcccgcccccggcgcgcgtgacccgaaatgagcccgcaccttccgactcagtaactttgggggttccacacgagcccggggcgtgtattgggaccccaattctgacctttgtccgaccctcgacttcagctataaatgccgctgctgaagaatccactggaacaatattatttggtgcaggcggttttaagcgcactgacctgaacgataccgaatctgactccactacgctggtggcttctcgctactgggatctctccagcggctggcagcgtgccattaacctgcgctggagtctcgaccactttactcagggtgaaattaccaataccacgatgctgttttatcctggggtgatgattagccgcacgcgttctcgtggtggcctgatgccaacctggggcgactcgcaacgctactctatcgactactccaacacggcctggggttcagatgtcgatttctccgttttccaggcgcagaacgtctggatccgcacactgtacgatcgccatcgttttgttacacgcggcacgctgggctggattgaaaccggtgatttcgacaaagtaccgccggatctgcgtttcttcgccgggggcgaccgcagtattcgtggctaccaataccaaatctatcggtccgaaattacccaacggtgacactgaaaggggcctcgaagttgataaccggatcgctggaataccagtacaacgtgaccggaaaatgtaccaagtggcagttcggcgaatggctggcgcccggcgaggtgcgcctggcccccggcgccacgctggccacgcccgagctggtggccagctgctcgaccgagggcctcaacggcctggccgccaatttccacgccgaactgcgcgcccgcctgccctggcacggcggcgcgatgaagccgcgcccggtgcacctgaacacctgggagggcttctatttcgatctccagcccgacaaggtcaaggcgctggccacggccgccgcggcgctcggcgtcgagcgcttcgtgctcgacgacggctggttcaatgcccgccaccacgaccgcgccggcctcggcgactggtggcccgatgcgacgaagttcccgcaggggctgggcgagctggtcgcgcatgtcaaccccttttatgcataa

SEQ ID NO: 143122 - DNA, 2193 bp, Homo sapiens
aagaagattgcccgcttttaccgccacgcctggctgctcataacgaacgtcagacaaggtgagatcgcgccagccgccggtgaccttgccaatatccagtcctggcacccagcgatccgccgctttaaataccagatgcaggccgctggtggtgcccaccagaaacgccaccgatcccagcaacagtaagataacgataaccacgccgaggctgatttttttccataaactcataattctggccccagaccgatgtaaaactgtaacccgtgttcgtctttatccgcgaccggtacggcaaaatcgagtttgattggcccgaccggcgcattcccagcgcacgccgaccccggtaccggttttaaagtcgctgcggcgaatatcgcttaccgcttcgccactatcgacaaacaccgcgccccaccattttccggtcacgttgtactggtattccagcgatccggttatcaacttcgaggcccctttcaggtcaccgttggcgtatttcggagcgatagatttgtatttgtagccacgaatactgcggtcgcccccggcgaagaaacgcagatccggcggtactttgtcgaaatcaccggtttcaatccagcccagcgtgccgcgtgtaacaaaacgatggcgatcgtacagtgtgcggatccagacgttctgcgcctggaaaacggagaaatcgacatctgaaccccaggccgtgttggagtagtcgatagagtagcgttgcgagtcgccccaggttggcatcaggccaccacgagaacgcgtgcggctaatcatcaccccaggataaaacagcatcgtggtattggtaatttcaccctgagtaaagtggtcgagactccagcgcaggttaatggcacgctgccagccgccttgcgtgtgatgtcgggggttctggaaggcagtaacgtcaatgccgtttcggcaatgagcgacatgattgccagcgcgcggcgttttgaaatgcagatgaaggtgatcagcagcgtcgatgataacgcaggccgtgccaaccaactgcctccggattacaaatcggcacgggggtacgcccggtcgccactgaacgcttacacagccagggaaacctttctgagtacagtcaggatctacgagattctggttctctcggaaggcccgaacatgtatggacggcgtcaacatcccctttgcgagcatagtgtcatggcgcctcataatttctggctcctgtccaggccggttctggtggtttcgggttacgtctcctgcggccacccagtggaagttgttgggcgttgatttgttagttggcgttggtgcagcgtgaggggtcgtatatataaggccctctggtggtgtatcaattagatgaacattttccgtgcaccgggctgtatcgtgccagtgtaccagagatttgttatcagccgcacgtttacgttcaccctgcagcacatggatggttaccgcagactggttgtcttcagcggtagagaacacctggctgtgcttggtcgggatagtggtgtttttcgcgatcagcgtcgtcatcacaccgcccatggtttcgatacccagagacagcggggtaacgtccagcagcagtacgtcttttacgtcaccagtcagaacaccaccctgaacagcagcaccgattgctacagcttcgtccgggttaacgtctttacgcggctctttaccaaagaactcagcaactttcttctgaaccattggcatacgagtctgaccaccaacgaggataacgtcgtcgatatcagatacggacaggccagcgtcctgcagtgcaactttcagcggctcaatggaacggtttaccagatcttcaaccaggctttccagtttcgcacgagtcactttgatgttcatgtgtttcggaccggtcgcgtctgcagtgatgtatggcaggttaacgtcggtctgctgagcggaagacagttcgattttcgctttttctgccgcttctttcaggcgctgcattgccagcggatcgttgcgcaggtcaatgccctgatctttcttgaattcggattcgtaagccgtgaaaacagcaacctccgtctggccagttcggatgtgaacctcacagaggtcttttctcgttaccagcgccgccactacggcggtgatacagatgacgatcagggcgacaatcatcgccttatgctgcttcat

SEQ ID NO: 143123 - DNA, 2440 bp, Homo sapiens
atggcgggtttgccgtggatcgcggcgatggccttcttcatgcaggcacttgatgccactattcttaataccgccttacccgcaatcgctcatagccttaatcgttctcctctcgcgatgcaatcagccatcatcagttatacgctgacggtggcgatgcttattccgctggttgtcttccgggttattcaggggataggcggcgcaatgatgatgcctgttgctcggctggccttactgcgcgcttatcctcgtaatgaacttcttccagtattgaattttgtcgccatgccgggtattgcgggccttctttacgcgcgcaaacatatgcccaatttcagcaccgcacgacgcagattcgatatcactggctttttgctgtttggcctcagccttgttctcttctcaagcggaatagagctattcggggaaaagattgtcgccagctggattgccttgacggtaattgtcaccagcatcgggttactgcttctctatattctccatgcacgacgcacgccaaacccattaatttcattagatttatttaaaacccgcactttctcgatcggtatcgtaggcaatattgcaacccgtctggggaccggctgtgtaccgttccttatgccattgatgttacagcgttacgttccttattgcaaatcgatgttacccaggttcttagtcgactgggtaggccgcaggtgtcgcagcgcaatatcgcgaacggctgatgccgaccgggcacgtcattacggcgatattcggtgccaccgcgcagaagtgctggaagagtggagattcccgccaaccggatcgacgacctgccgaccaccttttccggcgcagcgtttgcagattgcccgcaacctggtgacgcatccgaagctggtgtttatggatgaaccgaccggcgggctggatgtgtcggtgcaggcccgcctgctcgacctgctgcgcggcctggtggtggagctgaacctcgcggtggtgattgtcacccatgatttaggcgtcgcccgcctgctggcggaccgtttgctggtgatgaagcaggggcaagtggtggagactgctggtgtcatcggttttgcagaattgagccggtgccggatgcggcgtaaacgccttatccggcctacaaatgcgctccccgtaggtcggataagacgcgtcagcgtcgcatccgacacccgaaccacgaggcgaaaaatgattaacgtacaaaacgtcagtaaaaccttcatcctgcaccagcaaaacggcgtgcgcctgcccgtcctcaatcgcgcctcgctcaccgtcaacgcgggcgaatgcgtggtgctccacggccattccggcagcggcaaatcaactctgctacgctcgctgtacgccaactatctgcccgacgaaggtcaaatccagatcaaacacggtgacgagtgggtagacctggtcaccgcgccagcgcgcaaagtggtggaaatccgcaaaaccaccgtcggctgggtgagccagtttctgcgcgtcatcccgcgtatctcagcactggaagtggtgatgcagccgctgctcgataccggcgttccgcgtgaagcctgcgccgctaaagccgcgcgtcttctcacccgcctggaacgtgccggaacgcctgtggcacctggcaccatcgacattttccggtggcgaacagcagcgcgtcaacatcgcccgcggctttatcgtcgactaccccattctgctgcttgacgaaactaccgccttccttgacgccaaaacagcgccgcgctatcccggctatatgcagcgtttcttccgcgaccacaatatcaccattgagatgactgaaagtgacgcagaagatttaaaacataccgtcgatttcatctcttttagttattacatgactggttgtgtttcccacgacgaaagcattaataaaaatgcgcagggaagtggtaagccagaaatgtatgcttctgacctggtgacgctgttaaaagaagtggcagatttcgatatctccgtggcggcgtatccggaagttcacccggaagcaaaaagcgctcaggcggatttgcttaatctgaaacgcaaagtggatgccggagccaaccgcgcgattactcagttcttcttcgatgtcgaaagctacctgcgttttcgtgaccgctgtgtatcggcgggcattgatgtggaaattattccgggaattttgccggtatctaactttaaacaggcgaagaaatttgccgatatgaccaacgtgcgtattccggcgtggatggcgcaaatgttcgacggtctggatgatgatgccgaaacccgcaaactggttggcgcgaatattgccatggatatggtgaagattttaagccgtgaaggagtgaaagatttccacttctatacgcttaaccgtgctgaaatgagttacgcgatttgccatacgctgggg

SEQ ID NO: 143124 - DNA, 2219 bp, Homo sapiens
atgagtaaaaaccttctgaaagcaggttactcgctggtggttgctgaccgtaacccagaagctattgctgacgtgattgctgcaggtgcagaaacagcgtctacggctaaagcgatcgctgaacagtgcgacgtcatcataaccatgctgccaaactcccctcatgtgaaagaggtggcgctgggtgagaatggcattattgaaggcgcggagccagcgaaaggcattgatatgctggatgctccggtgagcggcggtgaaccgaaagccatcgacggtacgctgtcagtgatggtgggcggcgacaaggctattttcgacaaatactatgatttgatgaaagcgatggcgggttccgtggtgcataccggggaaatcggtgcaggtaacgtcaccaaactggcaaatcaggtcattgtggcgctgaatattgccgcgatgtcagaagcgttaacgctggcaactaaagcgggcgttaacccggacctggtttatcaggcaattcgcggtggactggcgggcagtaccgttttggatgccaaagcgccgatggtgatggaccgcaacttcaagccgggcttccgtattgatctgcatattaaggatctggcgaatgcgctggatacttctcacggcgtcggcgcacaactgccgctcacagctgcggttattgagatgatgcaggcacttcgagcagatgcgcgcgcatttgttaccgttagtattgaacaacttccggcactgaaagcctttgataccgtcttttcgatgggcgtgctttaccatcgccgttcaccgctggagcatctatggcagttgaaagatcaactggtcaatgaaggtgaactggtgctggaaacgctggttattgatggtgatgagaacacggtgctggtaccaggcgatcgttacgcgcaaatgcgtaatgtctatttcatcccttccgcgctggcgctgaaaaactggctgaagaagtgtggttttgtagatatccgcattgcggatgtgagcgttaccaccacagaagagcagcgacgcaccgaatggatggttaccgaatcgctggccgatttcctcgacccacatgatccggacgcgtcagcgtcgcatccgacacccgaaccacgaggcgaaaaatgattaacgtacaaaacgtcagtaaaaccttcatcctgcaccagcaaaacggcgtgcgcctgcccgtcctcaatcgcgcctcgctcaccgtcaacgcgggcgaatgcgtggtgctccacggccattccggcagcggcaaatcaactctgctacgctcgctgtacgccaactatctgcccgacgaaggtcaaatccagatcaaacacggtgacgagtgggtagacctggtcaccgcgccagcgcgcaaagtggtggaaatccgcaaaaccaccgtcggctgggtgagccagtttctgcgcgtcatcccgcgtatctcagcactggaagtggtgatgcagccgctgctcgataccggcgttccgcgtgaagcctgcgccgctaaagccgcgcgtcttctcacccgcctgaacgtgccggaacgcctgtggcacctggcaccatcgacattttccggtggcgaacagcagcgcgtcaacatcgcccgcggctttatcgtcgactaccccattctgctgcttgacgaacctaccgcctcgctggacgccaaaaacagcgccgcggtggtggaactgattcgcgaagccaaaacccgtggcgcagccatcgtaggcatcttccatgacgaagctctggtgctggaaaacgaggtggtaagcggttcgctggaggtgcagaacggcgaaatccgcgcctttgccgaaagccagagccgcctgccggaggcgatggacggcgaaggcggctggctgctgccggggctgattgagctgcataccgataatctggataaattcttcaccccgcgcccgaaagttgactggcctgcccactcggcgatgagcagccacgacgcgctgatggtggcgagcggcatcaccaccgtactggatgccgtggcaattggcgacgtgccgacagaacgagactgtgtctcaaaaaataaaaataaaaatgaagaaaagaacaaaaaaaagattgatgttatgagtcccttccattttccaaaccacctttccatcagtcccatcaaggggccatctattccagagtttatggctaattcatttgttaggtcgtgctag

SEQ ID NO: 143125 - DNA, 2550 bp, Homo sapiens
tcaccgactcaccacaatgggtcgtaatgctgcgtagggctctataacctcgcccttatggaaatcattcggtgtgctaggccaataacggggtcttttgtcctggatcaggttgggccccgcgcagtcgagataatcaaacggccgtttcgctagcgcgtctgccctggtgcgaatggttgtgcgcgatactgatcgcctattaacgccacctgtcatatggcgcactgcgtgctctatcagccgggcgaatacaacccggtaatcgagacggacacccttcggatgatgctgagacgcagttgcttggcgcgatatctcacggcgagatccgttacgttgacgattgctggtgatcctcgggaatcctcctgcgctgaagaaataggtcaaggggtcctccactggctgttccacaggcactaagcccgacagccagaggcagattgcccgcggtgaccgccacgcctggcgctcataacgaacgtcagacaaggtgagatcgcgccagccgccggtgacttgccaatatccagtccgttggcgtatttcggagcgatagatttgtatttgtagccagaatactgcggtcgcccccggcgaagaaacgcagatccggcggtacttttcgaaatcaccggtttcaatccagcccagcgtgccgcgtgtaacaaaacatggcgatcgtacagtgtgcggatccagacgttctgcgcgcgaagaactgggcatcgaagcaactgtgggtgaatatgttgccagccatcagcgagaagtttcggggcggattatccatcttcatgcctggcacgtacccgacttccacgggacgttacaggcacatgaacatcaggcgctggtctggtgctcacctgaagaggcgctgcaatatccgctggcccctgctgatatcttgctggtcaccgcgccagcgcgcaaagtggtggaaatccgcaaaccaccgtcggctgggtgagccagtttctgcgcgtcatcccgcgtatctagcactggaagtggtgatgcagccgctgctcgataccggcgttccgcgtaagcctgcgccgctaaagccgcgcgtcttctcacccgcctgaacgtgccgaacgcctgtggcaccgcctcgctggacgccaaaaacagcgccgcggtggtgaactgattcgcgaagccaaaacccgtggcgcagccatcgtaggcatctccatgacgaagctgtacgtaatgacgtcgccgaccgcctgcacccaatggagcctcttcatgattatcaataacgttaagctggtgctggaaaacgagtggtaagcggttcgctggaggtgcagaacggcgaaatccgcgcctttgcgaaagccagagccgcctgccggaggcgatggacggcgaaggcggctggcgctgccggggctgattgagctgcataccgataatctggataaattcttcccccgcgcccgaaagttgactggcctgcccactcggcgatgagcagccagacgcgctgatggtggcgagcggcatcaccaccgtactggatgccgtggaattggcgacgtgcgcgacggcggcgatcggctggagaattgatgcgcagatgcagcagtacgagaagagcactggcggccgacggaagcctggtcgcaagcggatcgcgaaccttggcggcctgttgccggggcgaaaaaattgggcttgccggcccgaaagtccacacaagcccagtgggtgaattccacacgttggtgggggatacaaagaagggggcaaaagcgccctagggaattcataggatagttccttggtccgggctttttcgcccaactcgtcttgacgattgacccgttccgactttttttgtcgattgcctcgcgggggggccgtgaccgctagtaacctagacgacaccttggccgtccgagtaccacctcggtacgtcagtgcaaattccgtgggcaattgcaagtttggcccccattgcggcacagtttcgattgtcggtcgggctgtatagaactcaattactgactgcgagttactcaggaatactggtaaccgcaccacagccaagccaatcgacaggtaattgggtgacgtcaaagactgatcgaatagattacggtagcgaaaaccttcattatatccagcaccgcgcagggcaagacacggttttgactgtatgtacactgacacgatgataatccttggggtctggtacagagctagtaattctgggtcgtggtgggtggttggtggtgaaacgggaatatagtgggcgtaaggtttatgccacaagcgccgcccatacggctcctggaaacgttgtatattactgcctgggtaaatttgcccatttacgaggttcctaaagggggtggtgcggggccccgggggtaaaggcccctgattaaatttgggggttataatatataagccgggcacgccataaggcacagaagaacccagcacggggggcccccattggtctgttaaacccgggcggttgttccccttggtgaccccatgggttttggccattgggtcccccat

SEQ ID NO: 143126 - DNA, 1014 bp, Homo sapiens
atggtgctggaagatctcattggtcagttcctttacggtagtaaaggcgatgacaataagaatagtggcgatgcgccagctgctgcgccaggtaataatgaaaccactgaacctgagaaccgacgcatgtttaaacgtttaatgatggtcgctttgctggtgattgcacctctgagtgcggcaaccgcggcagaccagaccaatccgtataagctgatggacgaggcggcgcaaaaaacgttcgatcgcctgaagaatgagcaaccgcaaattcgggccaacccggattatctgcgtaccattgttgatcaggaactgctgccatacgtacaggtgaaatacgccggtgcgctggtgctgggccagtattacaagagtgcgacccctgctcaacgtgaagcctactttgccgctttccgtgagtacctgaagcaggcttacggtcaggcgctggcgatgtatcacggtcaaacctatcagattgcgccagaacagccggtgggcgataaaaccattgtgcctattcgcgttaccattattgacccgaatggccgtccgccggaggtgattggcgaagcataccggcataagatgctgtttgttatcagccagtcagacaaagctgaacccaccagcggtggaaatatcctttccacagagcagaaacaaaatatcagccgcaaaatctgcctgctgcatgagctattccagcccgtgcatccggtgtgtgccgtgtcggttcgcctgcagtggggactaagggtgatggcagagcggatgattaagtgtctgccgcgtgaggccagcagcccggtagtagcgctactgcaacatccctttcgaacaacggtagcccgggagcaggcacgtgacgatttcggtgaaaccgtaggtgccatactcgatacggtaagcacctttccccttattcccgccccggtgcggaccattattcaggccgtgcgttcctcggtggtgtcagtggcccgcgctgtctgggatttcttcttctga

SEQ ID NO: 143127 - DNA, 1097 bp, Homo sapiens
atggaacactttggtcgcaacgaccacgtcttcacgacgggcgaaatcccgcagtgcgcgaccgacgatctcttcgctgctgccgtcagaataactgttggcggtatcaaagaaatttatgccgccttccagtgcacgtttaattatgggacggctgctttcttccggcagtgtccatgcgtgattacgactctagagatccccacgtaccgagccgtgtctgagaccactggtgaaatcctttttgacctcttgtgcgctaacggtccagagtggaaccgcttcgttacgctggaaatgaaatatggccggatcatgctggatacggccaaaattattgatgagcaggacgttccgacacatatcctgagcaaactgacttttactttacgtaatcatcctgagtacctagaagcctctgttttgtctcccgatgatcagataaatcagttaacccactacgagccagtgatcggcatcatgggtaaaactggggcgggaaagagtagcctttgcaatgccctgtttgccggtgaagtatcgccggtcagcgatgtagcggcctgtacacgtgatcctttacgctttcgcctgcagattggagaacactttatgaccatcgtggatctgcccggcgtgggcgaaagtggcgttcgcgataccgagttatctgcgctgtaccgcgaacaacttccccggctcgacctgattctgtggctgattaaggctgatgatcgggcactggcgactgatgagcatttttaccgtcaggtgattggcgaagcataccggcataagatgctgtttgttatcagccagtcagacaaagctgaatccaccagcggtggaaatatcctttccacagagcagaaacaaaatatcagccgcaaaatctgcctgctgcatgagctattccagcccgtgtggtctgtgtgtgccgtgtcggttcgcctgcagtggggactaaggcagacgaccaatcagagtacttttgccgtcatcgacgctaccacaggtcagaaaacgcagcaggcttttatgttgttgcgcaatcatccaggcttcgacgccgccttcattggcgatttgttgtgcaa

SEQ ID NO: 143128 - DNA, 2493 bp, Homo sapiens; identical to SEQ ID NO: 123342

SEQ ID NO: 143129 - DNA, 882 bp, Homo sapiens
atgcccggaggagtggtgatgaaaaattttgaagttctgcagccactacagaactccctttccggtctaccgctatgggtatctgaacgtatattgcagcagataaatcagttaacccactacgagccagtgatcggcatcatgggtaaaactggggcgggaaagagtagcctttgcaatgccctgtttgccggtgaagtatcgccggtcagcgatgtagcggcctgtacacgtgatcctttacgctttcgcctgcagattggagaacactttatgaccatcgtggatctgcccggcgtgggcgaaagtggcgttcgcgataccgagtatgctgcgctgtaccgcgaacaacttccccggctcgacctgattctgtggctgattaaggctgatgatcgggcactggcgactgatgagcatttttaccgtcaggtgattggcgaagcataccggcataagatgctgtttgttatcagccagtcagacaaagctgaacccaccagcggtggaaatatcctttccacagagcagaaacaaaatatcagccgcaaaatctgcctgctgcatgagctattccaacccgtgcattcggtgtgtgccgtgtcggttcgcctgcagtggggactaatggtgatggcagagcggatgattaagtgtctgccscgtgaggccagcagcccggtagtagcgctacttcaacatccctttcgaacaacggtagcccgggagcaggcacgtgacgatttcggtgaaaccgtaggtgccatactcgatacggtaagcacctttccccttattcccgccccggtgcggaccattattcaggccgtgcgttcctcggtggtgtcagtggcccgcgctgtctgggatttcttcttctga

SEQ ID NO: 143130 - DNA, 1563 bp, Homo sapiens
  misc_feature (1)...(1563): n = a,t,c or g
atgaatattcgccgtaaaaaccgcttgtggattgcctgtgccgtgttggcagggctggcgctgactatcggtctggtgctatatgcgctgcgctcgaatatcgatctcttttatacgccgggggaaattctctacggcaagcgtgaaactcagcaaatgccggaagtcggtcagcgtctgcgcgttggcgggatggtgatgccgggtagtgtgcagcgcgatcccaattcgctgaaagtgaccttcaccatttacgatgctgaaggctcagtggatgtctcttacgaaggcattttgccggatctgttccgtgaagggcagggcgttgtggtgcagggcgaactggaaaaaggcaatcatatcctcgcgaaagaagtgctggcgaaacacgatgaaaactatacgccgccagaagttgagaaagcgatggaagctaaccaccgtcgcccggcgagacccagcatcatgatgccagaaattggtaacggactgctgtgcctggcgctgggaattgcgctgctgctgtccgtgtatccgctatggggcgtggcgcgcggagatgcgcgcatgatggcgtcttcccgcttgtttgcctggctgctgtttatgtctgtggctggcgcatttctggtgctggtcaatgctttcgtggtcaacgacttcaccgtcacctatgttgccagcaactccaatacccagcttccggtgtggtatcgcgtggcggctacctggggcgcgcatgaaggctcgctactgctgtgggtgctgctgatgagcggctggacctttgcggtggcgatttttagtcagcgtattccgctggatattgtggcccgtgtactggcgataatggggatggtcagtgtcggctttttgctgttcattctctttacctctaacccgttctctcgcacgttgcatcttgcgtacccaaatcggtgccagccaatcaactggcgcgggcgacatctggtctggtacttgctgctgtttgttatcagtctctggctccagttgggattgccggacgaactgtcgcgctttacgccattctgtctggcgctgccgattatcgcgctggcctggcactatggttggcaaggggcgctgattgcgacgttgatgaacgccatcgcgctgatcgccagtcaaacctggcgcgatcatccggtggatttattgctctcgctgctggtgcaaagtctgacagggttgttgcttggcgctggcatccagcggttgcgtgaacttaaccagtcgctgcaaaaggaactggcgcgcaatcagcatctggctgaacgggtgctggaaaccgaanaaagcgtgcgccgagatgtggcgcgtgagctgcattatgatatcggtcagaccatcactgctattcgtactcacgccggcattgttcagcggctggcggcagataacgccagcgtgaagcaaagcgggcagcttatcgaacaactatcgctgggcgtttacgacgcggtgcgccctttgttgggtcggttacgtcccgcccagttggatgatcttacccctggaacaggccattccgctcactga

SEQ ID NO: 143131 - DNA, 1755 bp, Homo sapiens
tcactggtgaacgcacaatctgcgttggcagccaatgaatccgctaaagatatgacctgccaggaatttattgatctgaatccaaaagcaatgaccccggttgcatggtggatgattatcaacccattttgtattggacaggtaccattccaccgatatacgaatcccgctgtcaaacgtttcctgtggtttccatcccaacgcgcgaccaatcttctcagcctcaatagcatagcggcgatcgtgtcccggacgatcagcaacataagtgatttgctcacgataagatttctctttcggtacaatttcatccagcaaatcacaaatagtgagcactacatcgatgtttttctctttgttgtgcccaccaatgttataagtttcacccgctttacgccccacgttcattggaaacgcaaacacggcatagcccaattgttcttcggtacgcaactgattgtagaaccacggctgtacgatctgccccaacagagagctataggctgagctggtgtattcatcgtagccagtcggtacaaataccgctgccagtgcggagtcggtgctgttaccggctttttcaaagatgacggattgtttttctatcgaccacgcaatgcgtacccgatttccgcactctgcaacgctgatggtgacaacgcctttacctttgcaaggctgaataccgtggacaatggcgttctccaccaacggctggatcagcaggctgggaatgcagcaattcacctcttcatcaatatcatagataaccgtcagcttgtcaccaaagcgggcctgctcaatggcaatatagtctttaatttgatacagctcttttttgatatcgatttgctcatcgtcttttaattcaatgttatagcgcagataacgcgacagattaaagatcaactggcgagcggtatccggattcagacggattgacgatgaaatagcgttcagagcgttaaacagaaaatggggattaattttgctttgcagggcgcgaagctctgccttatttgccatttcacgtagctgctcggcgcgtgaaacctccagttgcgtggagatgatttgcgacagaccgaccgccatttccatttccggagacagattagacagcgccgctttttgtgaggaagtcgcagctgcctgcaaacggttgtagttcggcgcaccaaagcgttttgccagttggttgtagtgttcatgcgggttcttaccggtgacagcggtgatttccgccgccagcagacacatgatgatgccgtctttgtcggtggaccagggagtgctgtcgaaacgcaggaaggaagcccctgcactgttttcgcccgccaaagcagaagttgcggtcgaacagacgtattcaatgaaggtttgttccagcaggccgaagtcgttagcctcggggccgaagtagctgatatgccgcccggcgtcgcgcgctttgcggatcgccatgtccatttccgggcgggtgtaacggtgaaaactgtcgccttccacctcagctgcatgcagatttaactgcgcgaatattttacgaaacgcgaggctggtggtggtggtccccgcgccgctggatcctgaacgaatagcttcccggttggcaataacgctcagaccgttaaagttcgccaccacatccagacgtttttcatcaatctgttcggtaaagaaatcggcgggcctgaccacttcaacaatgggtttacccaaccattgccgtccgggggaactcagccccagcat

SEQ ID NO: 143132 - DNA, 1194 bp, Homo sapiens
tcagcgcccaactgttttgacatcgcgtgccagcgttgttgcctgggcctcggtcatgttgccgataaccataaactctggtcgagcccctgattttaaggcgtcgcgataggccagcacctctttcaacgtaatggagggcaaaattttacgccgttcatctcgcgagaagtacggcacttgcgagagcatctgcgcgggcataatcgcctgctcaaacgctttacccttttctgcggaatccatcatctggttataccaggacttcgcctgctcaagctgatcttccgtagcggtatagctaaagtacccctcgagcaatgcctggaacagctgcggcagacgctgggtgtaaccattagcattaaccataaggccgttgttagcgttggtggaaaaacttatgccaccaaccgacgcctggttgcttaactgatcaagcgccagccctgcgagataatcattgagcgcaaacatcacctgattgcgggcgctgtccatggctttcggattacgcaaaatcaggctgacatcagctttgggctcgctggcaaaataacggcttggcgcatacaccacgcgcagattcgactcatcaacaatcagctctggatggtcgtatttcttctctgacttaatcagcgagaaatcatcaggaatataagggttaagctctggcaaagagagcgcaatgtcggcggcttttttctgccagtcggcgaaagtttgtgcgctgattttatcgacctgatacggcgcatcgacaaagtaagccgttttgttgtgcggctctttcgggctgatataccagatacgcgcattctgcggcgtcatcatcgccagacgttcctttactgctttagcatcgtaccgatcggcaatattgactgcatccagcgtatgctcaacaggaacgcgaatcatggtatctgccagccattcgacgtaatccatatcacgggtgatcgacggataacggaagtcgatatccagcacattcgccagttcatcgaagtattgtttatcaattcttactccggcgagcacaagtttaggttcgcctaattcctctacagaagccacggcgaggagcacgcggaaatcccgaaaattaaagccccaaacaagcgcgaaaaacgacagccgtgaagaagccaaaagatcccggttaaaatagtcatacaatcgcaccat

SEQ ID NO: 143133 - DNA, 3090 bp, Homo sapiens
ttatacattgggagaactggcggcacttgtcgggctggttacgccagagaatttaaaacgcgataaaggctggattggcgtgttactggagatctggctaggtgccagcgcagggagtaaacctgagcaagattttgctgctctgggcgtggacttaaaactatccctgtggatagtcttggtcgtccgctggaaacaacattcgtttgtattcaggttgagcatgcgctggcaaaagctgtgaatagtaaagactgccgcttcatccatctgccgttcggctaacaacaaccactgcgcggcttgcgctttatcgtcgatctcttccagcaggcgttcgtacagtggattgtcggtggtttcacgcagacaggcgatgcgcaactcgtggatattgctacggatacgaccgcgcaattctgccgtggcagcctcggtaaaggtgaccaccagcagttcttcaacggtcagcgggcggggaaaggcggcggaaccgctagtccaagtaacaggcgcaaatagagcgccgcaatcgtaaaggttttgctcattcttttcactcatcaggggcattgtttgctgcaacgcgctgacgttctcccacactttccagccttcagggtgtacatattcggctttcccgttctggctgccggaaatctgcgacagaatagccatgccttgcggctcgaccaccgcctgatggaagaaatcagcaagtttttgcggcgtcacgagttttatctgggccacgattttatcacgcgaatcgaagcgcatattgccgcgatcgaaatctttacttaacttcgatgcttcttcgccgagcgtttgcgggtgctgcagcatctgggtaattaccgcctgctggatttgcgcaaactcatctggcttcatcgctcgcaattttgcctggcggcgtttttctggggtcagttgttcaagtttattacgatcgacacaaatcagcgcatgagtcgggcaagccgccatacacgccgggccgtcttcacgatggttgcacaggtcgcatttattggcttcggctttgtcagcccgtacattcagacccgcgccgctgttgcggatcaccggacgtaccaccacttccatcgcaccatacgggcaagccacaacgcaggttttgcaaccaatgcaacgttcctgcatcacatgaacaaaccctttatcacggctgatagcaccattcgggcagacgttagcgcacggtgcatcttcacactgacggcaaactgtcgccgtggaaatgttcacacccggttcagtctggaaaccggaactatcaactttttgctgggcaacgaaacgaccatcttcgacgttaatccagtgcagataaccttcactgtcaccgaccaccaggttgccattatacagcaccggagaagtcagcaggcgatgcagcagatcgctttgtgtccacagcgtaacgccgccatcaatggtcaacgccatcacccggtcattttgatcgaccagatagatgcgattgccgtcgacgatgaaatcattcaccgaacccagttcgcgtttccacataatctgaccactgcgcagatcaagcgccgtcaggttaccattataggccagcgcgaaaacaacgccgttaacaacgacgggagtcgtgtcaacatcgctcagacggtcaatttcggtagaaccggtcgcctgggaaatacgctgctgccaaatcatctggccctgttccatcagcactgcgctgacgcgaccattatcgccccccacgacggccgcaccaaaagccgttgtcggcgcagactcgccacgcaaagagagcgaaggcatatcgaggttaactgtccatttgacagcgccgtcagcttcgttcagcgcttgtaactgaccgttactggtgtggattaacaccagaccgtcgctgaccaccgggcgcgaaagtgcttcacccgcgactttagtttgccatgccacagtaccatcgctggttattgccagccacgtactgtcgtttttgtagtggagctttaccgttctggtgatcagtcgcattggtgtggcttttgcacatgcgattttctggtcgattacggcgtctctggcgatccgtatggctccggccgggaagcgagcacaggcattgagtttaattgccaccggtacagcactggcgatggtcttagggttacctctcgggcgcattgtgggccagtatttcggttggcgaatgaccttcttcgcgattggtattggggcgcttatcacccttttgtgcctgattaagttacttcccttactgcggcgaacagtgaaatacacctcggggtgctgagtattttctgggggatcgcgatgatgatcatcgggcttggtatgcaggttaaagtgctggcgctggcaccagatgctaccgacgtcgcgatggcgcagcaggaatcccatcagacgggagatcgcttcaatgccacccttgcccaccagccgcataattgcgccggagctgcgtaggcttccccacaaaataaccgccaccaggaaaaagatcagcggcggcgcaaccatcagtacccaatcagcgaaggttgaactctgacgcactgtggacgccgagctaataaatgccaccatgtcgttatgctggataatttctgccgcttcattggcggtcatccttgtccactgagtttccatttttactcgtttttcgaggaaagcgttcatcccttcctggtaatcttcgctgtcatacaccgcgcggcgcatcccctgaatacgttcaaattcatcggagttcatggtgtgtgcttcgcccagtacacgcagctcttctttgataacggcaatggctaacggcgctttctcagagatgtggtgcgccatttgtaaggtgaaatcttccagttcttccacttccacaacatggttgaggatgccgacagccagcgcgcgggtaaaaatcagctctttgacaatgtggaagcccgcgtcgcgggtcaggttgtgaatgccgaccaggttatacgggacgccgaggtttacaggcgtcattgagaaggttgaggtactggcggcgatgatcagatcggaactcat

SEQ ID NO: 143134 - DNA, 2322 bp, Homo sapiens
atgttcacatacccgcattcgaagttccgcgtcaaccgctttgtgggtcaagtactactgatcgagttttcgattttactagacgggggtcgtaccggcttgggtcattccttatctgtttggtgcatctccggcgattgttcttctttcctgcaaggaaaaccaacgtcgctgccgttgagaaaaccgagtgcgattatttgttctgatagtctttcaggatctgccgacctgctacgtaatcataatttcgtctgtaccgccgccgatacgttcacaacggacatcacgccagaagcgggagacgcgcgcctcatcggtatagcccagaccgtccgtcatctagaggatcccatgcgggcatggaagagcattcacaaaagttgtgaaatcctggacccgatccacagggctcctgtcaaggaaaacacccacccagcacgcaagattaatatatccgacccggctgctggcgctgtagcccgcattcggtacgaaggtgtgttatctgtatgtcgtgcatcagcatcagcttatgtgtcgcgctcacggacgattactgtcgcctgttggtacgttagcaacacaggggtgacgggcgctaccattggtgtaaaacgacagcatcgccacgcgcggctcttctccggtgatggcgcgccaggtttcggcactggcaagcgcgatatccgccagctgcgccgccttgtacgcatccagattcagcgaactttctttgctgctgtacttcacgtcccgacgccttggtccagggctattgatgccgccgcccttctgaccgtcatcgacgttaaagtgctgactgcctgcgcctgccaggcttgccgtacgctggctcttcgcgtagctcaggtgatcgaccggtgcagcaaccctggtgacatcatgtctagcgtcgcgcggaggtactggttcatctcgcgttggtctgctaagcgggactgcgcggtgagctacgatcaagaccctggtcaggcgcagcgttcatgtcggtcatgtctggtcgcggttgatcgggggctatggctgtccgcgtattgccggtcactcatgacgcagactctgctacctgacgatgtgccacgcatattgccgaatgcttcttcgccgagccgtttgcggtgcctgcagcatctgggtaattaccgcctgctggatttgcgcaaactcatctggcttcatcgctcgcaatttagcctctgcggttgggaaaaacgccttgttaaggatctcacgcgtattcaggacactgggcgtgcgaaagagattctgggtgcgacggcaacgctggaattccgtctggtaaacaccaacgttgaccaggccgctgcggcatccggtcgcgtaccgggcgactctgaagtgaaacagacccgcgaaggtcagccagttgtgctgtacaaacgcgtaattctgaccggtgaccatatcaccgactccacttccagccaggacgaatacaaccaaccgcaggttaacatctcgctcgatagcgctggtggtaacatcatgtctaacttcactaaggacaacatcggcaaaccgatggcaaccctgtttgtggagtacaaagacagcggtaagaaagatgcaaatggtcgtgcggttctggtgaaacaggaagaggtgattaacatcgccaacatccagtctcgtctgggtaacagcttccgtatcaccggcatcaacaacccgaacgaagcccgtcagctgtcactgctgctgcgtgccggtgcgttgatcgcgccgattcagattgttgaagaacgtaccattggcccaaccctgggtatgcagaacattgaacaggggctggaggcttgccttgccggtctgctggtttctattctgttcatgatcatcttctataagaagtttggtctgattgcgaccagtgctctgattgccaacttgatcttaatcgtcggcattatgtcgctgttgccaggcgcaacgctgagtatgccaggtatcgcgggtatcgtcttaacccttgcggtggcggtcgatgcgaacgtactgatcaacgaacgtattaaagaagagttgagcaacggacgtactgttcaacaggccattgatgaaggttatcgtggcgcattcagttctatcttcgatgcgaacatcaccacgctgattaaagtcatcatcctgtacgcagtgggtaccggggcaattaaagggttcgcgattactaccggtatcggtgtggcgacgtcgatgtttaccgcgattgtcggtacgcgtgccatcgtaaacctgctatatggcggcaagcgcgtcaagaagctgtcaatctga

SEQ ID NO: 143135 - DNA, 945 bp, Homo sapiens
tcagcacatcttctctggcggcacaatctttacgtttcggttatgaaacatcacaaaccggactcgcaacatattgcggcgaaaaaattcaatgattttttgctgatcttcagcaaccagtttgcgctgatagttacccgcttcttgtgcagatgaaaaagctcggtccaatcgtcttttttttcgacatataaataggtctccacgagctttgctgcgggtaagaatgtcaatgttgagttcagaaaaggccatagcagcgctcagtactccggcgaaataaagggatacgattacgatacatatacctttccctgcttctggcaaatatgagctgcgagtgttgcaaacccgaaacgacgcccgtaaaaacaaaacatccacaccaaaataacgatcatcacgacataatttttctttaacatcgcaaaatacaccgttagcgaatgtaattcgctggcctagtccaagtaacaggcgcaaatagagcgccgcaatcgtaaaggttttgcctgtgccggcagaggcttcaatcaggcgctcaccgttctcccacactttccagccttcagggtgtacatattcggctttcccgttctggctgccggaaatctgcgacagaatagccatgccttgcggctcgaccaccgcctgatggaagaaatcagcaagtttttgcggcgtcagcagttttatctgggccacgattttatcacgcgaatcgaagcgcatattgccgcgatcgaaatctttacttaacttcgatgcttcttcgccgagcgtttgcggtgcctgcagcatctgggtaattaccgcctgctggatttgcgcaaactcatctggcttcatcgctcgcaattttgcctctgcggttgggaaaaacgccttgtaacgctcccacaagaatgaaggctgtttatcattgctttgcaaaaggaagcccat

SEQ ID NO: 143136 - DNA, 3384 bp, Homo sapiens
atgttcccggcacaggttcgcgcattaggcgttggtctgtcatatgcggtcgctaatgctatatttggtggttcggcggagtacgtagcgttgtcgctgaaatcaataggaatggaaacagccttcttctggtatgtgaccttgatggccgtgagaacatcaatccaaacatggcactgcgatcccggctttgagcctgatggtgaaggtgagcatattctggttagaatcctcaaaaacggctgcaatacccgttttgtggcggatgcactggcgaaattcctgaaaattcatgcccgtgaagtcagcttcgctgggcaaaaagacaaacatgctgttacggaacagtggttatgcgctcgcgtgccgggcaagggaatggcccgatcttggagcgccctttttcacctgggccagggcttggccaggttggctggaggtattccgcggggacaaagcaatatagaaggagccaatcagctgggcattaccagtattctggtgaaagataaaaccaccatcccggactatttcgcgaaggacaaagccaggcaccgtacccgtccactatgggcctggctaaaactactctggcaacgcattgatgaggacaacatgacaaccctggcaggtaaccttgcctatgtgtcgttgctctcattagtgccgctggttgccgttgtttttgcgcttttcgccgcttttcccatgttttccgacgtcagcattcagttacgtcactttatttttgccaactttctgcctgctactggcgatgttattcagcggtatatcgaacaatttgttgccaattccaacaagatgaccgccgttggggcgtgcgggctgatcgtcaccgcgttattgttgatgtactccatcgatagcgcgttgaataccatctggcgcagtaaacgagcgcgaccaaaaatttactcgttcgccgtgtactggatgattttaacgctggggccgctgctggcaggggccagtctggcgatcagttcctatttgctctccctgcgctgggcgagcgatctcaatactgtcatcgacaacgtgctgcgtatttttccgttgctgttgtcgtggatctccttctggttgctgtacagcattgttcctaccatccgcgtacctaaccgcgacgcgattaaagctcatgaccaatttctagccgaccttgcgagcattctaccgagtaacaccacaccgctcattgtcagtgatgctggctttaaagtgccatggtataaatccgttgagaagctgggttggtactggttaagtcgagtaagaggaaaagtacaatatgcagacctaggagcggaaaactggaaacctatcagcaacttacatgatatgtcatctagtcactcaaagactttaggctataagaggctgactaaaagcaatccaatctcatgccaaattctattgtataaatctcgctctaaaggccgaaaaaatcagcgctcgacacggactcattgtcaccacccgtcacctaaaatctactcagcgtcggcaaaggagccatggattctagcaactaacttacctgttgaaattcgaacacccaaacaacttgttaatatctattcgaagcgaatgcagattgaagaaaccttccgagacttgaaaagtcctgcctacggactaggcctacgccatagccgaacgagcagctcagagcgttttgatatcatgctgctaatcgccctgatgcttcaactaacatgttggcttgcgggcgttcatgctcagaaacaaggttgggacaagcacttccaggctaacacagtcagaaatcgaaacgtactctcaacagttcgcttaggcatggcaagtttgcggcattctggctacaccataaccacgggaagactcactcgtgggttggacccgcttatcccaatctttctcacatggcttgcacaaccgttatggcgttctcgtgccggaaggttgaacacgtcggcaaaaatctggcataaacagatcgctgttcgaaccgccgccagtaatgatcacatgcttcgcaaacgtcagcgccacgctttccagtatcgaacgatatatccatgcgtaatccatgctggaatcaaagccgatcataatcccgcgtttgtacggttcccacggattgaggtgtctatgtccgtcccggtccctgttcgcacagggtgtgatgcgggatccttgcgggtatcaacgggaagagggtggccaggcttcaaaatccgggggaaggaggggttcaccctttggggacttcttttccggggaggaaatcaacttacgggggaaaattaccaacagcgagatgagttagcacgggaacgccatcgcgctgatcgccagtcaaacctggcgcgatcatccggtggatttattgctctcgctgctggtgcaaagtctgacaggcggttgcgtgaacttaaccagtcgctgcaaaaggaactggcgcgcaatcagcatctggctgaacggttgctggaaaccgaagagagcgtgcgccgtgatgtggcgcgtgagctgcatgatgatatcggtcagaccatcactgctattcgtactcaggcgggcattgttcagcggctggcggcagataacgccagcgtgaagcagagcgggcagctcatcgaacaactatcgctgggcgtttacgacgcggtgcgccgtttgttgggtcggttacgtccgcgccagttggatgatctcaccctggagcaggccatccgctcactgatgcgggaaatggagctggaagggcgcggtattgtcagccatctcgaatggcgaatcgatgaatcagcgttaagcgaaaaccagcgcgtgacgctgtttcgtgtctgccaggaagggctgaacaacattgtgaaacatgctgatgccagcgcggtcaccctgcaaggctggcagcaggatgaacggttgatgctggttattgaagacgatggcagcggtttgccgccgggttccgggcaacaaggttttgggctcaccggaatgcgcgagcgcgttacggcgctgggtggggcatttcacatttcctgtctgcacggtacgcgtgtcagcgtttctctagctcaacgccatgtctaaggtttgatgatgttgccgtttctgaaagcgcctgccgatgcgccattaatgactgataaatatgaaattgatgcccgctatcgctactggcgtcggcatattctgctgaccatctggctgggttacgcgctgttttacttcacgcggaaaagttttaacgccgccgtaccagaaatccttgctaacggcgtgctcagccgtagcgatatcggcctgttagcgaccctgttttacattacctatggcgtgtcgaagtttgtctccggcattgtcagc

SEQ ID NO: 143137 - DNA, 1374 bp, Homo sapiens
  misc_feature (1)...(1374): n = a,t,c or g
ctatattgaagatttgatgcgctggcgcaggcgggcgcggacattatcgccattgacggcaccgaccgcccgcgtccggtgcctgttgaaacgctgctgcacgtattcaccatcacggtttactggcgatgaccgactgctcaacgccgaagacggcctggcatgccaaagncgaaacgctttttcggaatcaccacccagcggggtgtctaccgaggtaatgcgctcgttaagacgaagcatacggctgacgtcatcaactggcttatccagttgctctgcgatctcttccgcacttggttcatggtccagcttatgggacaactcacgtgcggttcgcaggtaaacgttcagctcctttacgatgtgaatcggcaaacgaatagtacgggtttggttcataatcgcccgttcaatcgtctggcgaatccaccaggttgcgtatgttgagaagcggaaaccacgttccgggtcaaacttctctaccgcgcggatcagcatctggctgaacggttgctggaaaccgaagagagcgtgcgccgtgatgtggcgcgtgagctgcatgatgatatcggtcagaccatcactgctattcgtactcaggcgggcattgttcagcggctggcggcagataacgccagcgtgaagcagagcgggcagggtaccgagctgatttacccgccacgggaatattggtattaggactgttttctgcggcgtcttatcaaaagaccgttcgggacaagtatgaaggatcaggcggtcagattcgaagaaggctttatggcaatgggcgcactgggcctggcgatggtcggtatgaccgcgctggcaccggtactggctcacgttctcgggccggtaattattccggtttacgaaatgctcggcgctaacccatcgatgttcgccggaacactgctggcgtgcgatatgggcggctgtcttcctcgccaaagagctggcgggcggcgtgcggcttctggttttgattttctgatacatcagcggctgggttgcgctcggctcgtcggcttcgttgtggccgtgacggcggtagcacaccaggtcgatgaagacatcacgtttaaaggtgttacggaaatcgagcgccacttctacttccagtggtttgccgttacgcagcaggccaagcttcactttcgtgcccggctcggtggtcgcgatacgagagcgcaactcagcaaagctattcagcggttggcttccaatcaatccactagatgtcgttaaccacccaactaatttccatccaatacgtaatccaaattctcttttcaaaacccatttcactgtacagttcaacctgtagccttttaatctccgtaaattatttcttcctccaacagacat

SEQ ID NO: 143138 - DNA, 4604 bp, Homo sapiens
atgctacgatttatgcccgtcattactgccggcactagatgccgtgccggctgcgggccttgcacggtgccgtacacggcattgccacgccttcgcctactgcgcgccctgccttacacccccacccccagccctaatcttgcccaaagccgcccgggattgtcctgggcccatgctgccactttgttagcttatgcctacctgtttgacaccgggtttaaactccccctggttagccctaaaaccaaagaaagtcctgctaaaacctgtcaacaaagtccaagggtccccacatatgaccacagattctacatcactataccattgttaacgcagagctgttctcaaaatgggtttagagcaacaaaaaccgccaaatttatcttacaaggaagaccagaagcccacagaatcatgaaaacaggggtacaggttttggtgtgctcacacgccccagtaagcggccccctttccgcgccctgctgcgctttttccaccaacgctaacaacggccttatggttaatgctaatggttacacccagcgtctgccgcagctgttccaggcattgctcgaggggtactttagctataccgctacggaagatcagcttgagcaggcgaagtcctggtataaccagatgatggattccgcagaaaagggtaaagcgtttgagcaggcgattatgcccgcgcagatgctctcgcaagtgccgtacttctcgcgagatgaacggcgtaaaattttgccctccattacgttgaaagaggtgctggcctatcgcgacgccttaaaatcaggggctcgaccagagtttatggttatcggcaacatgaccgaggcccaggcaacaacgctggcacgcgatgtgcaaaaacagttgggcgctgatggttcagagtggtgtcgaaacaaagatgtagtggtcgataaaaaacaatccgtcatctttgaaaaagccggtaacagcaccgactccgcactggcagcggtatttgtaccgactggctacgatgaatacaccagctcagcctatagctctctgttggggcagatcgtacagccgtggttctacaatcagttgcgtaccgaagaacaattgggctatgccgtgtttgcgtttccaatgagcgtggggcgtcagtggggcatgggcttccttttgcaaagcaatgataaacagccttcattcttgtgggagcgttacaaggcgtttttcccaaccgcagaggcaaaattgcgagcgatgaagccagatgagtttgcgcaaatccagcaggcggtaattacccagatgctgcaggcaccgcaaacgctcggcgaagaagcatcgaagttaagtaaagatttcgatcgcggcaatatgcgcttcgattcgcgtgataaaatcgtggcccagataaaactgctgacgccgcaaaaacttgctgatttcttccatcaggcggtggtcgagccgcaaggcatggctattctgtcgcagatttccggcagccagaacgggaaagccgaatatgtacaccctgaaggctggaaagtgtgggagaacggtgagcgcctgattgaagcctctgacggcacaggcaaaaacctttacgattgcggcgctctatttgcgcctgttacttggactaggcggttccgccgcctttccccgcccgctgaccgttgaagaactgctggtggtcacctttaccgaggctgccacggcagaattgcgcggtcgtatccgtagcaatatccacgagttgcgcatcgcctgtctgcgtgaaaccaccgacaatccactgtacgaacgcctgctggaagagatcgacgataaagcgcaagccgcgcagtggttgttgttagccgaacggcagatggatgaagcggcagtctttactattcacggcttttgccagcgcatgctcaacctgaatgcctttgaatccggcatgctgtttgagcagcagctgattgaagatgagtctctgctacgctaccaggcctgcgccgatttctggcgtcgccactgctacccgctgccgcgtgaaatagctcaggtcgtctttgaaacctggaaagggccgcaggcgttgctgcgcgatattaatcgttatctgcaaggcgaagcgccggttatcaaagccccgccgcccgatgatgaaacgctggcttcccgtcacgcgcaaattgtggcgcgttgatatcggtcagaccatcactgctattcgtactcaggcgggcattgttcagcggctggcggcagataacgccagcgtgaagcagagcgggcagctcatcgaacaactatcgctgggcgtttacgacgcggtgcgccgtttgttgggtcggttacgtccgcgccagttggatgatctcaccctggagcaggccatccgctcactgatgcgggaaatggagctggaagggcgcggtattgtcagccatctcgaatggcgaatcgatgaatcagcgttaagcgaaaaccagcgcgtgacgctgtttcgtgtctgccaggaagggctgaacaacattgtgaaacatgctgatgccagcgcggtcaccctgcaaggctggcagcaggatgaacggttgatgctggttattgaagacgatggcagcggtttgccgccgggtttgatgatgttgccgtttctgaaagcgcctgccgatgcgccattaatgactgataaatatgaaattgatgcccgctatcgctactggcgtcggcatattctgctgaccatctggctgggttacgcgctgttttacttcacgcggaaaagttttaacgccgccgtaccagaaatccttgctaacggcgtgctcagccgtagcgatatcggcctgttagcgaccctgttttacattacctatggcgtgtcgaagtttgtctccggcattgtcagcgatcgctcaaatgcccgttattttatggggatagggcttatcgccacgggcattatcaacattctgtttggcttctcgacgtcgctatgggcgtttgccgtgctctgggtgctgaacgcctttttccagggctggggttcaccggtgtgtgcgcgtctgttaacggcctggtattcacgtaccgagcgcggcggttggtgggcattatggaacacggcgcataacgtcggcggcgcactcattcccattgtgatggcagcggctgcgctgcattacggctggcgtgccgggatgatgattgctggttgtatggcgatagtcgtggggatttttctctgctggcggctacgcgatcgcccgcaggcgttaggtttaccggcggtcggtgaatggcgacacgacgcgctggaaattgctcaacaacaagaaggggcagggttgacgcgtaaagagatcctcaccaaatatgtgttgctgaatccgtatatctggctgctttcgttttgctatgtgctggtctatgtggtccgggcggcgatcaacgactggggcaatttgtatatgtccgagacactgggcgtcgatctggtcacggcgaatacggcagtgacgatgtttgaactgggcggatttatcggtgcgctggtagccggttggggctcggacaaattgtttaacggcaaccgagggccgatgaatttgattttcgccgccggaattttgctttcagtcggctccctgtggctgatgccatttgccagctacgtgatgcaggcaacctgcttcttcaccattggtttttttgtctttggcccacagatgttaatcggtatggcggcggcagagtgttcccacaaagaggcggcaggggcggcgacggggtttgtcggcttgtttgcttatctgggggcgtcgcttgctggttgggcgctagggaaagtactcgatagtaaaccgtcccattcccaaaaattagaaccgaagattaagtttaacctgggggcccatgaggtggcaacccataaagggcgtgcccaggagcgaatccacggaaacgcgggcacgggaaagagacggccagcgcgaaaggacaataggggcatcggatccccatacaggagagcccggggacagacacaaatcaagcggaggtatccaaacgggttggtcgtcgaccaagctggctggtgccgaccccgtgtgaggtggaaagagagaagagaggacgaagaaagaagaaaagaaggagagagaagagaggaaagaagaaggagaggcggaaacgacaagagagaggaagcagaaaagacgagaaagaagaaaaagaaggagagagaaagagagggagggggggacgacaaacggaagaagacgcaggccaactgggttggtgcagaaccccggtcagcaaacgctggccttacggtactatggttgagtcaaccggagaccagtatggctggcacaccattgaccagacacagcaatagacacaagacacagacgcaatcaggaccgagatcgcaaaccgacgacgagaacagcacacaaacagcagcaagatcgaaagagcagcagaagagcaagacgagagccgcggcgcgagggacagcagaagcgacagaagtgaaccctgacgcagatagtccatcgctgccaggtgctctttccacagggagtcaagcgtttagcgcaaatgcagcagcttag

SEQ ID NO: 143139 - DNA, 287 bp, Homo sapiens
cgcgtccggcatcacgtccggtgacgaaatttgatcaacgtggtcatcgtcttggtcacggagtatggaacttaatgttcgagagggtgaaataatggcaaagaaccgtagccgtcgtcgaacaaactggcctttgacggcagcggttatctggcctgggaaggtctgatctgcatgcaggaaatcggcaaatgcaccgaagaacatcaggcgattgtgcgtaagtggctggaagagcgcaaactggatgaggtacgcaccagcgaacttttcgacgtttggtggga

SEQ ID NO: 143140 - DNA, 171 bp, Homo sapiens
cttatgcggaacatatgcttgaagtgatgtcttctattggcgattatacaaaccgcgtccggcatcacgtccggtgacgaaatttgatcaacgtggtcatcgtcttggtcacggagtatggaacttaatgttcgagagggtgaaataatggcaaagaaccgtagccgtcgt

SEQ ID NO: 143141 - DNA, 2187 bp, Homo sapiens; identical to SEQ ID NO: 130140

SEQ ID NO: 143142 - DNA, 2374 bp, Homo sapiens
  misc_feature (1)...(2374): n = a,t,c or g
ggtcaccgtcgggaagcgcgccataaagcgttcaaaataggggataacggtcgcaacctgagtttgttgcaacatcacttctgagagccatactttgtagggcgtcttgtcaatttgccagggcagagtttttcgcccgtatttatcgtaccagtccagaacctgggctgaaaattgcgacgcttgcatggtcaccgaattcactgttgttgggggcaagattgcagcacagcgacggcagggtgtaaaccggaactttccgcagccacggccttatcatgcttgcatccggcaactaactttggataatgcccgttttcagaacactttcacaagcgactaaacctttatgaaaaacgacgtcatttcaccggaatttgatgaaaacggccgcccactgcgccgtatccgtagttttgtgcgccgccaggggcgactgaccaaaggccaggaacatgcgctggaaaactactggccggtgatgggcgttgagttcagcgaagatatgctggatttccccgcgctttttggccgtgaagcgccggtgacgcttgagattggttttggcatgggggcgtcgctggtggcaatggctaaagatcgccctgagcaggacttcctcggcattgaagtgcattcaccgggcgttggtgcgtgcctggcttctgcgcatgaagaaggtttaagcaacctgcgcgtgatgtgtcacgatgcggttgaagtgctgcataaaatgattcctgacaattcattgcgcatggtgcagctctttttccctgacccgtggcacaaagcgcgccataataaacgccgtatcgttcaggtgccgtttgccgaactggtaaaaagcaaactgcagctggggggcgtattccatatggcgaccgactgggaaccttatgcggaacatatgcttgaagtgatgtcttctattgacggttataaaaacctgtcagagagcaatgattacgtaccgcgtccggcatcacgtccggtgacgaaatttgaacaacgtggtcatcgtcttggtcacggagtatgggacttaatgttcgagagggtgaaataatggcaaagaaccgtagccgtcgtctgcgtaaaaaaatgcacatcgacgaattccaggaattaggattttcggtggcatggcgattcccggaaggtacatcggaagaacagattgataaacccgttgatgattttattaacgaggttatcgacccgaacaaactggcctttgacggcagcggttatctggcctgggaaggtctgatctgcatgcaggaaatcggcaaatgcaccgaagaacatcaggcgattgtgcgtaagtggctggaagagcgcaaactggatgaggtacgcaccagcgaacttttcgacgtttggtgggactaagaaagcatacgggcgatgacaaatgcaaaactgcctgatgcgctacgcttatcaggcctggaaagatgcacgatcgagtaggcgggataaggtgtttacgccgcatccggcatggaaaacgcgtactttgttatcaatctggggccagcaaatgctggcctgattttttcttgagggaagactatgatgcgcaaaatgctgctggcggcagcactttcagtgacggcaatgaccgctcacgccgactaccagtgcagcgtcacgccgcgtgacgatgtgattgtcagcccgcaaaccgtgcaggtgaagggcgaaaacggcaatctggtgatcacgccagacggcaacgtgatgtataacggtaagcaatattccctgaatgccgcccagcgcgagcaggcgaaggattatcaggctgaactacgcagcacgctgccgtggattgatgaaggcgcgaaaagccgcgtcgagaaagcccgtattgctctggataaaattatcgttcaggagatgggcgaaagcagcaaaatgcgcagccgtctgaccaaacttgatgcgcaggtgaaagagcagatgaaccgcattattgaaacgcgcagcgatggcctgacgtttcactataaagccattgatcaggttcgcgccgaaggccagcaattagtgaatcaggcaatgggtggaattttacaggacagcattaatgaaatgggcgcgaaagcggtgctgaaaagcggcggtaacccattacagaatgtgctgggaagcctgggggggctgcaatcctcaatccaaaccgagtggaaaaagcaggaaaaagatttccagcagtttggcaaagatgtttgtagccgcgttgtgactctggaagatagccgcaaagccctggtcgggaatttaaaataatcctctattttaagacggcataatacttttttatgccgnttaattcttcgttttgttacctgcctctaactttgta

SEQ ID NO: 143143 - DNA, 1049 bp, Homo sapiens
gctaggggacagatgctcggggagaggggagctgcgcgggcgagcagcaggaggcatggggcagtgtgggcggaggggagagcggaaggagtgagaggagtggaacgagggacgatggcgcagagaggaagagagggggataacacctggggggtccggggccagggggtgcggcgcggcacgtagcgaaggcgcgaggagagagatcatgctaaagagaagttttgaaaaagaaagggtgcgaagaagggcctataataccgggggctgccaccggggggagaggaaaggagtggccaagtgtcagaggagtgtcgtctccgcattaggccagttttctcgttcaggaatccagctgctggaccgactgggaaatttcgggacggggtggcccaacttcgaccgaaagaggttcggttccaccatgcgcaccacagttaacgcgcaaacacgcgaccgccgcaaaggcgtccagccaccgacagccctggatttttaatgacaccaaagaccagctggagcggcgaatcgcccgtctggaaacgggcatggcctgggcagaagagccgccgtcacgcacccgtcacttaatcagcatctgccagataagcgaacccgacatcccaaacgtattttctgtgcgggtaaattatctgctttatcgggcccacaaagagcgcgatgaaacattctatgttggaacgcgtttcgacaaagttcccccttctgaagaatacaacctggcgctgcttgaaacgggatatcgtcctggatcaagcggtaatcacttcccataacctgagtgtactgttctgatgaatcgaatttatgcgtgtcccgttgcggatgtgccggagggtgaggctctccggatcgatacctcgcccgtcatcgccctgttcaacgttggcggcgagttttatgccattaacgatcgttgcagccatggtaatgcgtcaatgtcagaagggtatctggaagatgacgccacggtggagtgcccgctacacgccgccagtttttgcctgaaaacggggaaagcgttatgc

SEQ ID NO: 143144 - DNA, 1671 bp, Homo sapiens
atgctttttgatgtttttcagcaataccccacggcgatgcccgtcctggcaaccgtcggaggattgatcatcggcagttttttgaatgtggtgatttggcgttacccaatcatgctgcgccaacaaatggcggagtttcacggcctctccacagtgggtcacagttacccgaatccggttttgcagatgctgttatcccctgatttccaaaataagtttcgccaaagggaaaaaattagtgttcgtctttacaaaatcttggtaattgtctacggccatcagacgtcggtattcatcccacgcatagagttcggtcataccgctgatataatcctgcagccaggcgtcaacggcattttcaaccaccagcgaaaagagcgaacctttctcatgctggccccacgcttcgtgcaaatgatgataaagctgctcaacggtaaatattcttttctctaccgcatcttcaagaccaccgccggaacgcgtaccgtagtggatttcgccggtttcacggtcgtaaatacgggtgctctgaccaatgtatacgcccatggaaatgacggaaccttcttcgacaatcaccccttcaaccacttcagagcgcgcgccgatgaagcaattatcttcaatgatggttgggttagcctgcagcggttccagcacgccgccgatgcccacgccacaggaaaggtggaggtgctggaaagccacggcgtaccgacggtgaataaagtgcaactcggaacgactcctgtggtgcgcggggcgattacttccggtgaactggatatctatccggaatataccggcaatggcgctttcttctttaaagatgaaaacgatgcagcgtggaaaaacgcgcagcaaggttacgagaaagtcaaaaagctcgattcggagcacaacaagttaatctggctgacgcccgcgcctgcaaataacacctggactatcgccgtgcgtcaggatgtggcagagaaaaataaactcacttcgcttgccgacctgagtcgttatctgcaagagggcggcaccttcaaactggcagcctcggcagagtttatcgaacgcgccgatgcgttacccgcgtttgaaaaagcctatggctttaagctcggtcaggatcagttgctgtcactggctggtggcgacacggcggtgacgatcaaagccgctgcccagcaaacctctggcgttaatgctgcaatggcttacggcactgacggcccggtagcggcgctggggctgcaaaccttaagcgatccgcaaggtgtgcaacctatctacgcgcctgcaccagtggtgcgtgagtcggtgttgagggagtatccgcaaatggcacagtggctacagccagtcttcgccagcctcgatgcaaaaacattgcagcaactgaatgccagcattgctgtggaaggactggatgccaaaaaagtggctgccgactacctgaaacaaaaagggtggacgaagtaatttcccgtgacttatttccgtattaatcctgttctggcgctgctgctgttgctgacggcaatcgcagcggcgctgccgtttatcagttacgcgcctaatcgtttagtttcgggtgaggggcgtcatctctggcagctgtggccgcaaacgatctggatgctggtggtcgttggttgcccctggctgaccgccttg

SEQ ID NO: 143145 - DNA, 1434 bp, Homo sapiens
atggcttacggcactgacggcccggtagcggcgctggggctgcaaaccttaagcgatccgcaaggtgtgcaacctatctacgcgcctgcaccagtggtgcgtgagtcggtgttgagggagtatccgcaaatggcacagtggctacagccagtcttcgccagcctcgatgcaaaaacattgcagcaactgaatgccagcattgctgtggaaggactggatgccaaaaaagtggctgccgactacctgaaacaaaaagggcaagatgtcgctttccgttctcagcaagcgcaacgtgcctgtcgtaccgggcttcaggagaataagtggcggacggccagtaatggtgctggcactgtcgacgcttccccggcggcccaacgcgttgcgggttgtactgttctgatgaatcgaatttatgcgtgtcccgttgcggatgtgccggaggctgaggctctccggatcgatacctcgcccgtcatcgccctgttcaacgttggcggcgagttttatgccattaacgatcgttgcagccatggtaatgcgtcaatgtcagaagggtatctggaagatgacgccacggtggagtgcccgctacacgccgccagtttttgcctgaaaacggggaaagcgttatgcctgcccgccaccgatccgctcaccacttatccagtacacgttgaaggtggtgacattttcatcgacttaccggaggcgcagccatgagcgatctgcataacgagtccatttttattaccggcggcggatcgggattagggctggcgctggtcgagcgatttatcgaagaaggcgcgcaggttgccacgctggaactgtcggcggcaaaagtcgccagtctgcgtcagcgatttggcgaacatattctggcggtggaagcgattcgcgcattcgccacgtagcggctgggctggatctttaaggaagcacgatgaaagaaaaaacgatcattattgtcggtggcgggcaagcggcggcaatggctgcggcctcgtacgccagcaagggttcaccggtgagctgcatctgttttccgatgagcgacatcttccttatgaacgacctccactctcgaaatccatgttgctggaagattccccgcagttacagcagtcttttacgatcgagcagcatgaagatttaaaaagtcatgagctggtgtcgctggtcaaagaaagtgagatggaatctctttccttactgtttgattttgcgaacatgatcaatgcaaatgagcatcccatcgacgctttaaaaacgatggcaccgcatattacccaggtccatatcaaagatgccttgatcgttaaagaaccgggtggcctgggtcataaagcctgtatttcaggtcagggtgatatgccgttcaaagcgttattaacgcaccttatctgcctgggtgatgatgagccgcagtga

SEQ ID NO: 143146 - DNA, 359 bp, Homo sapiens
ccctttattttgatccaagggtaaatccggaacgttaatattaagaatacgcccggtgcgcagcggctctttacacagtgcgcgcaaaattgaacaggttaccgccgcggcagtgtcgtaatgtttatgcccgtcaagcgagacggcaagcgccggaaaacctaaatgacggccttccatcgcggcggctaccgtaccggaataaataacatcatcccccagattcggcccggcgttaattccggacacaacaatgtccgggcgcggacgcatcagagcattcacgccaagatagacgcaatcggtcggggttcccatttgcacagcaatatcaccattttcaaaggtaaactgggcca

SEQ ID NO: 143147 - DNA, 2502 bp, Homo sapiens
atgcagcggcgtgatggagacatagccctcatctaccgcagcaaaatcggtccccggaccagcatcacatttaccgcccggcgggccaatccagtacagcgtattgccgcgcggatcttgctgcgggatcacctgatctgccggatgtcgtgtaccgcagcgcgtcacgcgaatacctttgatttgatccaagggtcaggggcagacaatttcgcagccatatatggtggcgcgaatgaccgaattactcgagctgacgccgcagtcgcgggtgctggaaattggcaccggttcgggatatcaaacggcaaactgtcgccgcgttctatcaccaggacatccagcccggctcgtgccatgaccaaaatgccctataatccacaggcttctggcgggagcaatctggcggtcagtaaccctgagctggataaactaatagccgcacgcgttgctgcattacgggccgctaacccggatgccagcgcgagcgttccggttgaactggtgacggcatcggcaagttacccaaggagcttgatgagatgtaacaggattctatctccaggaagtgcacgtggacaaatgattataacagcactgtttatctatgcgggtaacccgattgcctgcgtggctgcgctggaagtgttgaaggtgtttgagcaggaaaatctgctgcaaaaagccaacgatctggggcagaagttgaaagacggattgctggcgatatcattctggcgtgctaaatggctgaaaatattcgtcgtttgcggagccgagatctttgttgagtatgtgctgaaaaacaaagtgatctggctgctgtgcttcgccaacattttcctctatgtggtacgtattggtatcgaccagtggtcaaccgtatacgcgttccaggaactgaaactctctaaagcggtggcgattcagggctttacgctgtttgaagctggtgcgctggtcggtacgctgctgtggggctggctctctgacctggcgaacggtcgccgtggcctggtggcctgcatcgcgctggcgctgattatcgccacgctcgtcatcccttttcatatggtattccatccaaacgaacaatatgcgtattgcgtcaatgagttaaacagctcagtggatgtctgggaactgaaagatccgcacggtaatatcgaatgtgtccagacgctggatatgatgccggaaaacttctccgacacccgttgggcggctgatattcatatcaccccggatggtcgccatttatacgcctgcgaccgtaccgccagcctgattaccgttttcagcgtttcggaagatggcagcgtgttgagtaaagaaggcttccagccaacggaaacccagccgcgcggcttcaatgttgatcacagcggcaagtatctgattgccgccgggcaaaaatctcaccacatctcggtatacgaaattgttggcgagcaggggctactgcatgaaaaaggccgctatgcggtcgggcagggaccagatgtgggtggtttgaccatcgccgttaccgcccacgagggtgatatttttaccgagcagttcaaacagcggtttaacacgttcaaataccgcttcatcaccgccaaccataatcgacaagaggctccaccgcgcagccgcaaaaagagcggacgggtctgcgccgccgcaggaggagcaggcgccgccgccatcatgctgctgcctgtgttcaccctgaaactgcgccacaaaatcagcccccgaatggtggccatagggcgctacgacgggactcacccgtgcctggcggccgccacccaaacgggcaagtccctgatcaatcgatgcggtatacagttcgacgtccgggtgcgctttttccagcgcagcgataccttctggcgcagctaccagcaccagaactttgatgctgctgcagcccgcttttttcagcaggtcgatggtcgcgataacggaaccaccggttgccagcattgggtcaacgatcagcgccatacgctcatcgatgttagaaaccagtttctggaagatccgctgaagtttgaaaaggacaaaataaaaggggcgattcgtaccgattttatattgtctgcggaaatcgtcgccatcacgctggggattgtggatgccaaagctggaagaaaagaaattatgatgtccaccacgttatttaaagatttcaccttcgaagccgctcaccgcttaccacacgtcccggaagggcataaatgtggtcgcctgcacgggcattcctttatggtgcgactggaaattaccggggaagtcgatccgcatacgggctggattatcgatttcgctgaactaaaagcggcgtttaaaccaacctacgagcgcctcgatcaccattatctcaatgatattccaggtctggctggtgctctcgcgactgaatatgcgccagggcgcgacgccaggcgatacgccgcgccgctacgcttaagccacgcagtaccgtctggtacagcaggttccagatga

SEQ ID NO: 143148 - DNA, 1944 bp, Homo sapiens; identical to SEQ ID NO: 138535

SEQ ID NO: 143149 - DNA, 586 bp, Homo sapiens
tgggtattcttctgccgggccgcgaggcacacgcgctgcgtgactatctgccagatgcctttgggccgaaagatctggagattaaaacgctgctgatggacgaacaggatcacggctatgcgctgacgggtgatgcgctttctcaggcagcgattgcggcggcaaaccgttcgcacatgccttacagtaagtcgccaagcggtgtcgcgctggaatgtaaagacggtcgtattttcagtggcagctacgctgaaaacgccgcattcaacccgactctgccaccgttgcagggagcgttaattctgttgaatctcaagggttatgattacccggatatccagcgcgcggttctggcagaaaaagccgatgcgccgttgattcagtgggatgccacctccgcaacgctgaaagctctcggctgtcacagtatcgaccgagtgcttctcgcttaagcctggtgccggatgcggcgtgaacgccttgtccggcttgccagccctctcctggtgtcgaaattcccggcaaacagtttgccgtttcttgcgcaaaaccagcgggtaaagtagcctgatggaaattttcctta

SEQ ID NO: 143150 - DNA, 3684 bp, Homo sapiens
atgtgcgaactcgatattttacacgactctctttaccaattctgccccgaattacacttaaaacgactcaacagcttaacgttggcttgccacgcattacttgactgtaaaactctcactcttaccgaacttggccgtaacctgccaaccaaagcgagaacaaaacataacatcaaacgaatcgaccgattgttaggtaatcgtcacctccacaaagagcgactcgctgtataccgtaggcatgctagctttatctgttcgggcaatacgatgcccattgtacttgttgactggtctgatattcgtgagcaaaaacgacttatggtattgcgagcttcagtcgcactacacggtcgttctgttactctttatgagaaagctagttcatatggggcggagcagtatgctctggtcgtcggttccgatgtactggcgcgcacctgcgatccaaccgatcgtgggactattattatttttggcgatggcgcgggcgctgcggtgctggctgcctctgaagagccgggaatcatttccacccatctgcatgccgacggtagttatggtgaattgctgacgctgccaaactttttccgcgtgaatccagagaattcaattcatctgacgatggcgggcaacgaagtcttcaaggttgcggtaacggaactggcgcacatcgttgatgagacgctggcggcgaataatcttgaccgttctcaactggactggctggttccgcatcaggctaacctgcgtattatcagtgcaacggcgaaaaaactcggtatgtctatggataatgtcgtggtgacgctggatcgccacggtaatacctctgcggcctctgtcccgtgcgcgctggatgaagctgtacgcgacgggcgcattaagcccgggcagttgggttctcaaaccgttggaatgctggctgatatggcggcgagctatccaattgtcgaagaaacgtttgctgaagcttctgcggcgctgggctacgacctgtgggcgctgacccagcaggggccagctgaagaactgaataaaacctggcaaactcagcctgcgctgttgactgcatctgttgcgctgtatcgcgtatggcagcagcagggcggtaaagcaccggcaatgatggccggtcacagcctgggggaatactccgcgctggtttgcgctggtgtgattgatttcgctgatgcggtgcgtctggttgagatgcgcggcaagttcatgcaagaagcgtaccggaaggcacgggcgctatggcggcaatcatcggtctggatgatgcgtctattgcgaaagcgtgtgaagaagctgcagaaggtggttattgccggtcataaagaagcggttgagcgtgtggcgctgcctgtaaagcggcggcgcaaaacgcgcgctgccgttaccatgagcgtaccgtctcactgtgcgctgatgaaaccagcagccgacaaactggcagtagaattagcgaaaatcacctttaacgcaccaacagttcctgttgtgaataacgttgatgtgaaatgcgaaaccaatggtgatgccatccgtgacgcactgttcattattgaaggcgcgctggttgtcgtttcgcacgaccgtcatttgctgcgttccaccactgacgatctctacctggttcacgatcgtaaagtcgaaccgttcgacggcgatctggaagattatcaacagtggttgagcgacgtacaaaagcaggaaaaccagaccgacgaagcgccaaaagagaatgcgaacagcgcccaggctcgtaaagatcagaagcgtcgggaagctgagctgcgtgcgcaaacccagccactgcgtaaagagattgcccgtctggaaaaagagatggagaagctgaacgcgcaactggcgcaggcggaagagaaactcggcgacagcgaactgtatgaccagagccgtaaagcggagttgaccgcctgcctgcaacagcaagccagcgccaaatccggcctggaagagccaaagcaactgatggcgcagataacgacgaccgatgccaatgaattcagcagcagtgctgaattcatccccatgcgcggctttagcaattgtcatctgcaaaccatgctgccgcgtctgtttcgtcgtcaggtgaaattcaccccgtactggcagcggctggagttgcccgacgggcgatttgtcgatctgcgtggagtgaaaaccctgcacagggcgcacataaacctcgtctgcggtgacccaaaccgtatgcaccgcatttaccattcgggcgaaaccgaagacgccagttggtttttacgctggctgcaacgcgaatttggtcatgcgccaacggctgccgtcggctattcgctcggcggtaatatgctggcctgtttgctggcaaaggaaggcaatgatctcccggttgatgcggcggtgattgtctctgcgccgtttatgctggaagcctgtagctatcatatggaaaagggcttttcccgcgtttatcagcgttacttgctgaacctgttaaaagccaatgccgcgcgcaagctggcagcctaccccggaacgctgccgattaatctcgcgcagttaaaatcggtacgtcgcatccgtgaatttgacgatctcatcaccgccagaattcacggctacgccgacgctatcgactattatcgtcagtgtagcgccatgccgatgctgaaccggatcgccaaaccgacgctgattattcacgccaaagacgatccgtttatggatcatcaggtgatcccgaaaccggaaagtctccccccgcaggtggagtatcaactgactgaacatggcggtcatgaggctgtattggagtggctccaagtagcgaagcgagcaggcctggtcgtcggccaaatcggtcggacagtgctccgagaacgggtgcgcatagaaattgcatcaacgcatatagcgctagcagcacgccatagtgactggcgatgctgtcggaatggacgatatcccgcaagaggcccggcaattggcagtaacggcatgtctttttgggcatttcgcgacgatttgcaacgactgaatcaggtcgagcagagcaatcagcaacgtgcggcattagcgcaaactcgggcggtattgttacaggccagtaccgcgctgaacaaagcgggcactctgacggcacttagctatccggcggatgacattaaaacgttgatgacgacggcgcgcgccagtctgacgcaatccaccacgctgtttaaaagttttatggcgatgactgcgggcaacgagcacgtcaggggattgcaaaaagagacggagaaaagttttgcccgctggcacaacgatctcgaacatcaggcgacctggcttgaaagtaatcaactttcggatttcctcactgcgccggtgcagggatcacagaatgcgtttgacgttaactttgaggccctgcagctggagatcaaccatgtgctggaagccgccaaccaatattctggccctgaatgcggcagtggaagcgctcgcgccggagagcaggggcgtggttttgcggtagtggcaggtgaagtgcgcaatcttgccagccgtagcgcgcaggcagcaaaagagatcaaagggctgatcgaagagtcagtcaatcgtgtccagcagggttcgaaactggtgaataacgccgccgcgaccatgatcgatattgtcagttcgtga

SEQ ID NO: 143151 - DNA, 2529 bp, Homo sapiens; identical to SEQ ID NO: 138810

SEQ ID NO: 143152 - DNA, 2865 bp, Homo sapiens; identical to SEQ ID NO: 130073

SEQ ID NO: 143153 - DNA, 1568 bp, Homo sapiens; identical to SEQ ID NO: 130074

SEQ ID NO: 143154 - DNA, 3209 bp, Homo sapiens
acatataaagccacaacgggttcgtaaactgttatcccattacatgattatgaggcaacgccatgcatccacgttttcaaaccgcttttgcccaacttgcggataacttgcaatctgcactggaacctattctggcagacaagtacttccccgctttgttgaccggggagcaagtctcatcgctgaagagcgcaacggggctggacgaagacgcgctggcattcgcactacttccgctggcggcggcctgtgcgcgtacgccattgtcgaattttaatgttggcgcaattgcgcgcggtttgagctgaacctggtatttcggtgccaatatggaatttattggtgcgacaatgcagcaaaccgttcatgccgaacaaagcgcgatcagccacgcctggttgagtggtgaaaaagcgcttgcagccatcaccgttaactacacgccttgtggtcactgccgtcagtttatgaatgaactgaacagcggtctggatctgcgtattcatctgccgggccgcgaggcacacgcgctgcgtgactatctgccagatgcctttgggccgaaagatctggagattaaaacgctgctgatggacgaacaggatcacggctatgcgctgacgggtgatgcgctttctcaggcagcgattgcggcggcaaaccgttcgcacatgccttacagtaagtcgccaagcggtgtcgcgctggaatgtaaagacggtcgtattttcagttcggagtacgctgaaaacgccgcattcaacccgactccggatatccagcgcgcggttctggcagaaaaagccgatgcgccgttgattcagtgggatgccacctccgcaacgctgaaagctctcggctgtcacagtatcgaccgagtgcttctcgcttaagcctggtgccggatgcggcgtgaacgccttgtccggcttgccagccctctcctggtgtcgaaattcccggcaaacagtttgccgtttcttgcgcaaaaccagcgggtaaagtagcctgatggaaattttccttagatcgagtctcccgaccacatgctggacggcctggaaaccggtgcttccgtggcgcataacggttgctgcctgaccgtgacggaaattaacggcaaccatgtcagttttgaccaataccaacaatgtaccaacttgcgcagcaaggcgtacagctgcatgcgaaccccgtgtaccaggttccagcatgatgcaggcaaccgagccaacaggaatatgagtgcggatccctgtcttgtcgataagtacaaacgcgccatctattacatcgatctgcccatattgcagaaagatcatggagacgcgatcttgctgtacaagatctattaacgctggcgcgtcgttgatggtgagcacaccttcaaagcaaaccgtttggatctttccacttttaccatcaccagaaaaatactgtggccgttccgatatgggatgcacatcttcaacgcgcgccgcattgcccaatttacgttgcaaccacgcgatttgttctgcttcttttattaacggaacccgacagcgtttaatattccctttactgtccaggcgcttttgattgtcgagaatagttttgatcggatttgcccgaagccgaaaatagagtggaacaccaacctgaagttgaaattcaacctgtttagttttaatgacaaaagcgatacgttggttggcatagcgggcggcatcttcaaaggcgcattcggcaatagccatgtcgctctcttcaacctccacgttgtcgagatagacttcgcaggtgctgagcatatgccagccgattttatgcagcgggttaatcttaatgccgggcttactggagtcgacccaccacagggtgaaggcttttttgggatctttcggttgcggatcgcgcgccagcaccagcatatacgggtactctttcgcaccggtaataaaggttttttgtccgttgatgtagaccttgccgtttttacgcgtgtaagtggtagtggcactgttgttatctgagccagcacctggttccgtcaacgccagggcataggcgggatcacccgtttccagggtgctctctgccgttttacgtagctgctctgcagaaccgaaacggcgcatactgtgaatacattgaccgttggtaattaaaaatgccggagcaccgcattttgacacttccatcagcgccagcatttgggtgacgtaatccgcagggataccaccaaattcttccggcacgccaagcatggaaataccgttatccgccagcgcccgcataaactcacgcggatatgtcccgttttgatcgcaggtgcggaaatactcttccggaaagttagtcgtaatcagttcgcgaatactggccagcagcagttcttgttcttcagttaaagaaaaatccatcattatactcctgttaatgagccgcagcatccaggtcaactgcacgccggtaaagtcaaagtacggtgcccaggtcggactttctgccacccagccgccagagataatggcgaaaatcaggaataccagaccgatgaccgacacttcgccaatacgccccggacgcagatagcgcaggtagatccccataaacagcgccagcggaatggtgaacgcaacggtatatgttccccacgggctatgagtcagggctttcaccacgatcatcgccagcactgcaaggataatgaccatgatcataaagcaggccaccagcgcaatcaccccggcggttggccccatctcttctttgaccagctcacccagcgagcgaccgtcacggcgcgtagaaacaaacagcaccatgaaatcctgcaccgcaccggcgagaaccaccccagcgagcagccagatcatccccggcaggtagcccatttgcgccgccagtaccggccccaccagcggacctgctccggcaatggccgcaaaatggtgaccgaacagcactttcttgtccgtcggcacatagtccagcccgtcgttatggcgcaccgctggcgtcatacgcgtcgggtcaaccgccagcacatttttggcgatatacagcccataaaaacggtaagcgatcagatagatacagaccgacgccaccacaatccacagcgcgttgatctgttccccacgatttaaagcaatgtatcccagagcaaatgctcccattatagagagcactgtccagacgaggtatttccctgatttgttcat

SEQ ID NO: 143155 - DNA, 3400 bp, Homo sapiens
atgaagacaggtgtggtggtagaaaaggcgcctggtcatcagcgggggagtacacttcctccttcctttgctgcgtggtgcgtcctctaccacgtcagaagaatccagctgttactccgtcggcgtctctatctagttgtacggctcctctcatcgcatcgctgcgccccccgcaggcgggctgagtccgaaaagagagttagcaagggtggtggaattttgcgcgcactgtgtaaagagccgctgcgcaccgggcgtattcttaatattaacgttccggatttacccttggatcaaatcaaaggtattcgcgtgacgcgctgcggtacacgacatccggcagatcaggtgatcccgcagcaagatccgcgcggcaatacgctgtactggattggcccgccgggcggtaaatgtgatgctggtccggggaccgattttgctgcggtagatgagggctatgtctccatcacgccgctgcatgtggatttaactgcgcatagcgcgcaagatgtggtttcagactggttaaacagcgtgggagttggcacgcaatgcagcttaaacagcagctcgacccttgcggcgtgtttaaccccggtcgcatgtacgcggaactttgaggagcaggctatgcaaacccaattaactgaagagatgcggcagaacgcgcgcgcgctggaagccgacagcatcctgcgcgcctgtgttcactgcggattttgtaccgcaacctgcccaacctatcagcttctgggcgatgaactggacgggccgcgcgggcgcatctatctgattaaacaggagcatctcgatcgctgcctcacttgccgtaattgtgaaaccacctgtccttctggtgtgcgctatcacaatttgctggatatcgggcgtgatattgtcgagcagaaagtgaaacgcccactgccggagcgaatactgcgcgaaggattgcgccaggtagtgccgcgtccggcggtcttccgtgcgctgacgcagctgcttcggttacggcttcacttcggggtccgagctatccccagcagcccgagtgtcctagcagggtctgacaaccacggatgttccagttccacagccagcgatgatctcctctacggcaggaatccaactcgtatccacggtcgaaatcgaagctctctggaaagtgttacgagtgacgcgcacccgccaattccatggtcaacggtccccagtgatacactgagtgttcctggcatggcccagcgccccccactaaccaactctctcagagtgtgcccgacggagaaattatgccaaagcggttgtacccgtgccggtgttgatgctcccattgatatcggccgcttacagcgttttgttactgattttgaacaacaaaccggaatggaaatttatcagcccggtactaaaacgctcggcaaagtcgcgattattggcgcaggtcctgccggattgcaggccagtgtgacactgacaaaccagggttatgacgtcacgatttatgagaaagaagcgcaccccggtggctggttgcgtaacggtattccgcaattccggttaccgcaatcagtgctggatgcagagatcgcccgtattgaaaaaatgggcgtgaccattaagtgcaacaacgaagtcggtaacacactcacccttgagcagctgaaagcagaaaaccgcgcggtactggtcaccgtggggttatcaagcggttccgggctaccgctgtttgagcatagtgacgttgagattgccgtcgacttcttgcaacgtgcacgacaggcgcaaggcgatatcagcattccacaaagcgcattaattatcggcggcggtgatgtcgcgatggacgtagccagcacgctgaaagttctcggctgtcaggcggtaacttgcgacttgtattcccagcactttgggagtccgaggcgggcagatcacttaagtcgtcagtctgatgtgcatgtgaacgccgagggaacgctggtaatgagtctgcctctaattacgcctaaatcccgcactcgtccgccggtcgccgtgtgcgccgaatttcgatgtaagtgcacgtctgtgcatcgaccagggttgtccacagatctgagtcgggttgaatgcggcgttttcagcgtagctgccactgaaaatacgaccgtctttacattccagcgcgacaccgcttggcgacttactgtaaggcatgtgcgaacggtttgccgccgcaatcgctgcctgagaaagcgcatcacccgtcagcgcatagccgtgatcctgttcgtccatcagcagcgttttaatctccagatctttcggcccaaaggcatctggcagatagtcacgcagcgcgtgtgcctcgcggcccggcagatgaatacgcagatccagaccgctgttcagttcattcataaactgacggcagtgaccacaaggcgtgtagttaacggtgatggctgcaagcgctttttcaccactcaaccaggcgtggctgatcgcgctttgttcggcatgaacggtttgctgcattgtcgcaccaataaattccatattggcaccgaaataccaggttccgctcacaccgcgcgcaattgcgccaacattaaaattcgacaatggcgtacgcgcacaggccgccgccagcggaagtacggggaagtacttgtctgccagaataggttccagtgcagattgcaagtatccgcaagttggcaaaacaatgccgcgcgcaagctggcagcctaccccggaacgctgccgattaatctcgcgcagttaaaatcggtacgtcgcatccgtgaatttgacgatctcatcaccgccagaattcacggctacgccgacgctatcgactattatcgtcagtgtagcgccatgccgatgctgaaccggatcgccaaaccgacgctgattattcacgccaaagacgatccgtttatggatcatcaggtgatcccgaaaccggaaagtctccccccgcaggtggagtatcaactgactgaacatggcggtcatgttggctttattggcggtacattacttcatccgcaaatgtggctggagtcacgcattcctgactggttaacaacgtatctggaggcgaaatcatgttgattccgtggcaagacctctcccccgaaacgctggaaaatttaattgaaagctttgtgttacgtgaaggcaccgattatggtgaacatgagcgtacacttgaacagaaagtcgccgacgtcaaacgccagctacagtccggagaaccggtgctggtatggtcggagctgcaccaaacggtcaatattataccgcgcagtcagtttcgagaataacctccaaccgtcggcggacgagataataatgatagctaagtcatggagttactatgtctgccaaacatccggtcattgcggtaaca

SEQ ID NO: 143156 - DNA, 3538 bp, Homo sapiens
ttacggcttcgccacaaaaccaatcgcttcgtacaccgcttttagcgtacgggaagcgtgcgcgctggctttttccgcgccatctttcatcacctgttgcaggaaggcttcatcgttgcggaaacggtgatagcgttcctgcaattcagtcagcataccggaaacggcatcagccacttcacctttcagatgaccatacatcttgccttcgaactgtttttccagttctgggatgctcaccagacactcggtgctgccttcccacagttggcgagtgaagaccgcggtgtcgttttcaagtacataggtgagggcgatcaggttggtggcgtggcagtgcatgatcacccgatctttgccgttggtggctttaatgcgctcgcagtgggaaaggaagtgagccggaagttcggaagtggggacggcttcgttggttaacccccaaagaatgtggtagcccgcgccgtcgctgtcgacttttacgatgcctaagttagccgcaggatcaagctggacgttacggaagaatttgcccgagccggtgacaataaacggtgtatttgccagtaaaggcatgggctggctgagcgggatatagcgcggttgttggtggaaattgtcgtgatatggtgcgatatcggcgtcatccaggcgtagcgtcaggttgccgccgttgcgctcatgcccagccggaatatgttcacgtatccggatgctctgctgacaatgtggccagtgcgaacgcggtagcgcaaggcttatttttgactgcgcactcgacatttcaccgtgaaactccgccatttgttggcgcagcatgattgggtaacgccaaatcaccacattcaaaaaactgccgatgatcaatcctccgacggttgccaggacgggcatcgccgtggggtattgctgattaatggtttccggtccctgttccggtttcggcagatcgagtgacgcgagcgtgttgtaagccgactggctcacaccgccctcgaagctcatctcgctcgcccccggcagctggtaagcattcgcgcccggattccatttcttaaagaactccgaaagatccgtctgggcgacccaggaggcacacagcatcagcgtgtccgctgcgttaccgttggattcagcacagtaattcttgccgccaaacttgtcattgctgacctgcaaagctatgggatgaagcatccattggaggtcaaggtggattggcgtcctcttattattaatcagagtgcttagtgaatatttgccgacgggtaattggccatcagtttcaaattgggaaaggttaacgttttcacgatcttcggcttcgattaaatctttgttgaattcaacggcataagctgacgcacaaccaatgatgataactggatttgccctatgcggatgccattcgttataatgctcgaacgcctctgcaaggttctttgctgccgttaacccgtctggtttgggcatgatactgatgtagtcacgctttatcgttttcacgaagctctctgctattccgttactctccggactccgcaccgccgtgttcttcggttcaagtcccaacatccgggcgaactggcgtgtttcattagcccggtagcatgaaccattatccgtcagccactccactggagacgacggaagatcgtggccgaagcggcgttccaccgcaaaccagcaggacggtaccactattgtgtgccccgctcgatccgggatctcaacatctttctccagctcctcacacccaaggagagttttccaactctcatctgcatgagctccgaggttcctgtggccacttcgaatcgaaagggccacgggaacgtggagctgaatttgtggggattcagggaattggacgttagggaactgcccgaaatctgactgtgtctctctctctgtcctacagctccagcggcacgccatcaaatgccccaaacgccagaatggaggagctgggtcctcatccaggtgaggcatcttctctttttcatcctgagtccccgctgctggacgaactgttccttcccgaatataaagccggtcgcacgccgaatccggatattcggtcattacgtacgtcgggccgatgtcggatggcaagagccgcctgctgcgtggtctggacagcaataaagaccagagctacttcctttatacgctcagccatgagcagattgcgcaaagcctgttcccggtcggcgaactggaaaaaccgcaggtgcgtaagattgctgaagatcttggtctggtcaccgcgaagaaaaaagactctaccggcatttgcttcattggcgaacgtaaattccgcgagttcctgggccgttatctcccggcgcaaccgggcaaaatcattaccgtcgatggcgatgaaattggtgagcaccaggggctgatgtatcacactctcggtcagcgtaaaggtctgggtatcggtggcaccaaagaaggtaccgaagaaccgtggtatgtggtggacaaagacgtcgaaaacaacattctggttgtcgctcagggccatgaacacccgcggctgatgtctgtcgggttgattgcccagcagttgcactgggtcgatcgcgaaccattcaccggcactatgcgttgcacggtaaaaacccgctatcgccagacaatatccttgggaccgcttcgtaaaccgccacataacagatgtctggaaatataggggcaaatccagggttcttgtcccatgatgttcaaaactgtcaatatcctgcattgttagcgtagcgccactgccaatttccagcaaagctttatcctgtacccgaataaccccggcaaaccccagagggaattctccgctgattgtcgtatctccattcagatataccgacgactcaccactaacgacaataacgctggtataactatatcctgtgcgcaaggaagtaacctgcgacccatctgcaagcgcgtttttctctccaatcagttcaagtccaccattcatattaacggtattgccatcgccaatcacaaccagacctgacgttttctctgcgctgccatcaaataaattactctgacgagaagtaacctcactgtctgatacaacagttaactttccatccagcgtcacgttattatcactgccgtaaacgttgatacccacggatggatcgaagaaatattccgccgcattgtctgcggttttatccttatcaaccagaacgttaccagtgatattcactgtattcgcatcgccagaaacgtttatgcccgtcgctttctgcccgaccacttttagatcttttgccgccagcgtgttggagcaacggcgcgaaaagttcatttttaccactgcgaccaccggggcctgccgctggcgctcatcagcgaagacggctatacggcttggcgcggggagtatgatgaatggggcaaccagcttaatgaggagaacccgcatcacctgcaccagccgtaccgtcagttcggttatgatatggatgctattgttgccggagctcataatggggccgccgatgcaatgagacat

SEQ ID NO: 143157 - DNA, 1526 bp, Homo sapiens
ttatttgggcactacccgaactgcctcacgcttgttctctttgcaaatatatgtcaccacgtgcgcacgcgtattcatatggcaggtggcggtggggctgggggtggcggacaaggagcgtaaaattggaggccggggccgtaacgccaccggtgccttggtgacatcgggttttgatatagtagggggagtgggggaagcttgccacaccaccactctattacaggatttggtagtatgccgcctacgcctgccgcggatgtaacggatacccgcctgcgccaactgcacgctacgcgtactgatgtacagaatcggcagtgaaacatcgttgctacgccagcggcgaatcagtgacagaccgtcctcgtctggcaatccgagatcgacaatcgcaatatccggtatatgttcattgagataataatcggcttctttggcatcttctgcgtcatcgacctgatgaccagcatcctgaatcatcgtgatagctcgaccaatatagttagccggcgtcatcgctttcaggcgggctttctcttcttctggcaacgccagaccatcgataaactgcttcatgccttcggcgtcaacgcgcttaccgcgagtcagctctttcagcttctcgtacggtttttcgatgccatagcgacgcataactgtctggattggttcagccagcacttcccccttgtgatcccgttcatcccgcagatggtcgccggtcacttccagttggtcacgccccaccaggtgctgatgtatcacactctcggtcagcgtaaaggtctgggtatcggtggcaccaaagaaggtaccgaagaaccgtggtatgtggtggacaaagacgtcgaaaacaacattctggttgtcgctcagggccatgaacacccgcggctgatgtctgtcgggttgattgcccagcagttgcactgggtcgatcgcgaaccattcaccggcactatgcgttgcacggtaaaaacccgctatcgccagaccgatatcccttgcaccgtcaaggcgctggacgatgatcgcattgaagtgattttcgatgaaccggttgccgccgtgacgccgggccagtctgccgtcttctataacggtgaagtgtgcctcggtggcggtattattgagcagcgtctgccgctgccggtctgattattatctttacttaaaacaaggaagcagtgaacgtggcaaagaattactatgacatcaccctcgccctggccggtatttgtcagtcggcacgcctggtgcaacaactcgctcaccaggggcattgtgatgccgatgcgctacacgtctcactcaacagtattattgatatgaaccccagctcgacgctggcggtttttggcggtagcgaagccaacctgcgcgtcgggctggaaaccctgctcggcgtgctcaatgccagcagtcgccagggcttcaacgccgaattaacccgctacacactcagcttgatggtgcttgagcgcaaactctcctcagcgaaaggcgcgctggggatcctctag

SEQ ID NO: 143158 - DNA, 933 bp, Homo sapiens
atgcagcagttagccagtttcttatccggtacctggcagtctggccggggccgtagccgtttgattcaccacgctattagcggcgaggcgttatgggaagtgaccagtgaaggtcttgatatggcggctgcccgccagtttgccattgaaaaaggtgcccccgcccttcgcgctatgacctttatcgaacgtgcggcgatgcttaaagcggtcgctaaacatctgctgagtgaaaaagagcgtttctatgctctttctgcgcaaacaggcgcaacgcggcaaacagtgcactggccctgccgggaaactgtccggtcgctcatgcacaaaaacgtcacagtgcgccgggtacgctttcaccggatgctcgcaatgagaaacagccgttgtatgggcggagcagcaccagaaacgccaaatccgcgcctgccaccactcgattccggcattcttggcggctacattgcgcccgataatctcaccatcacgttatcggtgggtcactcattgtttgatgagcgctttggccttgcgccacagatgccaaaaaagctgcagaagatgacgcgtttccccaacgactcgctggatgcggcgttatgtcatggtgatgtgttgctacagatttgcgccaacacccaggacacggttatccatgcgctgcgcgatatcatcaaacacacgccggatttgctcagtgtgcgctggaagcgggaagggtttatttccgatcacgcggcgcgtagtaaaggcaaagagacgccgattaatttgctgggtttcaaagacggcactgccaatcccgatagccagaatgataagttgatgcaaaaagtggtgtgggtcacggcagatcagcaggagcctgcgtggacaatcggtggcagctatcaggcagtacgcttgaatcagtttcgaagtgtgatgaactaa

SEQ ID NO: 143159 - DNA, 861 bp, Homo sapiens
atgaatgaaattatctactgtgggtggacaccactcaatcatagggattttgccgatttcggaaccaccatcaaacaggattttcgcctgctggggcaaaccagcgtggaccgcttgctgcaactctctcagggccaggcggtgaagggcaatcagctgttgcccgtctcactggtgaaaagaaaaaccaccctggcgcccaatacgcaaaccgcctctccccgcgcgttggccgattcattaatgcagctggcacgacaggtttcccgactggaaagcgggcaacgcactgccaatcccgatagccagaatgataagttgatgcaaaaagtggtgtgggtaacggcagatcagcaggagcctgcgtggacaatcggtggcagctatcaggcagtacgcttgattcagtttcgagtggaattttgggacagaacgccgctgaaagaacagcagacgatttttggccgtgataagcaaaccggtgcgccgctgggaatgcagcatgagcatgatgtgcctgattacgccagcgacccggaagggaaggtgatcgcgctggacagccatatccggctggcgaatcccgcacggcggagaggattttgccgatttcggaaccaccatcaaacaggattttcgcctgctggggcaaaccagcgtggaccgcttgctgcaactctctcagggccaggcggtgaagggcaatcagctgttgcccgtctcactggtgaaaagaaaaaccaccctggcgcccaatacgcaaaccgcctctccccgcgcgttggccgattcattaatgcagctggcacgacaggtttcccgactggaaagcgggcagtgagcgcaacgcaattaatgtga

SEQ ID NO: 143160 - DNA, 1704 bp, Homo sapiens
atgcctttcctcctttctttcccatcagagcggaaacgcttgggcattggccagtctcaggagatgaacacactcttccgcttctggtccttcttcctccgagatcacttcaacaaaaagatgtatgaggagttcaagcagctggctctggaggagcggtaccggagctcgattgatagtgtgagccactgcagcttccggagtctatctccagtatcaccatgggtaacggcagatcagcaggagcctgcgtggacaatcggtggcagctatcaggcagtacgcttgattcagtttcgagtggaattttgggacagaacgccgctgaaagaacagcagacgatttttggccgtgataagcaaaccggtgcgccgctgggaatgcagcatgagcatgatgtgcctgattacgccagcgacccggaagggaaggtgatcgcgctggacagccatatccggctggcgaatccccgcacggcggagagtgagtccagcctgatgctgcgtcgtggctacagttattcactgggcgtcaccaactccgggcaactggatatggggttgctgtttgtctgctaccaacacgatctggaaaaaggcttcctgacagtacaaaaaaggctcaatggcgaagcgctggaggaatacgttaaacctatcggcggcggttatttttttgcgccaaggaaaaaggggaagtcagaggagtccagattttcccacctgacctctctgcctcagcagctgccttcccagcagctgatgtccaaggatcaggatgagcaagaggaactggattttctgtttgacgaggagatggagcacagccacgggatgacccttaactcactggtttccggcggttgtgtgatctccggttcggtggtggtgcagtccgttctgttctcgcgcgttcgcgtgaattcattctgcaacattgattccgccgtattgttaccggaagtatgggtaggtcgctcgtgccgtctgcgccgctgcgtcatcgatcgtgcttgtgttattccggaaggcatggtgattggtgaaaacgcagaggaagatgcacgtcgtttctatcgttcagaagaaggcatcgtgctggtctttgtgaaaagtgcaatgacaagctctccgctgcgggtcgcgataataggcgcaggccaggtggcggataaggttcatgcttcgtactactgcacccgcaacgatctggaactggtggctgtctgtgacagccgcctttcccaggcgcaggcgctggcagaaaaatacgggaatgcatccgtgtgggacgatccgcaggccatgctgctggcggtgaaacctgatgtggttagcgtctgctcacctaaccgttttcattacgaacataccctgatggcactggaagcgggctgccatgtgatgtgcgaaaaaccgcccgccatgacgccagaacaggcgcgggaaatgtgcgataccgcgcgcaaactgggcaaggtgctggcctacgactttcaccatcgttttgcgctcgatacgcaacagctgcgtgaacaggtgaccaacggcgttttgggagagatttacgttaccaccgcccgcgccctgcgtcgctgcggcgttcccggctggggtgtctttaccaataaagaactgcagggtggtggcccagctgatcgacatcggcattcatatgcttcactggatctaagctgttgctaa

SEQ ID NO: 143161 - DNA, 1326 bp, Homo sapiens
tttttttttttttttttagaacagaaatttattgtctcatagttcttgaggccagaaatctgaaatcaagctgtggcagagcatgactccctctgaaggagctggggaagggtctgttccacctgcttctggcttctggtagcctcaggcatcccttagctggcagacgcatcacccgaatcctgggcccccatcaggtggctgtttgcacattgccttctagttgcctggggaatacaacaggggcatgcacacccatcagcaaacccaagagcttcaagggtcgaacatacataaaagggcacctcagcaaaggcactatcaaaccattgcgtttgggcagtgggggcacacccattggaccacccaaaactacatttaccacaaccaagatgtatccataccacatccccataggttccctaaggttcctttggtcattttcagaccaatattgtacaggatgtatagcgaaaggagaaaaagatatacctcgatcaccccctttctcccaagtgaaaataaaaggttatcagtttgcaacattgaacaacattcgttgcaaatcgataacaacatgcaccttcaggatactatttattatgttcggcaatgatattttcacccgcgtaaaacgttcagaaaataaagaatatatggcggaaatcgcccaattcctgcatgaaaatgatttgagcgttgacaccacagtcgaagtatttattaccgtaacccgcgatgaaaagcttatcgcgtgcgtaccggggaaggcccgatagccagaatgataagttgatgcaaaaagtggtgtgggtaacggcagatcagcaggagcctgcgtggacaatcggtggcagctatcaggcagtacgcttgattcagtttcgagtggaattttgggacagaacgccgctgaaagaacagcagacgatttttggccgtgataagcaaaccggtgcgccgctgggaatgcagcatgagcatgatgtgcctgattacgccagcgacccggaagggaaggtgatcgcgctggacagccatatccggctggcgaatccccgcacggcggagagtgagtccagcctgatgctgcgtcgtggctacagttattcactgggcgtcaccaactccgggcaactggatatggggttgctgtttgtctgctaccaacacgatctggaaaaaggcttcctgacagtacaaaaaaggctcaatggcgaagcgctggaggaatacgttaaacctatcggcggcggttatttttttgcgctgccgggggtgaaggacgcgaacgattatttcggaagcgcgttattgcgggtttaa

SEQ ID NO: 143162 - DNA, 1319 bp, Homo sapiens; identical to SEQ ID NO: 137002

SEQ ID NO: 143163 - DNA, 1359 bp, Homo sapiens
atgccctcttactttacatctcgcatagccgcggtgcatgtgtcagccttgagagaagaacaggcccatcatgagtccaagcatcatgagtccttcatagcgcagcgtatgtttcggatgttttatcaagcacggaatctgctccatgcgggacaagaaaatctcttttctggtctgacggcgcttactgctgaattcactgtcggcgaagaagctacacggggcaaaacaacgggcaaaaggggaccttccccggatgggcgcattctgcgtaccaccaaaacgcgtaatccgcgtggttatatgcaaggaaggtatctggaaagccagcgtgatgtcgaagccacagataagccgtttgagttctttatgaatcgcttccgtctgctggaggccgcgccgcgcgtggagtttattgcgtataccgggctttgcgaagatgtgattcgcccacagttagacgaggcgattgcccagggttatctcaccgaatgtgcggattactggcagataacggaacatgggaagctgtttttaaattcgctgctggagctttttctggctgacggttatcacatgtggcgcatgattggcgcaggcgcgcacctcgcggtggggatcgaccctacgcaactgtttctgtgccagtttgaagcggtgcgtaaactactgggtaatgatcagcgcgcgcatttgttaccgttaggtattgaacaacttccggcactgaaagcctttgataccgtcttttcgatgggcgtgctttaccatcgccgttcaccgctggagcatctatggcagttgaaagatcaactggtcaatgaaggtgaactggtgctggaaacgctggttattgatggtgatgagaacacggtgctggtaccaggcgatcgttacgcgcaaatgcgtaatgtctatttcatcccttccgcgctggcgctgaaaaactggctgaagaagtgtggttttgtagatatccgcattgcggatgtgagcgttaccaccacagaagagcagcgacgcaccgaatggatggttaccgaatcgctggccgatttcctcgacccacatgatccgggtaaaacggtggaaggttatccggcacctaaacgcgcggtgtctgattgcgcgcaagccgtaaagatgacaaacatgatctcatatcagggacttgttcgcaccttccttagtacttcccccaataattggctggtgtttatgcaaaatggtcaagaagtggtaattgatagcggtaaaagcgttagcctcacactgacaatggctccagcttttaaggatgaaggggaactaaccgacatgacagatattacaggcaatctgacggtgcagaatttgtag

SEQ ID NO: 143164 - DNA, 2064 bp, Homo sapiens
atgcgtcgcgctaacgatccgcaacggcgagaaaaaattatcccggcccccccggaagcgcgtgaacctttccggaatacagcttgttacgcaccgcaaatttgttacccttgccggggtcccgttgggttccatgccctcctatttttcaggaattgatgagttgttactggaggcgttcagcagttttactgagatccatgtcccgccaatatcaggcattttttagcgatgttagtgatgctccgggcgcatgccaggctatcaccgatatgatctacagctcacaggttgcaacgccggataacatggagctgattgtaccagctctacgcgctggctagccgaaamccgctattaaaaacggtaatgcaaaactggatgcagcgcagtcagcaaacgctcgaacaatggtttgaacccggaaccgcccgcgcgcttgatgcgtttatwtgaggggatgacgctgcattttgtcaccgacccgcgcgcatttgttaccgttagtattgaacaacttccggcactgaaagcctttgataccgtcttttcgatgggcgtgctttaccatcgccgttcaccgctggagcatctatggcagttgaaagatcaactggtcaatgaaggtgaactggtgctggaaacgctggttattgatggtgatgagaacacggtgctggtaccaggcgatcgttacgcgcaaatgcgtaatgtctatttcatcccttccgcgctggcgctgaaaaactggctgaagaagtgtggttttgtagatatccgcattgcggatgtgagcgttaccaccacagaagagcagcgacgcaccgaatggatggttaccgaatcgctggccgatttcctcgacccacatgatccggacgcgtcagcgtcgcatccgacacccgaaccacgaggcgaaaaatgattaacgtacaaaacgtcagtaaaaccttcatcctgcaccagcaaaacggcgtgcgcctgcccgtcctcaatcgcgcctcgctcaccgtcaacgcgggcgaatgcgtggtgctccacggccattccggcagcggcaaatcaactctgctacgctcgctgtacgccaactatctgcccgacgaaggtcaaatccagatcaaacacggtgacgagtgggtagacctggtcaccgcgccagcgcgcaaagtggtggaaatccgcaaaaccaccgtcggctgggtgagccagtttctgcgcgtcatcccgcgtatctcagcactggaagtggtgatgcagccgctgctcgataccggcgttccgcgtgaagcctgcgccgctaaagccgcgcgtcttctcacccgcctgaacgtgccggaacgcctgtggcacctggcaccatcgacattttccggtggcgaacagcagcgcgtcaacatcgcccgcggatttatcgtcgaataccccattctgctgcttgacgaacctaccagctcgctggacgccaaaaacagggaaactgcgtgccacatcaacgatctccaaaccgtcgccgatacgctgatggcgctggtgttgtctaccgctcgtcgggttgtggaggtagcagaacgggtaaaagcaggcgaatggaccgcgagcataggcccggactggtacggcactgacgttcaccataaaacactgggcattgtcgggatgggacggatcggcatggcgctggcacaacgtgcgcactttggcttcaacatgcccatcctctataacgcgcgccgccaccataaagaagcagaagaacgcttcaacgcccgctactgcgatttggatactctgttacaagagtcagatttcgtttgcctgatcctgccgttaactgatgagacgcatcatctgtttggcgcagaacaattcgccaaaatgaaatcctccgccattttcattaatgccggacgtggcccggtgggttgaccaaaatgccctgatcgcagcattgcaaaaagggcgaaatttccgctgccgggctggaagtctttgaacaagagccccttgtcccgtaaattccccggtggttttaaagggccccaacgtcgtcgcaaataccgc

SEQ ID NO: 143165 - DNA, 837 bp, Homo sapiens
tcaaaaatcggtgccggtccgtgggtagtgaaatgtcaggttcacgctggtggccgcggtaaagcgggcggtgtgaaagttgtaaacagcaaagaagacatccgtgcttttgcagaaaactggctgggcaagcgtctggtaacgtatcaaacagatgccaatggccaaccggttaaccagattctggttgaagcagcgaccgatatcgctaaagagctgtatctcggtgccgttgttgaccgtagttcccgtcgtgtggtctttatggcctccaccgaaggcggcgtggaaatcgaaaagctgcatgcgcactgctgcagtcctttgtccttctcgttctactcgtggtccctctaccgctggcgaacgcgtgttcgtgttgtgctctgctttgttgtcccagaagataaatgccattgtgccagttttccggcacccttgcgcccgcacgtagtgtggtttggcgaaatgccactcggcatggatgaaatttatatggcgttgtcgatggccgatattttcattgccattggcacatccgggcatgtttatccggcggctgggtttgttcacgaagcgaaactgcatggcgcgcacaccgtggaactgaatcttgaaccgagtcaggttggtaatgaatttgccgagaaatattacggcccggcaagccaggtggtgccttgtggggtgtccgcccgttgttggtacgttgttacaccaagcgggttgaggccctcctatgcggttgaacctggaagaacagggctccgggacaactgactgttgtgggatttgctggtggtcgtggacgttgtagttggccaataccctgcccat

SEQ ID NO: 143166 - DNA, 1122 bp, Homo sapiens
tcaaccgcgttgaccatggaagccaaacgtctgctgacgtgctggataagcaactggggcagcataagtttgttgcgggcgatggtacaccattgcggatatggcgatttggccgtggtttggcaacgtggtgtaggtggtgtgtatgatgccgctgagtttcttgatgcgggcaggtataacatgtacaacgctgggcgaacgaagtaggcgaacgtccggcggtgaaactgggcgtattgttaaccgcaccaacggaccgctgaatgagcagttgcatagcgccatgacgccagtgatttcgagacgaatacggcagataagcgtcagggtaagggttggtgttcgtcgcatgcaagccatccaggccggataagggttcacgccggatccggcaatcgtgcacaatgcctgatgcgacgctgcccgtcttatcaggcgggcgaagtgtagcccggataaggcttcaaccccgcatccggccagtcgtgctattatcaacggcatattccagttattggcgtggtagccaatatgctcgccaataaaacgggtcgtaatccaaccaggcatctttatttcagcaagatatgcagcaaaggcttgctgtccccacggcattgcgatgggagacaatgggcgtaaacgccgagacgctgacatattcatctgggttagtaacgccagcaccagcgcgcccagcccgcccatagaatgaccagagatgactttttggccgttgccggaaaatgatgcatcactaaatccggcagctgttgcggatatagtcatacattttgtaatgttcattccacggcgcttgctcgcgttcaggtaaaacccggcaccttgcccgagatcgtaacggtcagctctgcgacatgatctggtaccagctcggttcgtatctgtctcggctttgtcgtcgttctgtggtttgtttgtgtgtgcatcggcgggtggccgctggttgttcttttcccggtggttgggggttctgggccgttcgtgtcgccgtttctggttgtccggggtcttctgttgaaggcgggtccgagtgcggtcgctggttggttgtgggcggatgcccggtgccaggcaagctcgtgcagggcgcttcat

SEQ ID NO: 143167 - DNA, 1473 bp, Homo sapiens
atgcctctccaccatcgccagtgtccagcgatcccttccgcaccggacctgcctgggaggggagaggacagcggccgctaccttcttcttcgccgcggccctcaatacctggagactcatgtccgggccgtcagcagcacggaagaattcttagagctgagtcctcaaatgcttaaagaagtgatttctcttgagaagttaaacgtcggcaatgaaagatatgtctttgaagcagtaatgcgatggatagcacatgatacagatataagaaagatcaggctaaatgaagatacaatccaagatgttgttcaggcagctgacctgctgctactgacggaccttaaaaccctgtgctgtgagtttttggaaggctgcattgctgctgagaactgtattggtatccgtgactttgcactacattactgcctccatcacgttcattaccttgccacagaatacctggagactcatttccgagacgtcagcagcacggaagaattcttagagctgagtcctcaaaagcttaaagaagtgatttctcttgagaagttaaacgttggcaatgaaagatatgtctttgaagcagtaattcgatggatagcacatgatacagaaataagaaagcctttaattcctctcttcaacacttccatttacggtggaactcgagcccagaagtctaagtttgcttttaacattgagaaccaaggaggagatgccggccccttgctctccaatcccccttcttgttttcgtctgtgcaaccaatgcaggttacctcaagatctgctgggacatagaagggagctgaattcattagagccagatcctgtcttggttgagctgaacaaggcccagctcggtgtgcccactggacatgaatctcttctgcttccagccgtgccagtgcccatagccttggcagcattggcgagcgaagtaaaatacggcgcagaacgcagccgtattgactttatgttgcaggcggattcgcgtccagactgctatattgaagtgaaatcggttacgttagcggagaacgaacagggatattttcccgatgcggtcactgaacgaggtcagaaactacttcgggagttgatgagcgtagcggctgaaggccagcgtgcggttatctttttcgccgtgctgcattcagccattacacggttttcacccgcgcgccacatcgatgagaaatacgcgcaactattgtcagaagctcaacagaggggggtagaaattctggcttacaaagcggaaatttctgctgaaggcatggctcttaaaaaatcactgccggttacattgtacccctgccagaagaatcggccaccgctacaggtgccagctggactcacccttggggcaggcaagatgcttcctggtgatgagtgccccaccttcggagggaaacactggagctgcagggcagaggacaagcctcaggccatcggggagagcagagcatga

SEQ ID NO: 143168 - DNA, 2323 bp, Homo sapiens
ccagtggcctcttggtgttcccgggatgtaggtccccctttagcccgtcccattcctcccccggcccctcatactccactctcttcagccggcccatctgcggcagcacctgggccagctcggcagctgcctcatccccgaggagattccaggacagcctcccagacatcccacagggaagcagctcatgttcactgagcactgacgggatggctggtcctacatgaagtcccaggaaagacctgtgcatgaagtcccagggaagaccctgacccgctcccagtttcttgacagatttaagttgcttttcttctaagccttctttagcagtctcttcaaaaagtttgatgacaccattaaggtccacaggcttcaaaacaccagttccacatggcgagggaggcttgctgcaggtgatccctgtcctcgtgggctctacaccctggcaggtcaacacagaagtagggcggctgggaggctggaactggggaacagggagcagacgttctgcaagtagggagcacttcatgagtggcaagtgtggtgtctctggtggtgttccaacggacactccctctggaatgtcatgagaattaaaaactggggcataagggaagaagatggctgagaatggagcctcggtttctatgtctgtaaaacagtaagtactggaccccatctggtcctcctcccagacttgcatctggtgcaatctacggaaacagtctatctgtctgagcagcgggagctccatacagaaacgcaggacccctccagccaggttgttttccgccaagctgatctcttccaaatggggggatccatccagggcctgggccaggctcagggccccacctgggcccagatggctgaatggtaggttctcaggttcagcatgacaacgaactatatttttgtgaccggcggggtcgtatcctctctgggtaaaggcattgccgcagcctccctcgcagccattcttgaagcccgtggcctcaatgtgaccatcatgaaactggatccgtacatcaacgtcgatccaggtactgatgtccaagcggaagagccactgcagagtggagaagcaccgaaccaaacccaacacggcatccagggacaaaccgttctcactgaggccaatcttttcagatttggagtcgcagctgtctgcgtaaaaatcatcactcaacccctgatcaaccatgatttccgcaacgcgttgaccttgtgaaataagactcaccgggtcgtaatccaaccaggcatctttattttcagcaagatatgcagcaaaggcttgctgtccccacggcacttgcgatggggagacaatgggcgaaaacgccgagacgctgacatattcatctgggttacgtaacgccagcaccagcgcgcccagcccgcccatagaatgaccagagatagactttttggccgttgccggaaaatgatgcatcactaaatccggcagctcgttgcggatatagtcatacattttgtaatgttcattccacggcgcttgcgtcgcgttcaggtaaaacccggcaccttgcccgagatcgtaacggtcagcatctgcgacatgactgcctcgcggactggtgtccggcgcaacaacaataatgttgtgctcagccgcgtaacgctgcatccccgatttagtaatgaaattctgctcgttgcaggtcaggcctgaaagccagtacagcaccggcaatttttcattcgcggcttttggtgggagatagacgccgacattcatttcacatttcagtgattgggaataatgccgatacatattttgccagccgccaaagctgacatgtttttcaatgagttccatcagtcattatctcagggttaatcccccggacggctgcccggggagagtattaagaacccccgcctgaagtggacggggtaaacctgcgggaaatcagtaacgaattacggttcgaatggatttgccttcatgcatcaggtcgaaggcgtcattaatttcatccaggctcatggtatgcgtgacaaacggttccagatcgatatcacctttcatcgcatcttcaaccatgcccggtaactgggaacgacctttcacgccgccaaacgcggaacctttccatacgcgaccagtgaccaactggaatggacgggtggagatttcctgaccggcaaccgcgaccccgatgatcaccgactgaccccagccgcggtgcgcactttccagcgccgcacgcatcacgttgacgttaccgatgcattcaaaggtatggtcgataccccatttgttgatatccaacagacggtaatagcctgaccgcat

SEQ ID NO: 143169 - DNA, 985 bp, Homo sapiens
tcagtgctccactcggcgtccgcgcgcgccctgggccagcggcgccgccggaggtcgtcgctggcgctcgcctgccggtggggcgccgcgcacgcgcggcgcctctccccgcccttcagcgcgtgcctccacgcgcacgcggcgctgcggccgcgcgtaaataaacgccattccagaatttgactgggcaagcgtctggtaacgtatcatacagatgccaatggccaaccggttaaccagattctggttgaagcagcgaccgatatcgctaaagagctgtatctcggtgccgttgttgaccgtagttcccgtcgtgtggtctttatggcctccaccgaaggcggcgtggaaatcgaaaaagtggcggaagaaactccgcacctgatccataaagttgcgcttgatccgctgactggcccgatgccgtatcagggacgcgagctggcgttcaaactgggtctggaaggtaaactggttcagcagttcaccaaaatcttcatgggcctggcgaccattttcctggagcgcgacctggcgttgatcgaaatcaacccgctggtcatcaccaaacagggcgatctgatttgcctcgacggcaaactgggcgctgacggcaacgaactgttccgcagcctgattctgcgcgaaatgcgtgaccagtcgcaggaaagatccgcgtgaagcacaggctgcacagtgggaactgaactacgttgcgctggacggtaacatcggttgtatggttaacggcgcaggtctggcgatgggtacgatggacatcgttaaactgcacggcggcgaaccggctaacttccttgacgttggcggcggcgcaaccaaagaacgtgtaaccgaagcgttcaatcctcctggatacatcggcccgtaccaaggggttccgccggccggtcctggggtaacgcgaatgggcaaaagtgtacggcgaatagtccaggttgggtgccaggtggcagcgggaagccat

SEQ ID NO: 143170 - DNA, 3189 bp, Homo sapiens
ctaatccgggttccactcagggggtctggttctcgtgagggacccgttaaccacctccacgcccagcgcaggaaagataagcgaacatccggctccggtaaacgccgcgcccgctaatgcgacccatgcacctggggcttgccagagcagcaacaagcccaccgtttctacaagcagagagacaatcgccactttcacgccgccaaaacggtccggcatccagccaaacatgacgcgcatcacgacaaatgcgccgccaaacgcggtaagagtaaagcccgccatcgcccatcctttgctggcaaagtagagcgaaacgaaagtcccgataacagcaaaaccaacgccttgtagtgccagacctaaccctggtttccagataagcccgacaacgctccacagcgatggacgttctcccgccagggccggtactttgcgcactgtgccgttacaggcccacgccagtacgggtaataccattgtggtgatcgccagtgcggcaaaaccgtaatggctatgaatcaacaggccaagcggagcaccaacagcgagggcaccgtaaatcgccattccgttccatgacatcactttgccagagtgttttggccctacgatgcctagtccccaggtcagagcgcctgtcagtaactggctttcaccaaagccaagaatcaaacgcccgacgaccaacagagcaaatttgaacggtgcggagacaggcaaaatcgccgccagcagcaacgcgccgccagccagaccaggggatcctgcagcatggaactggtaaacgcttgtggtataacggattgtaagtctttttgggttatataggtagacaaatgacaggtgaatgtcgaggttggttggtaacaggatgttttcggggtggcgaaggggttcttgggaaaacactttgcagatctccgtgtcctgccagaagtggaagccgggggggcaggagcagctgtagctgccagggctattctggcaccacccgttgtcacacaggaggctgttgagggcacactcatccacgtctgtgcagtccttgcctgaggcacctgcctcataacccaggttgcagacacagcggtagctgccccgaaggttctcgcacacgccattggcacaaacctcaggatccagagcacactcgttgatgtctgctgggcacaggtactctctggtaccgactgattgtatcgcgcgtttcctttctttggcttgctgggtcctctgcgatacgttgttacggctttgccgcaacaagccagttgcctgccgcgctcgcagaatgtctgcagcccggagataaggagattgttcctgccagctaaatcccttcctgtcgatacgaaccagctcgtatttttctaccagaaaattcacggcatcggctagggtgataccggcatcgatgtgttccttaatcacagcctcattgcagaatggcgtgtcgtttattgtcagaccatagtgctgttccagcagacgtgtcagtaacatttgccagacagccacgggtgacaggcagggcttcaccgcccgctgagttattgcaggtaaagttttcatgtttgctctcgtgtaggtaattaacgcggtggtcagcatcgattccatctggaggataaagtgcgggaatgtttcatccagcttccggcattcgatgtcactgaacttgccggtgatgctggcccggtcagccagataatgcagtcggttgccttcctgcaccagacgggctcccaggcgcagtggtacaacaaaatcagcctgcgttcccagcgttgccgccagccttgccgattcgccctccagtaatgcgcgaacgtcgagcagatcgtacagcgttcgcggctgcgtagttgcgctgacggtaacatcggttgtatggttaacggcgcaggtctggcgatgggtacgatggacatcgttaaactgcacggcggcgaaccggctaacttccttgacgttggcggcggcgcaaccaaagaacgtgtaaccgaagcgttcaaaatcatcctctctgacgacaaagtgaaagccgttctggttaacatcttcggcggtatcgttcgttgcgacctgatcgctgacggtatcatcggcgcggtagcagaagtgggtgttaacgtaccggtcgtggtacgtctggaaggtaacaacgccgaactcggcgcgaagaaactggctgacagcggcctgaatattattgcagcaaaaggtctgacggatgcagctcagcagggctttaccggtagccaggggactttccactcagaacaggccattgcatacggcactaaaatggttggcggcgtaaccccaggtaaaggcggcaccacccacctcggcctgccggtgttcaacaccgtgcgtgaagccgttgctgccactggcgctaccgcttctgttatctacgtaccagcaccgttctgcaaagactccattctggaagccatcgacgcaggcatcaaactgattatcaccatcactgaaggcatcccgacgctggatatgctgaccgtgaaagtgaagctggatgaagcaggcgttcgtatgatcggcccgaactgcccaggcgttatcactccgggtgaatgcaaaatcggtatccagcctggtcacattcacaaaccgggtaaagtgggtatcgtttcccgttccggtacactgacctatgaagcggttaaacagaccacggattacggtttcgatccgcagaccgaagcgatcgtgatgatcggtgagatcggcggtagcgctgaagaagaagcagctgcgtacatcaaagagcacgttaccaagccagttgtgggttacatcgctggtgtgactgcgccgaaaggcaaacgtatgggccacgcgggtgccatcattgccggtgggaaagggactgcggatgagaaagttcgctgcttcgttgggaaaggggccccacgggcccatggggggaaacaggatgttttccatggtaatgcactcaaagtacaccctcgattggcagaaattggcaagtgtgattttccaagtgttggcagtgatgcaggggaacaggaacgcagacatttttggcgtttccccttggacccttgctttaagtcctcttggcgggacaacaacacatttcttctcacgactttctgcgacggtcttcttttcaacgacatttctccggcttattaa

SEQ ID NO: 143171 - DNA, 1904 bp, Homo sapiens
atgattgaagatgcgatgaaaggtgatatcgatctggaaccgtttgtcacgcataccatgagcctggatgaaattaatgacgccttcgacctgatgcatgaaggcaaatccattcgaaccccgcgaatgaaaaattgcccggtgctgtactggctttcaggcctgacctgcaacgagcagaatttcattactaaatcggggatgcagcgttacgcggctgagcacaacattattgttgttgcgccggacaccagtccgcgaggcagtcatgtcgcagatgctgaccgttacgatctcgggcaaggtgccgggttttacctgaacgcgacgcaagcgccgtggaatgaacattacaaaatgtatgactatatccgcaacgagctgccggcatttcagtgcatgcatcattttccggcaacggccacacaagtctatctctggtcattctcatgggcgggctgggcgcgctggtgctggcgttacgtaacccagatgaatatgtcagcgtctcggcgttttcgcccattgtctccccatcgcaagtgccgtggggacagcaagcctttgctgcatatcttgctgaaaataaagatgcctggttggattacgacccggttcacgctggtggccgcggtaaagcgggcggtgtgaaagttgtaaacagcaaagaagacatccgtgcttttgcagaaaactggctgggcaagcgtctggtaacgtatcaaacagatgccaatggccaaccggttaaccagattctggttgaagcagcgaccgatatcgctaaagagctgtatctcggtgccgttgttgaccgtagttcccgtcgtgtggtctttatggcctccaccgaaggcggcgtggaaatcgaaaaagtggcggaagaaactccgcacctgatccataaagttgcgcttgatccgctgactggcccgatgccgtatcagggacgcgagctggcgttcaaactgggtctggaaggtaaactggttcagcagttcaccaaaatcttcatgggcctggcgcccattttcctggagcgcgacctggcgttgatcgaaatcaacccgctggtcatcaccaaacagggcgatctgatttgcctcgacggcaaactgggcgctgacggcaacgcactgttccgccagcctgatctgcgcgaaatgcgtctggcgatgggtacgatggacatcgttaaactgcacggcggcgaaccggctaacttccttgacgttggcggcggcgcaaccaaagaacgtgtaaccgaagcgttcaaaatcatcctctctgacgacaaagtgaaagccgttctggttaacatcttcggcggtatcgttcgttgcgacctgatcgctgacggtatcatcggcgcggtagcagaagtgggtgttaacgtaccggtcgtggtacgtctggaaggtaacaacgccgaactcggcgcgaagaaactggctgacagcggcctgaatattattgcagcaaaaggtctgacggatgcagctcagcagggctttaccggtagccaggggactttccactcagaacaggccattgcatacggcactaaaatggttggcggcgtaaccccagactgctatattgaagtgaaatcggttacgttagcggagaacgaacagggatattttcccgatgcggtcactgaacgaggtcagaaacaccttcgggagttgatgagcgtagcggctgaaggccagcgtgcggttatctttttcgccgtgctgcattcagccattacacggttttcacccgcgcgccacatcgatgagaaatacgcgcaactattgtcagaagctcaacagaggggggtagaaattctggcttacaaagcggaaatttctgctgaaggcatggctcttaaaaaatcactgccggttacattgtag

SEQ ID NO: 143172 - DNA, 2142 bp, Homo sapiens; identical to SEQ ID NO: 139883

SEQ ID NO: 143173 - DNA, 1230 bp, Homo sapiens
  misc_feature (1)...(1230): n = a,t,c or g
ttaaggagataattcgttgtttatatttaaatttagagctctcagttccccttttaaaatatcctctggcaacgtgaatgtataatggcccaacatattgatatgcccgtgcatcaggggagatagccgagcgatatcttcatctataatttcttcgccattacggcgcatccagctcaacgcttcctccatatagagcgtgttccacagaaccactgcattagtaaccaggcccagcgcccccagttgatcttcctgcccttcacgataacgctttctgatctctccgcgttgtccgtaacaaatcgcacgagccacagcgtggcggccttctcctcgattaagctgcgtcaggatccgccgacgataatcttcatcatcaatataattgaggagatatagcgttttgtttacacgccctacttccataattgcctgtgccagtcctgatgggcgcgagcttttcagtaaagagcgaatgagttctgacgcatgaattgtacccaacttcagcgaaccagcggttcgcatcatctcatcccactgactctccgcttttgacagatcgggtaccacaatgccatggaacccagagtactgatcagatacgaagttataccaggtgatgcctcgtccagaaccaaaatattttctgttagatcctgagttgatggtcttcactggtgtgacaaagcgcatgccgtcagctgatgccacttctccacctccccaacgaccagcaagctccagtgtggactgaaaatcaaccaggcgggcattggcgctgaccagcgtttctgcacgaaggtaattctgtttcacccaactgagccgatggcgggtcagtgctggtatattgtgctttatcagcggttccagtccgatattacaggcttcagccatcaataccgcacataaactgatgtgcaaatcttgcgctcgagcaccagattcactgacatgcgcaaactcatgtgtaaatcctgtctgggcatctatctcaagtaacagttccgttaaatctaccggtgggagtagctgtttgatccgattatttagacgaagcaatgatggtggctcttcctgtttctccagacaactgatagtcagggatggatatttaccttcattacagatatgaacttccgcattcttttcaaatcgtgatgccacggcttntccaggtctcatccagctgaatagccagntgttgcacacctttacgtccat

SEQ ID NO: 143174 - DNA, 2616 bp, Homo sapiens
atgagtaaagttggaccgtccggcaccgagataaacgaatttccgggaaatgtcggttcataccgttgtgttgatatgcgccaccagggttttccagtgcttcaacaatgcgggcaacaggattttatccaccgcatcgcagcgacccggcaagctgccttgcatggaagagagcaccgcagaacgccgcgtggggttaccaccattggcaaaatgcatggtggtattttggtggaaaatagccgccagctcgcggattttcgctgcgccaacaccacaaatctctgctgcccattcggcggttttcgctattccgtcactctcgcccagcaaataagaggcgaagacgggcataacctgtggtgcaacgcgccagaaacgcttcgtcgtgccaaccattttccaccagcgtatgggcgatccccagcatcagcgcaacatcggtgcccatgtgcggtgccacccactccattttatcgccaaagaaatcgacggtttccgatcgcactggatcaatgcagatcagctttttcccgctgtcacgcagtgcagaaaagtaagaaagcccctgctcatcggatgcattccacgcaattttcagcatgcccggtatacagttgtaagatctgtttcgacagcccagttagcatgatcatcatcaacgatgattcggccgccaggtcaaagttaggcccgccggtgtctgttgtcgggtttatccagcagcaggttgctcattggcatccactccgcaagattttgctccatgttgaccatcgagcggtgtggctgacagacccagcgcgacttactcaccgccgaaggtgtcacgtttatcgcgttcgccgctttggtatcctgcgctcctgcatcagcagttgcagacaaagcagcagattgagatcaagcgtggtgatggatttcttcatgagcggcaacggggcgtccaggcgcgacgaacataatcagcaacaggctcactatgctacaggcaatcagaatcccgatcagcatattccatgcgccgataccaaccaccgctgccagccaaatccacatgacgaaccgcaaacctgcgcaatacctaaggtcgagctggtacgcccgcgcgtaatgaaaacggccctaacgcctgactcatcgccacaccaaaacctaccgagaaacgacggctttaccaaacatattggtataaacagcagccaagttaccttccaccggaacatcggcaacgccatcggcatcaatcagcaggcgtgtcccgcccatattctgggtacggtgaagtgcgccgccgtgggtagcggcatgagttatgtcgactggtgctgtaagtgtcaggtcgtgtgggtagctttccgctctccccgtactatatttaaacccgtggtcaccaagcccctgccccctttctcctaccctccctttcttgcctggtcttttcctacacccctctaccccgactctgcggtcttgtctgccggcttttcttatgtaaatgacttttcattgccggttaggcgtccccctagctacacccacaccgccggcttgaacgcggtgacgctcccgccctccaatcaacaacttgccgaggctcgaacaccgcgcagggcgtgccgggcaaagaaactttctacctgtcgcccccccccacccacccccaccaatatgtatacggcccagcgacgtggaactctttttatatggggtttctataagatttcccacttaagccaattctacttccgagatctagtaacacccttaagatttggtcggagacttatggatatgtggggacatattagacgcgcacccgtgaccacgttcccagagttagacccgggttgccatactaaaattatccgcatgggagttattcggcggagcatgggcaccatcacgggccacacgaccgggatacggcgaacctttgtgcgattgtacagtcgcgccacgggggctatcggagcaccgcgtggtgccgcgccgtcctggggcggcggcgctgcattagtggccccggtgtctctcctaggtgggtgttttatggttgttacccacattctccccggtggttgttcttcttatcactattgctggcagtggaagaaggctgtaaccgtcgtgagtcttcctgcggtccgtttcttcttatcccttctcactgttatgaaaaatcggtgctaccgctgtgagagtggagacatgcgggcgggcaccgccagcccccccgagaagccacgacgaagtgaagacagccagcagcccccgaacacgccccagcttagaggccagagaaagcatcacagtcccaccaacacacaagaagaagtggacgacggctattctgcagctacgcagccacccaatcacctgacaacactcgacaacactccccatagaagagcacacacgacgccgagcgcgtgtagatgtggcagacacgagccgccacacacccacagacacagacaggcaacaactgcacagggacagaactcgcacgccgagcgagcgaacgaccggagcgttcaccaaatcgcgctggcaaaaacagtcccccatctagagtacacggcagcagcccgcgcgtgcccacgagccccttag

SEQ ID NO: 143175 - DNA, 1524 bp, Homo sapiens
atggtgtttttatccaccgacgccaactggcgctgcgcttcacgcacaatatcctcgttagaagactatttaattcacatcaccaccggtacccacgtcgcgcagatttgctggtttctgctggcagaagcgcgttacctgcccgcccggctgatacaatcttcacctccgcgcaaaaaagaacagccgcgcggcccaggtgaagtaacgattatcgatctcgatttaagccgttataacgccatcgccagccgctttgccgaggaacgccagcaaacgcttgattttcttaagtccggcattgccacgcgtaacccccacttcaaccgcatgattgagcagatcgaaaaagtggcgatcaaatcccgcgcgccgattctgcttaacggtccaaccggcgcgggcaagtcatttctggcgcgacgcatcttagagttaaaacaggcgcggcatcagtttagcggcgcgtttgtggaagtgaactgcgccaccctgcgcggcgataccgccatgtcgacgctgtttggtcatgtaaaaggcgcgtttaccggggcgcgggaatctcgtgaaggtttattacgcagcgccaacggcggaatgttgtttcttgatgagattggcgaactgggcgcagacgaacaggcaatgctgctgaaagccattgaagagaaaaccttttacccgtttggcagcgatcgccaggtgagcagtgattttcagcttatcgccggaacggtgcgcgatttgcgccagctggttgccgaaggcaaatttcgcgaagatctgtacgcgcggatcaatctctggaccttcaccctgacgggtctacgccagcgccaggaagatattgaaccgaacctggattatgaagtggagcgccacgcctcactcactggcgacagcgtgcgttttaacaccgaagcgcggcgcgcctggatggcttttgcgacctctccccaggcaacatggcgctgtaactatcgcgaactttctgccagcgtcacgcggatggccacctttgccactagcggacgcatcactctggacagtgttgaagatgagataaaccagcctgccagtctgcctgatgcactgggcgagcgcatcgggaacatacttgacaaaacacctgattggtacctgtatcacaggggccactcccactactataactattatgcaaagcaccttgacgaacatcagatcgacatagcggacagtgaggtggaacggctctaccgtatgatgcccgtcaacactgtcagggaagggttcggtgatcttatgtcccgggatgtgacgggcgtgctcaatacgcaagcgggcgtattccacttagtgcaggaagcattggtggaacttaaagggaaggatcgatattttgctcacgcgcatccacggttacagcaacacatgcataagacaactgaagaactggggcgagagattactcatcagatattcctgctgcacttgattgcccaaacggtgaaatatgcttgtccgccaatggcgcaagcgtga

SEQ ID NO: 143176 - DNA, 786 bp, Homo sapiens
atgcccgtcatccgcttgtcactctcaggcatctcccgtctgaaggggggcgcggaggaggaaacaaccgccctggcgctattaacacccctttttggggatcggcttcttcccaagaaaaccctgctgctgtccacctattttgaaagcgtaacgccaactctcgacacgattactgcgctgcctgttcagggtttgcatgttgacctcgtacatggtaaagatgacgttgctgaactgcacaagcgcctgccttctgactggttgctgtctgcgggtctgatcaatggtcgtaacgtctggcgcgccgatcttaccgagaaatatgcgcaaattaaggacattgtcggcaaacgtgatttgtgggtggcatcttcctgctcgttgctgcacagccccatcgacctgagcgtggaaacgcgtcttgatgcagaagtgaaaagctggtttgccttcgccctacaaaaatgccatgaactggcactgctgcgcgatgcgctgaacagtggtgacacggcagctctggcagagaggagcgcccccgattcaagcacgtcggcactctacccggggcacaagggcacacccaacgtgagcgagtgttgtcgcacacctatacagaagagaaacttggtgctgataacgaggattggcggaggagatctgacgtgtgggagcttattcttatggattttaccacttcgtggaatcagcactattgtcgttcttcttgtcgcgcataaagagaagtctaataatgcgaaccatttgcgtccttgcctctga

SEQ ID NO: 143177 - DNA, 960 bp, Homo sapiens; identical to SEQ ID NO: 122958

SEQ ID NO: 143178 - DNA, 1720 bp, Homo sapiens
atgtggtggggcgggttgttgtactggctggctgcattagtgacgctgctatgggcggccagccagatccaggcgctgaaaaaactgacctgtgccatcagccagacactggaagaacaaccggtgctcaacagtaaatcgtggctgaccagtttgcaaaacgattacagccttcctgactcactgacggagcgcatctggctgacgctcatttctcaacggatttcccggggagagctgagggaattttgaactggcagacggaaactggttactgaacaatgcctggtatgaaagaaacatggcagggtttaacgaacagttgaaagagaccctgtcattcccacctgatgaactgaaaacgctcttccggacccgcctgaatttatcaccggaagcgaatgacgattttctcgatcgttgcctggacggcggtgactggtatcccttttcagaaggtcgccgttttgtatcattccatcacgtggatgagcttcgtatctgtgcctcctgcgggctgacagaagtacatcatgccccggaaaatcataagccggatccggaatggtactgctcctctctttgtcgcgaaacagaaacactgtgtcaggaaatttatgaacgcccttacaacagctttatttccgatgcaacggcgaatggtctgattctcatgaaactgccggaaacctggagtacaaatgagaaaatgtttgcttccggagggcagggacatggagtccgtctgaaaaacgcacggatcctcggtgataataatgccagaaatggagcagacagactggtcagcggaacagaaatccagacgaaatattgttcaactgcagcccgtagcgtcggtgcggcattcgacggacaaaacggacagtatcgttacatgggaaataatggccccatgcaactggaagtcccccgtgatcagtatgccggcgctgttgaaaccatgaggaataagatccgcgaaggtaaaggtgattatctctccagcctgattctggcgatttacgccctgcgtaatcaactgaccgatgagtggccgcaatatcccggtgacgagataaaacaaatcgttgaacatagcggtctgtttcttggtgataacgctgtaagaaccctgacgggtttgatagagaaacagcatcagcaagcgcaggtaatttcagccgataatgtgcaggggttgctgcaaagggtgccgggcatcgcgtcattgaatattattgatgcgcagctggttgagaatattaccgggcatttattacgttgccttgccgcaccagtgtggattgctgagcaccgccagagcagcatgaataacctgaaagccgcctggcctgcggcctttgatatgagtctgcactttattacgctactgcgtgaacagctcgatattccccttttcgacagcgatctgatcggtttgtattttgcctgtgcgctggagcggcatcaaaacgaacgccagccgatcattttgctctcggaccagaacgcgattgccactattaatcagctcgccattgagcgcgatgttttaaattgtcgggtaattattgcccgtagcttaagcgaacttggtgccattcgcgaagagattgagccgttattgatcattaacaacagccattatttactggatgacgcggtaaataattacatcaccgtaaaagtatcattacggctgccggtatcgaacaaataa

SEQ ID NO: 143179 - DNA, 530 bp, Homo sapiens
ggcttaggtgtgatcattgcaattttggatttaaatttctccgaagctttaatgatgttggatgtgagccctgccagtgtaacctccatggctcagtgaacaaattctgcaatcctcactctgggcagtgtgagtgcaaaaaagaagccaaaggacttcagtgtgacacctgcagagaaaacttttatgggttagatgtcaccaatttgtttctgtttcgcgacaaagagaggagcagtaccattccggatccggcttatgattttccggggcatgatgtacttctgtcagcccgcaggaggcacagatacgaagctcatccacgtgatggaatgatacaaaacggcgaccttctgaaaagggataccagtcaccgccgtccagctaacgatcgagaaaatcgtcattcgcttccggtgataaattcaggcggttccggaagagcgttttcagttcatcagctgtctacggtcctgcacgatgagctacgagtggtggtgcagatatcggagactaagattgtgagatga

SEQ ID NO: 143180 - DNA, 1188 bp, Homo sapiens
atggtggattcgttaattgcgcgcgtaggagtaatggctcgcggtaatgccattactttgcctgtatgtggtcgggatgtgaagtttactcttgaagtgctccggggtgatagtgttgagaagacctctcgggtatggtcaggtaatgaacgtgaccaggagctgcttactgaggacgcactggatgatctcatcccttcttttctactgactggtcaacagacaccggcgttcggtcgaagagtatctggtgtcatagaaattggcgatgggagtcgccgtcgtaaagctgctgcacttaccgaaagtgattatcgtgttctggttggcgagctggatgatgagcagatggctgcattatccagattgggtaacgattatcgcccaacaagtgcttatgaacgtgaatcccgatcggaagggctggacttgctgaggatgaaggtggaggaaggtgacgtcatcttggtgaagaaacttgaccgccttgggcgcgatactgctgacatgatccagttaataaaagagtttgacgcccaaggtgtatccattcggtttattgatgacggaatcagtaccgatggggagatggtactggataagttggcccgaggatatgcagatctgtcaaaagcggagagtcagtgggatgagatgatgcgaaccgctggttcgctgaagttgggtacaattcatgcgtcagaactcattcgctctttactgaaaagctcgcgcccatcaggactggcacaggcaattatggaagtagggcgtgtaaacaaaacgctatatctcctcaattatattgatgatgaagattatcgtcggcggatcctgacgcagcttaatcgaggagaaggccgccacgctgtggctcgtgcgatttgttacggacaacgcggagagatcagaaagcgttatcgtgaagggcaggaagatcaactgggggcgctgggcctggttactaatgcagtggttctgtggaacacgctctatatggaggaagcgttgagctggatgcgccgtaatggcgaagaaattatagatgaagatatcgctcggctatctcccctgatgcacgggcatatcaatatgttgggccattatacattcacgttgccagaggatattttaaaaggggaactgagagctctaaatttaaatataaacaacgaattatctccttaa

SEQ ID NO: 143181 - DNA, 698 bp, Homo sapiens
cgcgagcatacgcccagtttagcgccgtttgcatcagctcagcacctgcaccgcgtccagccagcaggccaattcgcgcatctgtcgcattgagttcccgtaaagagacatagccgcgaatatcgccggacgccgcacgtaaaatcagacattgatgatcaaaggtgccgcgcacggcattttcaatccactgtgcataaaagcgactgctggcgtcaggcgcataccacggcgcacgaaaacggctttgcgcaaatgcggcgctggctaactgacgtaatgcgggaatatcggtctcttgtgccactacagcaccgctatcactggcattgttcacgggtgcaggccaaattgcggcatcaaatacgggtgaactggatgtcctgcaacagctgggattctcaccaatcccgaggttaattttgccgggacgttcatcggcacgaaacagatcggccaggcccagaatcgggtcggcaggagcggcggtaatgttctcaaacaatgagttgatggacgcatgaattgtacccaacttcagcgaaccagcggttcgcatcatctcatcccactgactctccgcttttgacagatctgcatatcctcgggccaacttatccagtactccgtagtttgccgatttattcacccgccagaacaccgcctcacctgcatcgtgcaagcctggtggtgaaaac

SEQ ID NO: 143182 - DNA, 4107 bp, Homo sapiens; identical to SEQ ID NO: 140363

SEQ ID NO: 143183 - DNA, 4187 bp, Homo sapiens
atgcagtattggggaaaaatcattggcgtggccgtggccttactgatgggcggcggcttttggggcgtagtgttaggcctgttaattggccatatgtttgataaagcccgtagccgtaaaatggcgtggttcgccaaccagcgtgagcgtcaggcgctgttttttgccaccacttttgaagtgatggggcatttaaccaaatccaaaggtcgcgtcacggaggctgatattcatatcgccagccagttgatggaccgaatgaatcttcatggcgcttcccgtactgcggcgcaaaatgcgttccgggtgggaaaatcagacaattacccgctgcgcgaaaagatgcgccagtttcgcagtgtctgctttggtcgttttgacttaattcgtatgtttctggagatccagattcaggcggcgtttgctgatggttcactgcacccgaatgaacgggcggtgctgtatgtcattgcagaagaattagggatctcccgcgctcagtttgaccagtttttgcgcatgatgcagggcggtgcacagtttggcggcggttatcagcagcaaactggcggtgctgcgtggccgctctccatccttgttattgacaaattaatatatcgtcgcccttgctgtggaacactgcagccagatgtgattattacaccggttctgccggtggcctgcattagcacctggcgccatactgaggcagatcccaaagaaacagcaaagggttggcctccactactctccgatgtcctatgtgtcttggagataccgcgtctgccactggacgataacggtattctgtttatcgaaaacgttggcaacctcgtatgcccggccagcttcgatctcggtgaaaaacacaaagtggcggtgctttccgttaccgaaggtgaagacaaaccactgaaatatccgcatatgtttgccgccgcctcgctgatgctgctcaacaaagttgacctgttgccgtatctcaactttgacgttgaaaagtgcatcgcctgcgcccgcgaacggcgaagggatggaccagtggctgaactggctggagacacagcgatgtgcataggcgttcccggccagatccgcaccattgacggcaaccaggcgaaagtcgacgtctgcggcattcagcgcgatgtcgatttaacgttagtcggcagctgcgatgaaaacggtcagccgcgcgtgggccagtgggtactggtacacgttggctttgccatgagcgtaattaatgaagccgaagcacgcgacactctcgacgccttacaaaacatgtttgacgttgagccggatgtcggcgcgctgttcgccctggcgcagacccgcgagcaaggctacgccctggacagcgaagagaacgagcagggcgtgcgctgcgtggcggtgccggtgtggaaccacgagtcccgcgtcatcgacgacctgagcctgtcgacgctgacctcccgcgctggtaatggccggcgaccttatccgctggaaaccatgctacgcattcactgcatgcagcattggtacaacctgagcgatggcgcgatggaagatgctctgtacgaaatcgcctccatgcgtctgtttgcccggttatccctggatagcgccttgccggaccgcaccaccatcatgaatttccgccacctgctggagcagcatcaactggcccgccaattgttcaagaccatcaatcgctggctggccgaagcaggcgtcatgatgactcaaggcaccttggtcgatgccaccatcattgaggcacccagctcgaccaagaacaaagagcagcaacgcgatccggagatgcatcagaccaagaaaggcaatcagtggcactttggcatgaaggcccacattggtgtcgatgccaagagtggcctgacccacagcctggtcaccaccgcggccaacgagcatgacctcaatcagctgggtaatctgctgcatggagaggagcaatttgtctcagccgatgccggctaccaaggggcgccacagcgcgaggagctggccgaggtggatgtggactggctgatcgccgagcgccccggcaaggtaagaaccttgaaacagcatccacgcaagaacaaaacgggcatcaacatcgaatacatgaaagccagcatccgggcccaggtggagcacccatttcgcatcatcaagcgacagttcggcttcgtgaaagccagattcaaggggttgctgaaaaacgataaccaaatgggcgatgtttttcacgctgggcaacctgtttcgggcggaccaaatgatactatcggtaaattcgctgacgttgcgtgcgcaggcccgctgctggcagctgaactggacgcgctgggtaaagcactgaaagaacctgctcgcccgatggtggctatcgttggtggttctaaaatagtcggcgcgctgatcctgctgatcgcaggatttgccattcttcgccttttgttcagagcattaatcagcacggcttctgcgctggcagggctcatattgctgtgtctgttcggcccggccttactggctggctatatcaccgaacgcataacccggttgttccatattcgctgcgctggcagcgcgtatttcatcaaaaacattcagcagaacgggatcacaccagaagatatcagcaagcgaaatgggcgggtattcctgctggtttttatactgcctttttccttacggcgtgttgggcatgcgcaccattgatcgcgttacagtacgatatttcaccgtcactgatgtggtggggcgggttgttgtactggctggctgcattagtgacgctggtatgggcggccagccagatccaggcgttgaaaaaaatgacctgtgccatcagccagacagtggaagaacatccggtgctcaacagtaaatcgtggctgggcagttagcaaaacgatttcagccttcctgactcactaacggagcgcatatggctgacgctcatttctcaacggatttcccggggagagctgagggaatttgaactggcagacggaaactggttactgaccaatgcctggtatgaaagaaacatggcagggtttagcgaacagttgaaagagaacctgtcattcacacatgatgcccccaaaacgcttttccggagccgcttgaatatataaccggaagcgaatggcgattttctcgatcgttgcctggacggcggtgactggtatcccttttcagaaggtcgccgttttgtatcattccatcacgtggatgagcttcgtatctgtgcctcctgcgggctgacagaagtacatcatgccccggaaaatcataagccgtatccggaatggtactgctcctctctttgtcgcgaaacagaaacactgtatcaggaaatttatgacgccctacaacaaattatgtgccggatccagtgtgttgtcattcaggcggtattctggctgcaaaaaggcaccgaagcggcagatattcttatatcattgataagctaccaaaaggttctgcaatgggaattgccaattatcgcgacggcattaagcctgctcattggggcaaaatcactccccgcttccgtagtggtggaggccttctccggcacctgccagagcgccgactgcaccatcgtgctcgacgcgcggctgccgcgtaagtatgaaatgagtcaggttagcctgtcgcaacaactgaaagagggtaatctctttgcggaacagtgcccgtcgcgcgaggtgttgaaacacgtcaccagccgttggggggtgttgattctggtggcgctacgcgaaggtactcatcgctttagcgacctgcggcgcaaaatcggtggggtgagtgaaaagatgcttgcgcagtcgttacaggcgttagaacaggatggttttcttaaccgtatcgcgtatccggtggtgccgccgcatgtggaatatagcctcacgccgctgggcgagcaggtgagcgaaaaggttgctgcactggcggactggattgagttgaatttgcccgaggtgttggcggtgcgggatgaactacccccgaaacgcaccgattcggtgaaattcgccggctacaaatttgaagtggtggatatcgataactaccgcatcgaccagctgctggtgacccggatcgacagcaaggccaccgccctttcgccaaaactgcctgacgctaaagataaagaagaaagcgtcgcgtaa

SEQ ID NO: 143184 - DNA, 2812 bp, Homo sapiens
tcagttgtgttctttattcttaagcgggaccgtcaaagcatggttatccaccagtaatatggctgccataacactgatgccatttgattccatcttgtcaaaatatgctttcataactagcccgaaatcaccgcaggcagcaacgcaacgcccctcaggacggctggaaaccaacgccaaagtctggtttttgcattttttgttgaagtgcgtgagaaatttttcagctgaagagtaatcatcttgatggggtttgtaatcaacattctgataaatatcattaatatattgtgcagcaatgtgtcggcatactatacggttttggggtcgccccggaaaataacattgaccattaagtttaattcttgggaattctttttcttttctatctgattttaggtttaattcttgtttatcaagagtgtctgagcgttgaggtaaaatttccattaggtatttttcaaatattggggcaatggtttgagtaagtgtcgtgttttcgtttttattaattatcgtaatttctttcttatcagcttgtaagacggacgtggaaaatttaatgacaaaatccttgttgctaaagatatgacgaccattttgtctacagttctctgagaagctttttaatagaggcgtcgccagctccttgccagaaaatttatcctcgagttctttataaaacaattcactcagggtttggtgttcatttgtctggggggaaccgtagctctgtacccaaccgttttgcgtaaagacaaatccgtcgaggtgctcgccaaagtattccaccatgtcattacgctcggcctcgccatgtaccagcacatccagtcccaaacgttcctgctcaacaatggcctgcttgatatgttccgcaatgcccgtgcggtagttgttggcgtcgagattgccctttttgaaatccagacgcagggtacgaatttccgtggtttgcgggaaggaaccaatcgtggtggtcggccacgctggcagtttaaaacgcgcacgctgggcttcagcacgcacttcatagacattcgcacgctggctgtcctgggcggtgatcgccgccagacgcttttctaccgccggattatgtacgcgggtagagtgacgacgtgcctgaatcggggcgctccactctgccagagctgccgtgtcaccacagcttttcacttctgcatcaagacgcgtttccacgctcaggtcgatggggctgtgcagcaacgagcaggaagatgccacccacaaatcacgtttgccgacaatgtccttaatttgcgcatatttctcggtaagatcggcgcgccagacgttacgaccattgatcagacccgcagacagcaaccagtcagaaggcaggcgcttgtgcagttcagcaacgtcatctttaccatgtacgaggtcaacatgcagaccctgtccctggagcgcgtcgtaagcgggtttgtatgcgtccagccacgcctgtggtagttccagtaccagcgcgggttcatcaatctgtacccactcgatgccgcgtttcgccagttctgccagcacttgctgataaaccggcagaatgtcgttcagcaggctcaggcggtcaaattgttcacctttcactttccccagccacagccaggtaaccggccccagcagcacaggtttcaccttgtggcccagcgcccgcgcctcgtccacttcgtccagcagctgcgtccaggtcagtttgaactgttggcctttaacgaactccggccccatgttatgatagttggtgttaaaccatttgggcattttccgctgccgccgcaggttcgccagtcggcgcacgtccacgaccaatacggaacagggtgtcgatatctaccgaaccatctttgttctgatgacgcgccggaacgttacccagcagcagactggtggtcagtacatgatcgtaccaggcaaaatcgcccaccggcagcaggtcgatacccgcttgcttttgttgatcccagtgacgagcacgcaattcacgccctaccgccagcagttcttcacgcgtggagttccccgcccaataactatcttgcgcttttttcagctcgcgacgcaggccaacgcgagggaaaccgagggtgtgattcaaataatgatatggctccgctccagcaaaagccgccactttttcccgatgtaatgaccagtttgctggaacagtgggcagaccgttttcgacttcgctttcgacataaatcagggcttcgtcagccagccagccgttatcttccagtaaatttatcgtctcttctaacaagccacggcggaacggtggatcgacaaacacgatattatgcggtgtacctttttgcgccaggaatgacatcgcgttgctgttcaccacgcgtgcattgcctgcttttagtgtcgccagattcttaattaactgcctagccagacggtccagcccgtcgaccacatggacgacgcccactggcaggccatcttccagacgcgttacgctcacgttacccgcattgtaagaacctacaaagacaaactgcccctggtgatcggtggaaatatgcgtcggactacccggcagcgcagactctgcggcaaaggtcagtgcgccatcgtccggggcgatacgatacgccaggacgcgaaactcagggcgaacaccaacatagagataacgtttgtccgggctgaccaccatcggctgcacctgccccggcacatcgacaacctgtgtcagcgtcagtgcgccttcatgattcagattccagacgtgaatttgctggctctcagggctggcgatataaactgtttgcttcat

SEQ ID NO: 143185 - DNA, 1677 bp, Homo sapiens
atggcaccctacagggaacatgacggtatctgcgagatccatgttgctaaatatgctgaaatattcggattgacctctgcggaagccagtaaggatatacggcaggcattgaagagtttcgcggggaaggaagtggttttttatcgccctgaagaggatgccggcgatgaaaaaggctatgaatcttttccttggtttatcaaacgtgcgcacagtccatccagagggctttacagtgtacatatcaacccatatctcattcccttctttatcgggttacagaaccggtttacgcagtttcggcttagtgaaacaaaagaaatcaccaatccgtatgccatgcgtttatacgaatccctgtgtcagtatcgtaagccggatggctcaggcatcgtctctctgaaaatcgactggatcatagagcgttaccagctgcctcaaagttaccagcgtatgcctgacttccgccgccgattcctgcaggtctgtgttaatgagatcaacagcagaactccaatgcgcctctcatacattgagaaaaagaaaggccgccagacgactcatatctactctgggttccatggcattgtggtacccggtacattacgggattcgatttttgtactggaaggacttcttgagcagcagacagggctgaatccagttgaaatcatgacagacactgcgggtagcagcgatattattttcggtctgttctggctactggggtatcagttttccccccggcttgccgatgcaggtgaggcggtgttctggcgggtgaataaatcggcaaactacggagtactggataagttggcccgaggatatgcagatctgtcaaaagcggagagtcagtgggatgagatgatgcgaaccgctggttcgctgaagttgggtacaattcatgcgtcagaactcattcgctctttactgaaaagctcgcgcccatcaggactggcacaggcaattatggaagtagggcgtgtaaacaaaacgctatatctcctcaattatattgatgatgaagattatcgtcggcggatcctgacgcagcttaatcgaggagaaggccgccacgctgtggctcacacacaggcaactgaataccagaaagaaatcactttaacctttctgacatcagaagggcagaaatttgccgttgaacacctggtcaatacgcgttttggtgagcagcaatattgcgcttcgatgacgcttggcgttgagattgatacctctgctgcacaaaaggcaatcgacgagctggaccagcgcattcgtgacaccgtctccttcgaacttattcgcaatggagtgtcattcatcaaggacgccgctatcgcaaatggtgctatccacgcagcggcaatcgaaacacctcagccggtgaccaatatctacaacatcagccttggtatccagcgtgatgagccagcgcagaacaaggtaaccgtcagtgccgataagttcaaagttaaacctggtgttgataccaacattgaaacgttgatcgaaaacgcgctgaaaaacgctgctgaatgtgcggcgctggatgtcacaaagcaaatggcagcagacaagaaagcgatggatgaactggcttcctatgtccgcacggccatcatgatggaatgtttccccggtggtgttatctggcagcagtgccgtcgatag

SEQ ID NO: 143186 - DNA, 3739 bp, Homo sapiens
atggctgaagcctgtaatatcggactggaaccgctgataaagcacaatataccagcactgacccgccatcggctcagttgggtgaaacagaattaccttcgtgcagaaacgctggtcagcgccaatgcccgcctggttgattttcagtccacactggagcttgctggtcgttggggaggtggagaagtggcatcagctgacggcatgcgctttgtcacaccagtgaagaccatcaactcaggatctaacagaaaatattttggttctggacgaggcatcacctggtataacttcgtatctgatcagtactctgggttccatggcattgtggtacccggtacattacgggattcgaattttgtactggaaggacttcttgaacagcagacagggctgaatccagttgaaatcatgacagacacttgcggttgtctggagaaacaggaagagccaccatcattgcttcgtctaaataatcggatcaaacagctactcccaccggtagatttaacggaactgttacttgagatagatgcccagacaggatttacacatgagtttgcgcatgtcagtgaatctggtgctcgagcgcaagatttgcacatcagtttatgtgcggtattgatggctgaagcctgtaatatcggactggaaccgctgataaagcacaatataccagcactgacccgccatcggctcagttgggtgaaacagaattaccttcgtgcagaaacgctggtcagcgccaatgcccgcctggttgattttcagtccacactggagcttgctggtcgttggggaggtggagaagtggcatcagctgacggcatgcgctttgtcacaccagtgaagaccatcaactcaggatctaacagaaaatattttggttctggacgaggcatcacctggtataacttcgtatctgatcagtactctgggttccatggcattgtggtacccggtacattacgggattcgatttttgtactggaaggacttcttgagcagcagacagggctgaatccagttgaaatcatgacagacactgcggaacctaatgacgtgcaactggcgcgctattttcatcttgatgaacgggatctggcctatcattaaccaacgacggggcacacataataggctgggcattgcgcttcagctcaccacagcccgttttctgggaacatttctgacggatttaactcaggttctgcctggtgttcaacattttgtcgcggtacagcttaatatccaccgtccagaagttctctcccgctatgctgaacgggacactacccttagagaacatactgcattaattaaggaatattacggctatcatgaatttggtgattttccatggtctttccgcctgaagcgtctgctatatacccgggcgtggctcagtaatgagcgaccgggtctgatgtttgattttgccactgcatggttgcttcaaaataaggtattactgcccggagcaaccacactagtacgtctcatcagtgaaattcgtgaaagggcaaatcagcggctgtggaaaaagctggccgcactgccgaacaaatggcaggcagctcaagtgatggagcttctggtcattccggaaggtcagcgtgtatcagcactggaacagttgaaaaaaggccctgttacagtcagtggacctgcgtttaatgaagcgctggaacgatatatccgattacgaagtcttgagttttcccgactgaacttttccggtctgcctgccattcaactgcgtaatctggctcgttatgctggcatggcgtcggtaaaatatatcgctcgaatgccacagcagagaaagcttgctgtacttactgcattcgttaaagcacaggaaataacggcattagacgatgccgttgatgtgcttgatatgctaattctggacattatccgcgaagcaaagaaaaccgggcaaaaaaaaagactcaggacactgaaagatcttgatcaggccgcattgttactggcgcgggcatgtgcattgttgctggatgataatacagatgtcccagatctcaggcaggttatcttcaagtgcgtacccaaaaacagactggcagaatctgtaagcaaggttaatgaacttgctcgtccacagaacaataatttccatgacgaaatggttgagcagtacggtcgggttaaacgttttcttccggcggtgttgcgggacctgcatttccgtgcggcaccggcaggtgaacatgtactggctgcgattcattatctggcagaactgaatggttcgaaaaagcgcatccttgatgatgcgcctgaacatattatcaccggtccctgggaaacgcctcgtatacgatgcggagggacggatacagcgtgcagtgatcgctggggagatcctcgcgagaagttgttgcaaggtgaagagtggcagactcagcgtattcctgtctgtcgggcactgggacatcctgtcgatggacgtaaaggtgtgcaacaactggctattcagctggatgagacctggaaagccgtggcatcacgatttgaaaagaatgcggaagttcatatctgtaatgaaggtaaatatccatccctgactatcagttgtctggagaaacaggaagagccaccatcattgcttcgtctaaataatcggatcaaacagctactcccaccggtagatttaacggaactgttacttgagatagatgcccagacaggatttacacatgagtttgcgcatgtcagtgaatctggtgctcgagcgcaagatttgcacatcagtttatgtgcggtattgatggctgaagcctgtaatatcggactggaaccgctgataaagcacaatataccagcactgacccgccatcggctcagttgggtgaaacagaattaccttcgtgcagaaacgctggtcagcgccaatgcccgcctggttgattttcagtccacactggagcttgctggtcgttggggaggtggagaagtggcatcagctgacggcatgcgctttgtcacaccagtgaagaccatcaactcaggatctaacagaaaatattttggttctggacgaggcatcacctggtataacttcgtatctgatcagtactctgggttccatggcattgtggtacccggtacattacgggattcgatttttgtactggaaggacttcttgagcagcagacagggctgtatccagttgatatcatgacagacactgcgggtagcagcgatattattttcggtctgttttgtctactggggtatcagttttccccccggcttgccgatgcaggactggcacaggcaattatggaagtagggcgtgtaaacaaaacgctatatctcctcaattatattgatgatgaagattatcgtcggcggatcctgacgcagcttaatcgaggagaaggccgccacgctgtggctcgtgcgatttgttacggacaacgcggagagatcagaaagcgttatcgtgaagggcaggaagatcaactgggggcgctgggcctggttactaatgcagtggttctgtggaacacgctctatatggaggaagcgttgagctggatgcgccgtaatggcgaagaaattatagatgaagatatcgctcggctatctcccctgatgcacgggcatatcaatatgttgggccattatacattcacgttgccagaggatattttaaaaggggaactgagagctctaaatttaaatataaacaacgaattatctccttaa

SEQ ID NO: 143187 - DNA, 3181 bp, Homo sapiens
atgcgggcaacagggattttatccaccgcatcgcaaccacccggcaagctgccctgcatggaagagagcaccgcagaacgccgcgtggggttaccaccattggcaaaatggtcacttcttgagcagcagacagggctgaatccagttgaaatcatgacagacactgcgggtcacacgatattattttcggtctgttctggctactggggtgaggcggtgttctggcgggtgaataaatcggcaaactacggagtactggataagttggcccgaggatatgcagatctgtcaaaagcggagagtcagtgggatgagatgatgcgaaccgctggttcgtgcaagttgggtacaattcatgcgtcagaactcattcgctctttactgaaaagctcgcgcccatcaggactggcacaggcaattatggaagtagggcgtgtaaacaaaacgctatatctcctcaattatattgatgatgaagattatcgtcggcggatcctgacgcagcttaatcgaggagaaggccgccacgctgtgcgtcgtcgccactggttaggactggatgtccatgacgtgggtgtttatggtcaggatcgctgtgtcattctggaaccgggcatggtactgaccgtagagccagggctgtatattgcgccggatgcagaagtgccagaacaatatcgcggtatcggcattcgtattgaagacgacattgtgattaccgaaaccggtaacgaaaacctcaccgccagcgtggtgaaaaagccggaagaaatcgaagcgttgatgcaactggcgcgcatcggcgtctggcaatctctggcggattgcgcaactgccatcaccaccgtgcatgtcagcgatcgtggtcacgctggatttgtcaccctcgccgcagaagattaccaactggcggcgctgggacaggttgtcgaattgcacaatgtcgggcaacggctgtttgcattgctgcgtaaagcacctggcgtaacgctgcattgccctgatcgcgtggctaacgttgcccgtactcagagtcacgttgaagtgacgctggagagtggcgagacgctgacgggccgcgtgctgaactctcaaccacaaactgacggagcgcatctcgtgacgctcatttctcaacggatttcccggggagagctgagggaatttgaactggcagacggaaactggttactgaacaatgcctggtatgaaagaaacatggcagggtttaacgaacagttgaaagagaacctgtcattcacacctgatgaactgaaaacgctcttccggaaccgcctgaatttatcaccggaagcgaatgacgattttctcgatcgttgcctggacggcggtgactgcgcatcgaggcaggtgccagttcatggcatttttgtatggcgaagcaaaccagcttttcacttctgcatcaagacgcgtttccacgctcaggtcgatggggctgtgcagcaacgagcaggaagatgccacccacaaatcacgtttgccgacaatgtccttaatttgcgcatatttctcggtaagatcggcgcgccagacgttacgaccattgatcagacccgcagacagcaaccagtcagaaggcaggcgcttgtgcagttcagcaacgtcatctttagcatgtacgaggtcaacatgcagaccctgaacaggcagcgcttccagtaccagcgcgggttcatcaatctgtacccactcgatgccgcgtttcgccagttctgccagcacttgctgataaaccggcagaatgtcgttcagcaggctcaggcggtcaaattgttcacctttcactttccccagccacagccaggtaaccggccccagcagcacaggtttcaccttgtggcccacggccagcgcctcgtccacttcgtccagcagctgcgtccaggtcagtttgaactgttggcctttaacgaactccggcaccatgtagtgatagttggtgttaaaccatttggtcatttccgtgccgccgcaggttgccagtcggcgcacgtccacgaccaatacggaacagggtgtcgatatctaccgaaccatctttgttctgatgacgcgccggaacgttacccagcagcagactggtggtcagtacatgatcgtaccaggcaaaatcgccaccggcagcaggccaacggcggaatgttgtttcttgatgagattggcgaactgggcgcagacgaacaggcaatgctgctgaaagccattgaagagaaaaccttttacccgtttggcagcgatcgccaggtgagcagtgattttcagcttatcgccggaacggctcgcgatttgcgccagctggattccgaaggcaaatttcgcgaagatctgtacgcgcggatcaatctctggacctatacactgccgggtctacgccagcgccaggaagatattgaaccgaacctggattatgaagtggagcgccacgcctcactcactggcgacagcgtgcgttttaacaccgaagcgcggcgcgcctggttggcttttgcgacctctccccaggcaacatggcgcggtaactttcgcgaactttctgccagcgtcacgcggatggccacctttgccactagcggacgcatcactctggacgtggttgaagatgagataaaccgtctgcgctataactggcaggagagccgcccctccgcgcttacggcgttgctgggcgcagaggcagaaaacatcgatctcttcgaccgtatgcaactggaacacgttatcgctatctgccgccaggcaaagtcgctttccgcagccggacgccagctttttgacgtttcgcgccagggcaaagccagcgtcaatgacgcggatcggctacgcaaatacctggcgcgttttggtctgacgtgggaagccgtgcaggatcagcacagcttcagttgaatatggtggcccgtcagcacctgcattacgcttactggcggcggggcgtcggtgtacacggtatctaacatgccggatgctgcccatattggccatcggggtacgcgccaaatttccagtgatcgaccaacccagcctatggtggcgctcaggttttcctaatgggggcggttgtggccgaacttcctggtagcgcaacttcccacatccggactctcccttaagatgcccctttatccccagaaaggcccgaaaaagagccgggcgcggc

SEQ ID NO: 143188 - DNA, 1887 bp, Homo sapiens
gcccattttgatgctctgttccggatgctggtcgacatactgcatatagctttccgggctattggcaaaggtcaccaccgggtcgattaaatcttcgcaattgagataaccgttcatcagcagttcccaacaggtttcttcaatacgcttgcggctccagcgcggataatccgggttcggttcgaccagatccagcggtttattgctggtgattttggtttccagtagtgacgtgcgcggcgtggcgaagcgcagagtcatttcgacttgcacatcttttgctgtcagtttttgcaccagcgcaccgggaatactgtatgcctccagcgtaaagtcgactttcttgccgtcctgccagacggtcaggcggtcgaaattgctggccataaagttgatgtactcttccgtcagcagcgcaacgcccggaaagccgcccatggtgttagggccgtctggcaacagatgaccatgccaggctccgagatcgaaaaacggattaaaacgctggtgatcgtcgtaatcgtaatccttcatgtactgcggcgcgccagtacggttaatcacgtttttataattgtcggcgttagcggcatgggcggaaaaacagtagaaatattgcatcaggaagatttggtcgctgggatcgtgagaggcatttttcatgtagaagcggctatcaaaagccgtggcgaaacgtccgccgccgtattcgtaccagataccaaactgcatgaaagaggtggtttcatcgtcagcgtggtcagggcgatgtttggcgtaggtgtaagcggtggagagataaacgtggggatcctcataggagtcgaccatgcatggcatggcaagacggaatccccgatattctggtggtggacaaccgcaccaaagtttgtgaacctggtggatctgaatatcgaagactatatggataaggaagacttcctgatccagattatggctggcgaagagttcggcgatgtcgaagcgattttccacgaaggcgcgtgctcttccaccaccgagtgggacggcaagtatatgatggataacaactatcaatactccaaggagctgctgcactactgcctggagcgtgaaatcccgttcctgtacgcttcttccgcagaccacgaagctgtttgaaggtagcgagaacttcaaacaggattcgtctatgtgggcgacgtggctgatgtgaatctgtggttcctggaaaatggcgtttccggcatcttcaatctcggtactggtcgtgcggaatccttccaggcggtagctgcctgtacgctggcttatcacaagaaaggccagatcgaatccattccgttcccggataaactgaaaggcggctatcaggcgttcagtcaggcagatctgacaaatcgaagtatgcgtccggatcaaaccaaaagcaggcaccgtgttggcatattcgtagcgttccaggcaggaacgtccgccagctcctggcatgacttcacttagtttagcggccgtttccagtgataatccggtttccggcgatgaacacattcggctggcgcgcgcttctggtagattcgggattgggcgagtagcgcaaccgaagcgcatccagcggcgttcatcaacaccacgggcagcaaccgatttaggcaatcctggccacagaccatgtacggtcagaaaatcagctttgttggtcgtttcggtttgcaggcgacattcatctcgttcgttacgatttcgatcgtgttgactctggcaaaatccggtttgccaggagagggccaggacatagcgatcaaaatcgccatactgttttgcctgcaacgctaaggcgttggcagaagagaagggaagcagagaaaccgcgagcaacgcggcgttacgccagaatgctttcat

SEQ ID NO: 143189 - DNA, 1413 bp, Homo sapiens
atgattttggtgacggggggcgcacggagcgggaagagtcgccacgcagaggcgcttattggggactcttcacaggttctgtatatcgctacctcgcaaatccttgatgatgagatggctgcacggatagaacatcatcggcaaggccgcccggagcactggcgcacagtggagcgctggcaacatcttgatgaattaattcatgcagacattaacccgaatgaggttgtgttgcttgaatgcgttaccacaatggtgactaatctgttgtttgattatggcggcgataaagaccctgatgaatgggattatcaggcgatggaacaggcgattaatgctgagattcagtcgttgattgctgcctgccaacgttgccccgcaaaggttgtattagtgactaacgaagtgggaatggggattgtgccggagagtcgtctggcacgacattttcgtgatattgccgggcgggcggaacttcgatgtgttgcaaatgcagttgatattgaatcatttttttctgcggctaccgctgaagataaacaacaagttgaacaagctatcaacagtagcgtgaatcttgtccccttcggtttatctgcatcgaactggaaagtgcatcgtggcgatttagtggtagaagacggccctaaccccatgggcggctttccgggcgttgcgctgctgacggaagagtacatcaactttatggccagcaatttcgaccgcctgaccgtctggcaggacggcaagaaagtcgactttacgctggaggcatacagtattcccggtgcgctggtgcaaaaactgacagcaaaagatgtgcaagtcgaaatgactctgcgcttcgccacgccgcgcacgtcactactggaaaccaaaatcaccagcaataaaccgctggatctggtgtgggacggcgaactgctggaaaaactggaagcgaaagaagggaaaccgctttccgataaaaccattgctggcgaataccctgactatcagcgcaaaatcagcgccacccgtgatggcctgaaagtcacctttggcaaagtgcgcgccacctgggatctgctgacctccggcgaatcggaatatcaggtgcataaatccctgccggtgcagactgaaatcaacggtaatcgctttaccagtaaggcgcatatcaacggttcgaccacgctctacaccacctattcccatctgctgaccgctcaggaagttagcaaagagcaaatgcagatccgcgatattctggcgcgtccggcgttttatctcaccgcctcgcagcaacgctgggaagaatacctgaagaaagggttaaccaatccgaatggggaagcgagatgcaaatgtcaccaagggggcggggcatgcctcctcacaagagaaaaccagagaccactcaggtgtctgtag

SEQ ID NO: 143190 - DNA, 1769 bp, Homo sapiens
atgcccatacacctggcaagaaccttgactctgcgggaaataatagagcctcttcgaatatgcgatgcaaataaaaatcacaaaaagcagagatcatcgacggctggtgctcattcccgaacactcacgcattcttctcaaactcagaggggtaccgagctagaagttttcacaaagtattacgcagaaaactatccgcacgttcgtttgttgcatcaggcgaatgctggcgcatcggtggcgcgtaatcgtgggattgaagtggcaacgggcaaatatgtcgcttttgtcgatgctgacgatgaagtctatcccaccatgtacgaaacgctgatgaccatggcgttagaggacgacctcgacgtggcgcagtgcaacgctgactggtgttttcgtgaaacgggagaaacctggcaatccatccccaccgatcgccttcgctcaaccggcgtattaaccggcccggactggctgcggatggggctttcttcgcgccgttggactcacgttgtctggatgggggtttatcgccgtgatgttattgttaaaaataacattaaatttattgccggattacatcatcaggatattgtctggacaacagaattcatgtttaacgcgctgcgtgcgcgatataccgagcaatcattatataaatattatctgcataatacgtcagtgagtcggttgcatagacaagggaataaaaaccttaattatcaacgtcactatattaagattacccgcctgctggagaaattaaatcgaaattatgccgacaaaattatgatttatccggaatttcatcagcaaataacttacgaggcattgcgtgtttgccatgcggtaagccatggaagttatgcagagaatgagggagagggcaaaggggaggtccaacatgaaaacagatcaaaattaaagcttttcaaactgaaatgggttctaaagcctgaagccctgtctcctcgttttcccaaacagcacccacgaagcttcacagaggccttggaggtccataaagatccaggtggtaacgccgagaaacgcccagttgaagttcgggatcatcgcgtcaacggtgatggcgtcagcaggttgtacgccgccaaccagcgcctaacttgcgctctgctgataagtttttccgcccatgccgctacggccgacaattataaaaacgtgattaaccgtactggcgcgccgcagtacatgaaggattacgattacgacgatcaccagcgttttaatccgtttttcgatctcggagcctggcatggtcatctgttgccagacggccctaacaccatgggcggctttccgggcgttagcgctagctcgacggaagagtacatcaactttatggcccagcaatttcgaccgcctgaccgtctggcaggacggcaagaaatgtcgacttatacgctcggaggcatacagtattcccggtgcgctggctgcaaaaactgacagcaatagatgtgcaactcgaaatgactctgcgcttcgccacgccgcgcacgtcactactggaaaccaaaatcaccagcaataaaccgctggatctggtgtgggacggcgaactgctggaaaaactggaagcgaaagaagggaaaccgctttccgataaaaccattgctggcgaataccctgactatcagcgcaaaatcagcgccacccgtgatggcctgaaagtcacctttggcaaagtgcgcgccacctgggatctgctgacctccggcgaatcggaatatcaggtgcataaataa

SEQ ID NO: 143191 - DNA, 389 bp, Homo sapiens
gcattattaatctcaggagcctgtgtagcgtttataggaagtagtgttctgtcatgatgcctgcaagcggtaacgaaaacgatttgaatatgccttcaggaacaatagaaatcttcgtgcggtgttacgttgaagtggagcggattatgtcagcaatggccagaacaacctaatgaacacagaaccatgatgtggtctgtccttttacagccagtagtgctcgccgcattcgagcgacagggcgaagccctcgagtgagcgaggaatcaccagggaacagcacttatatattctgcttacacacgatgcctgaaaaaacttgccttggggttatccacttattcacggagatatttttataaatattttttttatacggcctagatctt

SEQ ID NO: 143192 - DNA, 852 bp, Homo sapiens
atgcctgcaagcggtaacgaaaacgatttgaatatgccttcaggaacaatagaaatcttcgtgcggtgttacgttgaagtggagcggattataataaaagccaaaaaccacgtaataatttcaatagatgcagaaacagcatttactaaaattcaatattctttcatgataaaatcactcgacaagttaggcaaagaaggaaagtacctcaacacaataaaggctatctgtggtaaacccacagaggttactactcagaacacaaaaaccttcctcgactcaagaattggcaagcagaaagctagagaagcaaatgtttttaaggccatgcttttttctacaatctatcagaatattcaatgtaagggccaaccaaaagaaaataaaaacccattttctgggaaaaaatttaagctggctgcaaaaatttgcataagtaccaagcagcctaatgttcatcctcaagactatggggaaaatatctccaggccatgtcagaaagcttcacggccattcctcacaccacaggcccagaggcccaggaggaaaaagtggtttcatgggccaggcccagggtctctgtgttgtgtgcagccaagggacttggtgctctgtgtcccagccactccaggtgtggctgaaaaggccaatgtacagctcaagctgtggcttcagagggtggaagccccaagccttggcagtgtccacgtggtcttgagcctgaaggtacacagaagtcaagaattgaggtttgggaacctttgcctagatttcagaagatatatggaaactcttggatgcacaggcaaaagtttgctgcagggacagggacctcacgagaatctcttctag

SEQ ID NO: 143193 - DNA, 567 bp, Homo sapiens
atggatctgccgattgccgccggggagcccgcagcaaaatccgtgcttccagcgatgaaaagcgacgatttcagtaagcaaaacctggcgaatatcgtcagcatcttgagagtggtccgctgcgcgatatgcgtatgtaccagaaactaccggcgttccttgataacccacgcatgtttagcggctacccggagctggcggtggcgcgccggaactgatgcgcaagaaaatcctccgccacggcaagaaagtgggcttcatcaatctaatcaaggatggcatgaaaggagtgaccgttttatgacttctcccgtcaatgtggacgtcaaactgggcgtcaataaattcaatgtcgatgaagagcatccgcacattgttgtgaaggccgatgctgataaacaggcgctggagctgctggtgaaagcgtgccccgcaggtctgtacaagaagcaggatgacggcagtgtgcgcttcgattacgccggatgtctggagtgcggcacctgtcgcattctggggctggggtcggcgctggaacagtgggaatacccgcgcggcacctcttag

SEQ ID NO: 143194 - DNA, 1596 bp, Homo sapiens
atgccgatgcaaccgcagattggcggcagttactgctatgtgcgctcgccagtgaatcatatctacctgctgctgggagagctaaatacggtcgccgaacttgccatcgtgaccaacgccccggaaaatatgcagcgtcgcggggcaatgtatttgcaacgcgaattgaaagataaagtcgcgatgatgaatcgactacagcaggcgctggaacacaaccatttttccctgatggcccagccgattaccggtatgcgtggtgatgtttaccatgaaattcttctgcgcatgaaaggtgagaatgatgaactgatcagccccgatagcttcttgccggtcgcgcacgaatttggtttatcgtcgagtatcgacatgtgggtcattgacatacgctgcaatttatggctgaaaacagagcgaagatgcccgctcaccgttttgctactaatctgtctccaaccctcatgcacaagtaagcacagccgatctggagattttcttgactcccttaggcaagccgctgccgttcagcgaagttactggatcgaaagtaaagcggataaagaaaaggtgggcgattacgtttttggcctgaaggcgcagggacgatataacggtgaaccgctcacgggtacgggaaaaataggcggctatctggcgctgcgtggcgaagggacgccgtttccggtacaggctgatttccgctctggtaacacccgtgttgcttttgatggcgtcgtgaatgacccaatgaagatgggcggtgtcgatttacggcttaaattttctggcgattcactgggtgatctctatgaactgacgggcgttctgctgcccgataccccgccgtttgaaacggatggtcggctggtagcgaaaatcgacactgaaaaatcgtcggtctttgattatcgcggttttaatgggcgaattggtgatagcgatatccacggttctctggtctacaccaccggaaagccacgaccaaaactggaaggtgatgtcgagtcgcggcaattgcggctggcggacctgggaccgtcatctggcgttgattccgggaaaggggcagaaaagtcgaaacggtctgaacagaagaagacctgcaggcagcacgagcgaaacaccgtcccaggcggcagcaagtgcgattgcgagcgggaccgtatttttcccattgttatgggctcctgtaacgttctcgacttcgatgatctgattttattgccgacgttgctgctgcaacgcaatgaagaagtccgcaagcgctggcagaacaaaattcgctatctgctggtggatgagtatcaggacaccaacaccagccagtatgagctggtgaaactgctggtgggcagccgcgcgcgctttaccgtggtgggtgacgatgaccagtcgatctactcctggcgcggtgcacgtccgcaaaacctggtgctgctgagtcaggattttccggcgctgaaggtgattaagcttgagcagaactatcgctcttccgggcgtattctgaaagcggcgaacatcctgatcgccaataacccgcacgtctttgaaaagcgtctgtctccgaactgggttatggcgcggagctaa

SEQ ID NO: 143195 - DNA, 1638 bp, Homo sapiens; identical to SEQ ID NO: 127315

SEQ ID NO: 143196 - DNA, 1116 bp, Homo sapiens
gatcgatccgatctgatcgaaacgttcgatcacgtatgcacagtgattttcatcagagatggtatcaccagtgcggaggttgaaacggcggatacggctaggggaaacgtagatgtcatcaggaccggcgaggtaggagctgtctgcggaacggaggaaaccaaatccatcctgcaatatctccagtacgccatcaccaaagatatcttcgccactctttgcgtgctgcttcaggatggcaaaaataatgtcctgcttacgcatacgagccaggttttccagccccatattttcgccgagagtgatcagctcagaaaccggcgtattttcggcgacagattcgattcgcctgtaagcatcagaatgatgttcggcatatagcgcaagtccttccagtttgggcaaagcatcagccagatgtaggctatgtggatctaccaggtccacaaccattttgccatcctgttcggcaaagaacaggaaatcgggacgaacaatcttgtactgttcagcttcaacataagcgattcccagtgacgactgccctgtgtactgtggattacgataccagaaagcaaatccttcacgtttggtttcgatctcaaaaaccttggtttcccaatggttcaacagagccggatagttcccgctttcgtcacacaacaaatggtgtttccagactggaaggtcagcttccttttcaccttcacgcaccctggtcatttcaaacttgttcgccggcctgaccagatccacatcctgcggttcggtactcatttcgacgatttgacgataggcctctttacgctcatctttcaacgacttgatttgcggtgtgtactcggggcagcacgctttcggcagtctatcgggcttcgcatcgaagtaatcctgcaccgtttcggtgggtgggcagccaaaatattccgacggcttttggccgaaacgggagacatcatccacgttccctttaacgatctccatgcagtgaaagcggtgatggatgatcacacctgttcggtggtggttgagccgatccacggcgaaggcggtgtgacggccaccaatccatactttttgcagggcttgcgcgaactgtgcgatcacatcacgcat

SEQ ID NO: 143197 - DNA, 2967 bp, Homo sapiens
atgaggtatatagttgccttaacgggaggcattggcagtggcaagagtaccgttgccaatgcgtttgctgatctcggaattaacgtcattgatgccgatattattgcgcgtcaggtggttgaaccaggtgcacctgcgctacatgccattgctgatcactttggcgctaacatgattgctgctgatggaacattgcagcgccgggccttgcgcgagcggatcttcgccaacccggaagagaaaaactggcttaacgccctgctgcatccgctgatttcagcagagacgcaacaccagatcccagcagctacttccccctatgtactgtggggtgtgccattgctggagaaaaatcactgttctcgttttgcaaacccagccgcttcacggtttccgggccaagtcctgacccgtcaaatccggaaacttgtacaggatcaccggcaggtcgacgctacgggcgatctgctggccgtaggcctcgcgatgctgcgccagtttgaccgcttcgtcagtggaaggggaaccgacgccaatcaataccggcactcgcccgtcgacaatggttacagcttcttcggcgagtgccatgcgctgggctgtattcatttggctaaattcaccaccggtacccagataaaacagcccgtcgacccctttattaatcaggaagtcggcaacttcgcgcattgcctttttatcaagggttccgtcacgatgaaacgtgctggataccggtggaataatgccgctgaattttttcattacctcagtttccttttcgagctgcaactctccagcaaactggcagttcatgatgtgctgaccaatatttataatcggcgctactttttcaacagcgtagagtcattattgtcgcgacctgttgttaaggacttctgtgtcatgctggttgatattaatcagttcaaacgcatcaatgcccaatggggacatcgtgtgggtgataaagtgctggtttcaattgtcgatattatccagcaaagcatccgccccgatgatattttagcgcgactggagggtgaggtgtttggcttgctatttaccgaactcaatagtgcccaggcaaaaatcattgcggaacgtatgcgtaaaaatgtcgaactcctgaccggctttagtaacagatatgatgttcctgaacaaatgaccatcagtattggcacggttttttcaacgggtgacacgcgtaatatctcgcttgtcatgacggaagcagataaagccttagcgaagcgaaaagcgaggggggcaacaaaaatgctccggcattttatcgccgcaagtgtcattgtgctgacatcttccttccttatttttgaacttgtcgccagcgacagagcaatgagtgcctatctgcgctatatcgtgcagaaagcagactcctcctttctttatgataagtatcagaatgttttcgcgtttgcaggcagaaactcgccgcgactgttctcgacaataaagtcgagagagacaagcggagtggagcgactaccgtggcaaagtcttcctgacgtaaaaacatcattacccccgaaagcggtcttgattctcaaggaaccactgcagtttgcgcggcgtgccatccggtttgctggcatcaaaaaccacccggcctttgtaacccaccactttggcgatggtttgcgccagctcgcggatagtgcagtcaacgcccgtgccgacgttaatgtgcgacaacatcggctgggtgttctccagccagacttcatgcgccagctccatgacatgaactctcgccgccgccatatcatcgacgtgcagaaattcgcgcatcgtgtaccgctctcgcgatacgcttcaaccagtttctccagtgaaacgcgacttaaaccgctgggatttggcagcacccaaatctgcgtcgaaccaatgcactttcagctgtttgtcgtagccatcaccaccgtaagccagacccagcttcaggccagtagcttccgccagcggttctgcgtcggcatggatctgcacggcaagttcacgcgtcgagaggtgcggtccgtgcaaaatatggacctgcagcatgcagcttgccccaaacccgtgttttcgcgtttgcaggtcttcccacaagagcaggcagaacgctatctggagttcctgaaaggttatctgatccttatatatgccgagtttatcggcaaagagatccagacggcctaccttgaatcctattccgaatatgggcaaaacattttcgaccgttatgttacctacgcggcgggcggtgaaggcggcgcgacgctgattaacgataaagcgttaatcgaacgagccgagatcatccgtgaaaagggcactaaccgcagccagttcttccgtggtcagctgcatacctgtgggcgcaactggaagcagcggatcgtatcaaccagcaacgtctggcgctgtggcaaaactactacgatgcgttacgcctgctggcaaaagcgggacgtaatcgagctgccgtcgattcccgatggctgcgtgcagaacgcgcatatgttctacattaaactgcgggatattgatgaccggagcgcgttgattaactttctgaaagaagcggaaatcatggcggtgtttcattacattccgctgcacggtgtgccctgcgggggaacaactttggtgagttccaggttgaagatccgctacaccaccaaaagcagagcgcacggcctgctgcgcctgccgctgttctacaacctgtcgcccgtcaatcagccgtccttgtggacggcggccagtacactggtcaagattggtgccgggttactggtcggtaagttgctggcggtgtcatttggtccggcggggcttgggctggcggcaaatttccgccagttgattaccgtgctcggcgtgcttgccggggctggcatctttaacggtgtaaccaaatacgttgcccagtaccatgataactcgcaacagtag

SEQ ID NO: 143198 - DNA, 2214 bp, Homo sapiens
atgaaaataataacctgctttaagctggtgcctgaagaacaggacattgttgtcactccagaatacaccctgaatttcgacaatgccgacgccaaaatcagccagttcgatctcaatgccattgaagctgcaagccagctcgcaacagatgacgatgagatagccgcgctgaccgttggcggctcattgttgcagaactcgaaagtgcgcaaagacgtgctatcccgcgggccgcacagcctgtatttggtgcaggatgcgcaacttgaacatgcaaatctttcatgcctgcaggtccagctcatcgcacgtccacactttcccgatgacagaagggccatacaccaccgtctgagaatcgatggcggtgtaatgctgggtggaaaaccagtgggcaatagccgcgagaaactcatcgtttttccagcggctgtagccaaatacgccgtgcatcaggcgctgattcatatggagatcgcgaagatcgcgtgctcctgggattgcttatctgatcttgtgaacgcgttgcgagctaaatgcggagggggctttccgactggaccgcggctggcgatggcggcgaaagagcatcaaagattactctcaattgcaaacacggtgccgtattttcaattatcagtcagggatacaggtattgatacctacgtgttgattgtgggggagtctgtacgtgtcgacaatatgtctttgtatggatatacacgctctacgacaccgcaagttgaagcacaaagaaaacagatcaaactgtttaatcaagcaataagcggcgcaccttacactgcgctgtcggttcccctttctttaactgctgattctgttttgagtcatgacattcataattaccccgacaacattattaatatggctaatcaagcaggatttcagactttctggctaagctcgcaatccgcttttcggcagaatggtacagcagttaccagtatcgccatgcgcgccatggaaacagtttatgtcagaggatttgatgaattgttgttgccgcatttatcgcaagcattacagcaaaatacgcagcaaaagaaactgattgttcttcatttaaatggaagccatgaaccggcttgtagcgcctatccgcaatccagcgccgtgtttcaaccgcaggacgatcaggatgcctgctatgacaactccattcattacacagatagtttgctaggtcaggtcaatgtggacgtcaaactgggcgtcaataaattcaatgtcgatgaagagcatccgcacattgttgtgaaggccgatgctgataaacaggcgctggagctgctggtgaaagcgtgccccgcaggtctgtacaagaagcaggatgacggcagtgtgcgcttcgattacgccggatgtctggagtgcggcacctgtcgcattctggggctggggtcggcgctggaacagtgggaatacccgcgcggcacctttggaataaccatgcaaccgtccagaaactttgacgatctcaaattctcctctattcaccgccgcattttgctgtggggaagcggtggtccgtttctggatggttatgtactggtaatgattggcgtggcgctggagcaactgacgccggcgctgaaactggacgctgactggattggcttgctgggcgcgggaacgctcgccgggctgttcgttggcacatcgctgtttggttatatttccgataaagtcggacggcgcaaaatgttcctcattgatatcatcgccatcggcgtgatatcggtggcgacgatgtttgtttcatcccccgtcgaactgttggtgatgcgggtacttatcggcattgtcatcggtgcagattatcccatcgcacctcatgatcacgagttctcagtaccgtcagcgggcgttttcattcagcttatgccccgatgtgtaatcgtcacctccacaaagagcgactcgctgtataccgttggcatgctagctttatctgttcgggcaatacgatgcccattgtacttgttgactggtctgatattcgtgagcaaaaacgacttatggtattgcgagcttcagtcgcactacacggtcgttctgttactctttatgagaaagcgttcccgctttcagagcaatgttcaaagaaagctcatgaccaatttctggccgaccttgcgagcattctaccgggtaacaccacaccgctcctttgtcagtgatgctggcttttaa

SEQ ID NO: 143199 - DNA, 748 bp, Homo sapiens
cccagccaacagtttttccattggagtcacatcatttgctttgacacctttggtctgcataaagggatgttctgcgtgattaaggtagaacatatctatccacggcgcgatgagttgttgaaactcatcttcagtgagcggattcattatgcgatgtcgaaattcaacgtcatcttttgccggggcgataatttgcccaatgcaaaccagcagtgcccgtttagtataagcatgatagactcgagctggtacctttgcggacaaagaagaagtaagcgaaggcgactgaaaggaagctgtaagtggcccacggcagaggtccccagtggaacaagctgtaagccagccccaactctttcgcccctgtcgagttcggttctaagccaaacggcggggtggagatgtagtagtagatctcaatcgatccccagaacagtacggcagcagacgtacaggaggcgaacatcataaagatccaactggcggtgctaaattctggcggttcgttacctaaacgctttttggcatacgggccaaacaccagccagaaccaaccgaaaagcatcaccaccatataccattcaaatgcccatccccatacattggtgacgtaactgaatacagcattaataacgacattcgctgcatccagatctctgactgtaagccaacaaagtatgccgacgattattaacggcggaaagaaaaccttcggttctattcccgtttttctcttttcattcttcat

SEQ ID NO: 143200 - DNA, 1776 bp, Homo sapiens
ttaccgatcccgcattagcgggacgtaaaccgggcggcgaatattgcatgcctgcaggtggtttagcgcaacccccacaccgacacgggtctggttgaagttatagtcgatgagcgattcgccatagccgctgtaaacctgagtataaaggcgcacatgtttggtgatcgggtaacttaagcctaactccgcgccgccgtagccggtgttccagttgtactgtcctttcgcactgagcaccgcatcaccgaggtgatagccgattttaagctggtagtaacccatatatttggtgatatccgggttagtcagcacgcgcagataagccagcaagtccttgatttcaggacgagagaaaaacgacgtaccaccagatattttgtacgggatgcggttttgcatcaggaatttttcaaacacccgcgactgatggttaccgcgataaagaatggcgtaatctttgtactgcgttttattgacgaagtgatgggcgatcagctcgccagtaacgcgctcagcctcatgttcttcgttattcgcgcttaatacttttagctccgcgccataacccagttcggagaacagacgcttttcaaagacgtgcgggttattggcgatcaggatgttcgccgctttcagaatacgcccggaagagcgatagttctgctcaagcttaatcaccttcagcgccggaaaatcctgactcagcagcaccaggttttgcggacgtgcaccgcgccaggagtagatcgactggtcatcgtcacccaccacggtaaagcgcgcgcggctgcccaccagcagtttcaccagctcatactggctggtgttggtgtcctgatactcatccaccagcagatagcgaattttgttctgccagcgcttgcggacttcttcattgcgttgcagcagcaacgtcggcaataaaatcagatcatcgaagtcgagaacgttacaggctttcaggtgtgcatcatacagcccataacaatgggcaaaaatacggtcccgctcgccaatcgcacttgctgccgcctgggacggtgttttgagatcattcttccagttagagatggtcgaaatcagttgttgcaggagaactttgtcatcttcaatcagccctggaccaaacagaacttctgtgcatctggggttatacacacgcaccatcatccagacaaagatgacgccaagaaccatcgtcactatcagccacagcgtacgcaatgccggtgacagctttttcagcattgccagcaaccagccgatgccgcctacggcaaaaaagatcgaaccgctggcgatttcgttactgagtgctgaagcccctacccggttgagcgagttaaaagcgcgcattggtgaaccaagatggagcatagaggcgataaagccaatgcccatcagcacccataaaccaaacatgcaggcgataacacgctgctgggcttctgctcgcaggtcgcctttgagcagcgccaaagccagaacgataaaaccactgtggctgaatgccggattccgtacccgtgcctttgcatctttcggctgctccatcgggttgccaggaccacgcgggatcagtttcgaaacaaacggcagtgccattgggttggcaatcgccacttcacgatttggatcaacggaaatcccgccccattcgaacatccccaggttacccgggaagaccagcgtaccctgttcagatggcggggtgaaaatgccttcatagcgcatctggtggaacatcacgcggcacaccagttggtcaaacat

SEQ ID NO: 143201 - DNA, 2410 bp, Homo sapiens
tggcgattgccgccggggaattcgtctcaaaaaccgtgctttcagcgaggaagggcgacgatttcagtaagcaaaaactggcggaatatcgtcagcatcttgagagtggtccgctgcgcgatatgcgtatgtaccagaaactaccggcgttccttgataacccacgcatgtttagcggctacccggagctggcggtgggtgtggcgcgtgacctgttcaccattgatggcagcgcgccggaactgatgcgcaagaaaatcctccgccacggcaagaaagtgggcttcatcaatctaatcaaggatggcatgaaaggagtgaccgttttatgacttctcccgtcaatgtggacgtcaaactgggcgtcaataaattcaatgtcgatgaagagcatccgcacattgttgtgaaggccgatgctgataaacaggcgctggagctgctggtgaaagcgtgccccgcaggtctgtacaagaagcaggatgacggcagtgtgcgcttcgattacgccggatgtctggagtgcggcacctgtcgcattctggggctggggtcggcgctggaacagtgggaatacccgcgcggcacctttggtgtggagttccgttacggctgatgttggtttgatacctccgccgccataacccagttcggagaacagacgcttttcaaagacgtgcgggttattggcgatcaggatgttccccgctttcagaatacgcccggaagagcgatagttctgctcaagtttaatcaccttcagcgccggaaaatcctgactcagcagcaccaggttttgcggacgtgcaccgcgccaggagtagatcgactggtcatcgtcacccaccacgcagtttcaccagctcatactggctggtgttggtgtcctgatactcatccaccagcagatagcgaattttgttctgccagcgcttgcggacttcttcattgcgttgcagcagcaacgtcggcaataaaatcagatcatcgaagtcgagaacgttacaggctttcaggcatggatgatcctgccataccattcacaacattaagttcgagatttaccccaagtttaagaactcacaccactatgaatcttaccgaattaaagaatacgccggtttctgagctgatcactctcggcgaaaatatggggctggaaaacctggctcgtatgcgtaagcaggacattatttttgccatcctgaagcagcacgcaaagagtggcgaagatatctttggtgatggcgtactggagatattgcaggatggatttggtttcctccgttccgcagacagctcctacctcgccggtcctgatgacatctacgtttcccctagccaaatccgccgtttcaacctccgcactggtgataccatctctggtaagattcgcccgccgaaagaaggtgaacgctattttgcgctgctgaaagttaacgaagttaacttcgacaaacctgaaaacgcccgcaacaaaatcctctttgagaacttaaccccgctgcacgcaaactctcgtctgcgtatggaacgtggtaacggttctactgaagatttaactgctcgcgtactggatctggcatcacctatcggtcgtggggaaagcgagttgttgcagggcacgctggagccgactaacgagccttatgctattgccaaaatcgccgggatcaaactgtgcgaatcatacaaccgccagtacggacgcgattaccgctcagtcatgccgaccaacctgtacgggccacacgacaacttccacccgagtaattcgcatgtgatcccagcattgctgcgtcgcttccacgaggcgacggcacagaatgcgccggacgtggtggtatggggcagcggtacaccgatgcgcgaatttctgcacgtcgatgatatggcggcggcgagcattcatgtcatggagctggcgcatgaagtctggctggagaacacccagccgatgttgtcgcacattaacgtcggcacgggcgttgactgcactatccgcgagctggcgcaaaccatcgccaaagtggtgggttacaaaggccgggtggtttttgatgccagcaaaccggatggcacgccgcgcaaactgctggatgtgacgcgcctgcatcagcttggctggtatcacgaaatctcagtggaagcggagcgtgccatcacttaccaggtcagagatctggatgcagcgaatgtcgttattaatgctgtattcagttacgtcaccaatgtatggggatgggcatttgaatggtatatggtggtgatgcttttcggttggttctggctggtgtttggcccgtatgccaaaaagcgtttaggtaacgaaccgccagaatgtagctccgcaaggtggatcaatatgatggggtaccgagcaagagttcgtctaaatggtctgcactag

SEQ ID NO: 143202 - DNA, 490 bp, Homo sapiens
gtcgttatccctggatagcgccttgccggaccgcaccaccatcatgaatttccgccacctgctggagcagcatcaactggcccgccaattgttcaagaccatcaatcgctggctggccgaagcaggcgtcatgatgactcaaggcaccttggtcgatgccaccatcattgaggcacccagctcgaccaagaacaaagagcagcaacgggatccggagatgcatcagaccaagaaaggcaatcagtggcactttggcatgaaggcccacattggtgtcgatgccaagagtggcctgacccacagcctggtcaccaccgcggccaacgagcatgacctcaatcagctggcatccacgcaagaacaaaacggcatcaacatcgaatacatgaaagccagcatccgggccagggtggagcacccatttcgcatcatcaagcgacagttcggcttcgtgaaagccagatacaaggggttgctgaaaaaacgataa

SEQ ID NO: 143203 - DNA, 1086 bp, Homo sapiens
atggaaaccttctcacttaaagcagcgattaaggtcaagcgataccgctcttacagaggagaggtagggcaaaccgcccctaatgttctccaaagagatttcaaggctacgcggccaaacgagaagtgggttaccgatgttactgaatttgcagtcaatgggcgcaagctgtatttgtctccagtaatagatctcttcaacaacgaagttatttcttacagcctttcggaaagaccagtgatgaacatggttgagaatatgctcgatcaggcattcaaaaagcttaatcctcacgagcatcctgttctgcactctgaccagggatggcagtatcgtatgagaagatatcaaaatatccttaaagaacatggtattaaacaaagcatgtccagaaaaggcaattgtctggataatgctgtggtggagtgtttctttggaaccttaaacattttccagaaagccctcaacatcagcaaaatcgaatcttttgttgcggttactactattttcctcgggcaaaatgagatcccggcgatcgttaaaccgtttatcgatcgcatgaatcgcaacgagttgtttaccgcaatttgtagcgggatggcgtccattgctggttcgatgatgattggttatgccggaatgggcgtaccaattgactacctgttagcggcatcgctgatggcgatccctggcgggattttgtttgcacgtattcttagcccggcaaccgagccttcgcaggtcacatttgaaaatctgtcgttcagcgaaacgccgccaaaaagctttatcgaagcggcggcgagcggtgcgatgaccgggctaaaaatcgccgctggtgtggcgacggtggtaatggcgtttgtcgcaattattgcgctgatcaacggcattatcggcggaattggcggctggtttggtttcgccaatgcctctctgcaaagtatttttggctatgtgctggcaccgctggcgtggatcatgggtgtggactggagtgatgccaatcttgcgggtagcctgattgggcagaaactggcgattaacgacatgcaggcatccaagataagcgcctccccaacctag

SEQ ID NO: 143204 - DNA, 5094 bp, Homo sapiens
  misc_feature (1)...(5094): n = a,t,c or g
atggcgatccatcaggttagcccctttcgtgaagagccagtggattgcgttctgtgggttaaaaacagccaacttatgcctaatgattacaacccaaacaacgtggcaccacccgaaaaaaaactgctgcaaaaatccattgaaatagatggttttacccaacccattgtggtcacacatacggataaaaatgccatggaaatcgtggatggttttcaccgccatgaaattggtaaaggctcatcatcattaaaattacgcttaaaaggttatttgccggtgacctgtctggaaggtacgcgtaatcaacgcatcgccgcgactattcgtcataatcgcgctcgtggacgccatcaaatcaccgccatgtcggaaatcgtccgtgaacttagccagttgggatgggacgataataaaattggcaaagagctgggaatggacagcgacgaagtgctgcgcctgaagcaaattaacggcctgcaagagttgtttgccgaccgtcaatattcccgcgcctggacgctaaagctggcgcagcgttcagctgctgccagcaacgtcgattccttcttggcaaacagagacgaatcagtttatgggaagggatcggccaacaccgacagcggaatcgccgtacgccgtgctcctgcgtcagccactggcaaaactcaacatcatccaggaccagtgatgaacatggttgagaatatgctcgatcaggcattcaaaaagcttaatcctcacgagcatcctgttctgcactctgaccagggatggcagtatcgtatgagaagatatcaaaatatccttaaagaacatggctgcggcgtcacgccgattatgtcgatgcgtcgctggcttgcgaagaaccgtccacaggccgatgtgcgggtgatctacaacgtgcgtacgccgcaggatgttattttcgccgatgagtggcgtaactatccggtaacgctggtggcagaaaataacgttaccgaaggctttatcgctggtcgtctcactcgcgaactgctggcaggtgtacctgacttagcttcacgtaccgtgatgacctgcggcccggctccgtatatggattgggtagagcaggaagtgaaagcgctcggcgtgacgcgtttctttaaagagaaattcttcaccccagtagcagaagcggcgaccagcggtctgaaattcaccaaactgcaaccggcacgagaattttacgccccggttggcaccacgctactggaggcgctggaaagcaataacgttccggttgtcgctgcctgccgtgcgggtgtttgcggctgctgtaagacaaaagtggtttccggtgaatatacggtgagcagcacaatgacgctgaccgacgccgaaatcgctgaaggttacgcagtggtcgccctgataaagccaggcgcgcagattggtcgatccccagtcaattgcgatgtagcgagctgtcatgtgatttcctttaaccttcgtgtcgagctggcgatcatgcgccgcctgctctgccgcatcgccgtcctgatgtcgtatcgcatcgaacagcgccttatgttcctggagcgtttgcggcatgttggcctcatcgcccatccagccaaaaaagcgatcaaaaaaacaaggaagcctgggatgaaagtgacatttgagcagttaaaagcagcctttaatcgggtcttaatttcacgcggcgttgacagcgaaacggctgacgcctgtgcagagatgttcgcccgcaccaccgaatccggcgtttattctcacggcgttaatcgtttccctcgtttcattcaacaactggaaaacggcgatatcattcctgatgcccaacccaaacgtataaccagcctcggcgcaattgaacagtgggacgcccagcgttcgatcggtaacctgacagcgaaaaagatgatggatcgcgccattgaactggctgccgatcacggtattggtctgctacggctggcaggcggcggaaaaaggctatattggcatttgctggaccaactccatcgccgtaacgacaacatctctctggatctgggcaacaacgctgaagccgtgatcctgcgcgaagatatgctgccgcgtgaaaacttccgccctggcgaccgcgttcgtggcgtgctctattccgttcgcccggaagcgcgtggcgcgcaactgttcgtcactcgttccaagccggaaatgctgatcgaactgttccgtattgaagtgccagaaatcggcgaagaagtgattgaaattaaagcagcggctcgcgatccgggttctcgtgcgaaaatcgcggtgaaaaccaacgataaacgtatcgatccgcctactcaacatgaagatgaagaggatgaaggcctttatgatgatccatttccacttaatgaatgttccgttggtcctggccaccggcaccggtttgcaccccccgaggcccagttccgaaggcccgaaaccctaaaaggagcccccacttcccgaatcccggagacttcggtaggagtatcggctggatccgacttcgagcctcatctgatgcgggaacttacttgtcgcctaactgctctgacatggtgttacccgggttcggcgtacgcggttcatcaaccggacgaggagcctttggactaccattgtcgccagaattcccgctggcggacgtacatcgcgacgtgccatcaggtcatcaatctgcggtgcgtcgatagtctcatatttcatgagagcatctttcatcgcatgcagaatatccatattgtcggtcagaagctgacgcgcacgattatagttacgctcaatcagtgctttcacttcctggtcgatgatacgtgcagtttcatcggacatatgtttcgctttcgctacgctacggccgaggaacacttcaccttcttcttccgcgtacagcagtggacccaatttctcagagaagccccactgagtcaccatgttacgtgccaggttggtcgcaactttaatatcgttggacgcaccggtagatacatgttccggcccgtagatgatctcttctgccagacgaccaccgtacagcgtagaaatctggctttccagtttctgacggctggcgctgattgcgtcgccctcaggcaagaagaaagtcacacccagcgcacgaccgcgtgggataatcgtcactttgtgcaccggatcgtgttccggcaccaggcgaccgataatcgcatgacccgcttcngtgccgtcgattctttctgcgcttccgtcatcacccatggagcgacgttccgcacccatcatgattttgtctttcgctttctcgaactcaaccatcgacacaacgcgtttgttgccacgagcagcgaacagtgccgcttcgttcaccattttgtggacccgccgaaaatatttgtgccgaaaaaagttttaaaggtccccctcacagaggaccacagtgaagggaaaaaggggcaaaaacatacgccagaggaactcaccaagacaggaggcatccacctgggaaccgggagaataagggagaaaaatgccacgagagtggaacttctgaaaattaattatctgttcatcggcattctggcactgctgctcgcggtcgctctctggccatccattccctggtttggtaaagccgacaaccgtatcgccgccattcaagcgcggggagagttgcgtgtgagcaccattcatactcccctgacttataacgaaatcaacgggaaaccttttggcctggattacgaactggcgaaacagtttgccgattacctcggcgtaaaactgaaagtgaccgtgcggcagaatatcagccagctgtttgacgaccttgataatggtaacgccgacctgctggcggcaggacttgtctataacagtgagcgggtaaaaaattatcagcctggccctacctattattccgtgtcacaacaactggtttataaagtgggtcagtatcgcccacgtacgctgggcaacctgacggcggagcaactcaccgttgcaccgggtcatgtggtggttaacgatctccagaccctgaaagaaacaaaattcccggaattaagctggaaggtagacgacaaaaaaggctctgcggaattaatggaagatgtcatcgaaggaaaactcgattacaccattgctgattctgtcgccatcagcctgtttcagcgcgttcacccggagctcgccgtagcgctcgatatcaccgatgaacaaccggtgacttggtttagcccgttagatggcgataataccctttccgccgccctgctcgacttcttcaacgaaatgaatgaagacggtacgctggcacgcattgaagagaaatacctggggcatggcgatgattttgattacgtcgatacgcgcacatttttacgcgccgtcgatgcggtactgccgcagttaaagcccctgtttgagaaatacgccgaagaaattgactggcgtttgctggccgctattgcttatcaggaatcgcactgggatgcacaggccacttcaccgacggtgtatgatggtgtttttgaggtgctccagtggcttctgtttctatcagctgtccctcctgttcagctactgacggggtggtgcgtaacggcaaaagcaccgccggacatcagcgctatctctgctctcactgccgtaaaacatggcaactgcagttcacttacaccgcttctcaacccgccgggcagtgacgtcatcgtctgcgcggaaatggacgaacagtggggctatgtcggggctaaatcgcgccagcgctggctgttttacgcgtatgacagtctccggaagacggttgttgcgcacgtattcggtgaacgcactatggcgacgctggggcgtcttatgagcctgctgtcaccctttgacgtggtgatatggatgacggatggctggccgctgtatgaatcccgcctgaagggaaagctgcacgtaatcagcaagcgatatacgcagcgaattgagcggcataacctgaatctgaggcagcacctggcacggctgggacggaagtcgctgtcgttctcaaaatcggtggagctgcatgacaaagtcatcgggcattatctgaacataaaacactatcaataa

SEQ ID NO: 143205 - DNA, 812 bp, Homo sapiens
atgagtcatcaacttaccttcgccgacagtgaattcagcagtaagcgccgtcagaccagaaaagagattttcttgtcccgcatggagcagattctgccatggcaaaacatggtggaagtcatcgagccgttttaccccaaggcgggcaatggccgacggccctatccgctggagaccatgctacgcattcactgcatgcagcattggtacaacctgagcgatggcgcgatggaagatgccctgtacgaaatcgcctccatgcgtctgtttgcccgattatccctggatagcgccttgccggaccgcaccaccatcatgaatttccgccacctgctcgagcagcatcaactggcccgccaattgttcaagaccatcaatcgctggctggccgaagcaggcgtcatgatgacccaaggcaccttggtggatgccaccatcattgaggcacccagctctaccaagaacaaagagcagcaacgcgatccggagatgcatcagaccaagaaaggcaatcagtggcactttggcatgaaggcccacattggtgtcgatgccaagagtggcctgacccacagcctggtcaccaccgcggccaacgagcatgacctcaatcagctggtgcagaatgaattggagacagcagaacgtttcagaagacaagaagacactcaatcaaaatgtctactctcatctataatgttgtatatcaaaaacttaagcggccctgatgtatcagagctcatttcaccactctcagagggctttaatttatgctcgtcagtggtagtggctgttatcgctgctgtgttaag

SEQ ID NO: 143206 - DNA, 1833 bp, Homo sapiens
atgctactcaggaggctgagctcgtgcaaagcaggcgccgtcagcgcttacttgtcttcgccgctggccccctcggagcccgtgacgctggcgtcggccggtgtctcgccacagggggctggcctggtcatccagaagaacctctcggccgctgtggccaccacgctcaatgggaactctgtgttcggaggcgcgggggccgcctcggctcccaccgggacgccctcgggacagccgctggcggtggccccaggcctcggctcgtcgccactggtcccggcgcccaacgtgatcctgcatcgcacacccacgcccatccagcccaagcccgcgggggtgctgccgcccaagctctaccagctgacgcccaagccgtttgcgcccgcgggcgccacgctcaccatccagggcgagccgggggcgctcccgcagcagcccaaggccccgcagaacctgacgttcatggcggcggggaaggcgggccagaacgtggtgctgtcgggcttccccgcgcctgcgctgcaagcgaacgtcttcaagcagccaccggccaccaccaccggagcggccccgccgcagccccccggggccctgagcaaacccatgagcgtccacctcctgaaccaaggcagcagcatcgtcatcccgcccagcacatgctgccgggccagaaccagttcctactgcctggcgccccggcggtccagctcccgcagcagctctcagccctgccggccaacgtgggcgggcagatcctggcggccgctgccccccacacaggtgggccagcctgcgctcttccagatgcccgtgtcgctggcggcgggcagcctgcccacgcagagccagcagcgcccgccgggccggccgccaccactgtcctccagggggagggtgagcccctcagcggagatggtaatgatcgaccgaatgttcattcaggaggagaagaccacccttgccttggataaacagctggccaaggagaagccgggtgagaggggggatttcgtgtgtgcccagttccctattcaggtcgtggagagcgtcagtatcatcgacacgccgggtatcctgttgggtgccaggctcagagtgaaccgtgtgcccccctccgtactacgcggtagttcttgcgcagtgtcagtgctctcggcagtgcggggcggtgcccagggcttgcgctcgggggcggcaggcggttcgtggtccaccgtgccgttcatctggcccgtgggcggcggtggtggtggcggccgtggcgggggctcggccaccttgagggtctttgatgggcggacggttgcgggagggcatggggcacgtcctcgtcggcgtccaaggaggagtgcggcagaggaggaggaggaagaggaggacagggaggaggacgcccgggcccagttgcccattcactgtaaccacagcctggtcaccaccgcggccaacgagcatgacctcaatcagctgggtaatctgctgcatggagaggagcaatttgtctcagccgatgccggctaccaaggggcgccacagcgcgaggagctgaccgaggtggatgtggactggctgatcgccgagcgccccggcaaggtaagaacctggaaacagcatccacgcaagaacaaaacggccatcaacatcgaatacatgaaagccagcatccgggccagggtggagcacccatttcgcatcatcaagcgacagttcggcttcgtgaaagccagatacaaggggttgctgaaaaacgataaccaactggcgatgttattcacgctggccaacctgtttcgggcggaccaaatgatacgtcagtgggagagatctcactaa

SEQ ID NO: 143207 - DNA, 1308 bp, Homo sapiens; identical to SEQ ID NO: 121288

SEQ ID NO: 143208 - DNA, 836 bp, Homo sapiens
atgagtcatcaacttaccttcgccgacagtgaattcagcagtaagcgccgtcagaccagaaaagagattttcttgtcccgcatggagcagattctgccatggcaaaacatggtggaagtcatcgagccgttttaccccaaggctggtaatggccggcgaccttatccgctggaaaccatgctacgcattcactgcatgcagcattggtacaacctgagcgatggcgcgatggaagatgctctgtacgaaatcgcctccatgcgtctgtttgcccggttatccctggatagcgccttgccggaccgcaccaccatcatgaatttccgccacctgctggagcagcatcaactggcccgccaattgttcaagaccatcaatcgctggctggccgaagcaggcgtcatgatgactcaaggcaccttggtcgatgccaccatcattgaggcacccagctcgaccaagaacaaagagcagcaacgcgatccggagatgcatcagaccaagaaaggcaatcagtggcactttggcatgaaggcccacattggtgtcgatgccaagagtggcctgacccacagcctggtcaccaccgcggccaacgagcatgacctcaatcagctggtggagtactggatcctgctgcccgccatgattcttctgatgattgaatcggtcgccagtttcgcctggtttattcgctggtttggtcgcgttgtgcctggcaaaccgagcgaggccgtcgccaatgccgcaccgctgccaggatcaatgcgcctggtgttgattgtactgattgtgatgtcgctgatttccagcgtaatcgccgcgacctggttgca

SEQ ID NO: 143209 - DNA, 1569 bp, Homo sapiens
atgcctaacttctggctggcgtttttactggtgatggcgttttcggtgtatctgcaatggctacccgcgatgggttacggcggctggcagcacatcattttgcctgcggtttccattgcctttatgtcgctggcgattaacgcgcgtttactgcgcgccagtatgctggacgtcgccggtcagcgtcacgtcacctgggcgcgtctgcgcggcctgaacgacaaacagaccgaacgtcgccacatcctgcgcaatgcctcgctgccgatgatcaccgccgtggggatgcatatcggcgaactgattggcgggacgatgattatcgaaaacatctttgcctggccgggcgtcgggcgctatgcggtgtcggcgatttttaaccgtgactatccggtgatccagtgctttacgctgatgatggtggtggtttttgtggtctgtaatttgattgtcgatttgctcaacgccgcgctggacccgcgcattcgtcgtcatgaaggagcgcacgcgcgattgatttgccgtcgcgcctgctttcgccggatgcgcagcactgccctgggcaccgatcacttagtcgcacatttcggtacccaaatcgatgcgtatcacgtcaccgtgagcctcagctggttccttgctaagatgtactcggtatccggctctgtttggttccatagtacgctaactgaaagccttagctcatcccacgaaaaagtgaaagtactcaacgagctaaggcagttttatcctcttgatgagcttctcagggctgcggagataccgcgcagtacgttttattatcatctaaaggctctcagcaagcctgacaagtatgcggacgttaaaaagcgtattagtgagatttatcacgagaatagaggccgatacggataccgtagggtaacgctgtctcttcatcgagaagggaaacagattaaccataaagctgttcagcgcctgatgggaaccctctcacttaaagcagcgattaaggtcaagcgataccgctcttacagaggagaggtagggcaaaccgcccctaatgttctccaaagagatttcaaggctacgcggccaaacgagaagtgggttaccgatgttactgaatttgcagtcaatgggcgcaagctgtatttgtctccagtaatagatctcttcaacaacgaagttatttcttacagcctttcggaaagaccagtgatgaacatggttgagaatatgctcgatcaggcattcaaaaagcttaatcctcacgagcatcctgttctgcactctgaccagggatggcagtatcgtatgagaagatatcaaaatatccttaaagaacatggtattaaacaaagcatgtccagaaaaggcaattgtctggataatgctgtggtggagtgtttctttggaaccttaaagtcggagtgtttttatcttgatgagttcagtaatataagcgaactgaaggatgctgttacggaatatattgaatactacaacagcagaagaattagcctgaaattaaaaggtctgactccaattgaatatcggaatcagacctatatgcctcgtgtttaa

SEQ ID NO: 143210 - DNA, 1822 bp, Homo sapiens
cttcgccgacagtgaattcagcagtaagcgccgtcagaccagaaaagagattttcttgtcccgcatggagccgattctggcatggttccggctggttggtgccgatataaaacacctgctgatttttttccgcttcgaaggtatcaagacgtactgcaaagaccgccagcttcccggcgcaaccagaagattcaaataaccgatcaggatcggcgttataacgtgcgggcgtgtcggcttcaatatcacgaacgcggtggacatagtcataatcgtgggcgtgacgaccatcgtgacgcacatcgtcatctttgatgcgatcatcatccagcttgctaaggatctgctccggcgtttcgcccagatcaatccccagatggttcaccagcgtcagtttgccgtcttcatttatacgcgcgaataacgacatttcggtatacgccgggccacgttgcaccagcgagccgccggagttgttacaaataccgccgatgaccgatgcgcctatacacgatgatccaatcactgagtgcggttcgcgtcccagcggtttgagggctttttccagcgactgttcgcccttgccaagaacgtgcagcttgtcgagacgcagggtgctgatgataacgacatcgcgatcataatcgttaacgtatggcgtcgatccttccgtcaggcctgtattggcggctgcatcagaatacttcagtcggcggtgacgcaggcttccagaacccgcacaatctactagtgagcgggtagtaccaaggtaattaccgccacttcggaattcttcgtggttaccccggccattaaaaaattccaacttccaactcacccggtcagccaggatttcactttccagccggtcgagcatctgcaccagcaccggcgggaacaccacactgccaccgtcttcgccgccggactgctgaagcgcatccgccaggctgcggcgctgcgttttcgccagctcaccggtggcggtttcaactctgatgagtggcgtgaagctccccggctgataaatcgtctggatgcgggttctgtcgttctgtattgtggtcagccggtcgccgtcccagccgtaccaggtcacttgcggtttccgtgacagcgacatccagcccgtcaggtcccgttcacgccgccacacccgttttgccaccctgcggcccagcgggtcgtaaagatagcgactttcgaccagcggctcttcatattgtgtccgcgtgtagtgcaccagccggtgctgacttcgtctaaggatccctgacgtactgatcgtctcgtttaaggagaagtaatatgaaatgtccggttgccaccaggtagaaatggtttctggcattaaagatattccatacaccttccgtggacgaaaaacagtattgaaaggtatccacggtttatattgtgtccattgcgaagagagcatcatgaataaagaagagtcagatgctttcatggcgcaagtaaaggcatttcgggcttcggtgaatgccgaaacagtggcacctgaatttatagtgaaggttcgaaaaaagctctctcggtcgccccgcaacaagtctttcgttacaacaatcatagcgacccaggtacgctcgatccgcaaaaggtgaggagaatactggcgagcagatgtgctggatctgggtgaaggctggttggatggacgggaaggcaggtgaacacactcctggaggaactctttaacttcgatctctacgcgacgatccggagccaggcagtcgatcagtgcagcacgctgtttcacgttgtcacaggtgttgccagtaaccgggttggattcgcccat

SEQ ID NO: 143211 - DNA, 861 bp, Homo sapiens
ctaaagctggcgcagcgttcagctgctgccagcaacgtcgattccttcttggcaaacagagacgaatcagtttatgggaagggatcggccaacaccgacagcggaatcgccgtacgccgtgctcctgcgtcagccactggcaaaactcaacatcatccaggaccagtgatgaacatggttgagaatatgctcgatcaggcattcaaaaagcttaatcctcacgagcatcctgttctgcactctgaccagggatggcagtatcgtatgagaagatatcaaaatatccttaaagaacatggctgcggcgtcacgccgattatgtcgatgcgtcgctggcttgcgaagaaccgtccacaggccgatgtgcgggtgatctacaacgtgcgtacgccgcaggatgttattttcgccgatgagtggcgtaactatccggtaacgctggtggcagaaaataacgttaccgaaggctttatcgctggtcgtctcactcgcgaactgctggcaggtgtacctgacttagcttcacgtaccgtgatgacctgcggcccggctccgtatatggattgggtagagcaggaagtgaaagcgctcggcgtgacgcgtttctttaaagagaaattcttcaccccagtagcagaagcggcgaccagcggtctgaaattcaccaaactgcaaccggcacgagaattttacgccccggttggcaccacgctactggaggcgctggaaagcaataacgttccggttgtcgctgcctgccgtgcgggtgtttgcggctgctgtaagacaaaagtggtttccggtgaatatacggtgagcagcacaatgacgctgaccgacgccgaaatcgctgaaggttac

SEQ ID NO: 143212 - DNA, 2574 bp, Homo sapiens
atggagaaaaaatccccggcctacttctgctgtcgggatatgcaggtaattcactctgacgctgctttacaacggttattgacacgtttcaacgatcctgaagggtggagtaatctggcgaaaaatcagtatctgagcacgtcgatgaaacaaaaaatttggcaacgtgctttatcgcatcggaaaaataatccgaaagcagattcagatgcatatgaaaccagcgctgatatgattttgtctgagctgattagccacggcgaagttgatgaccagatgctattaaatgccaccgccctgatacgttcggacgactgggactttttagagagtgcattaattagttgggataatttacccgctgttgttctcaaggaattacagcaaaacacgccacgcaatgatatttgggcgaagttttttctgaggcaggaaaacagttcccgtgcgcaggttgacgaagcgttacgtgtttattatgcactagaccccgatgcgttagcacaactggatgtactggctaaacgcccttacaaaacagcggcctttcggggtgagaaaacgcatcgcgtgccacggcgtagtgtgcggcagaacatcatcgaccaggccgaccgactgcatggtgcgcagcgcctcgtcatcaataccaatcgcacgcgggtagtcgatcaacttatcgagtttctccaccaccagcacgtcaatgcccatctggccgagatagttcgccatcatcagcccaaccgggccggcaccagcgatcgccacctgaacgctatggttaacagcaggctggatgtcaggaacaatgagcagacggaatacaaaaccgtgcgcggcttaacccgcggtctaatgttattaaatatgttaaataaacttgatagcacatccccatgtcgcatgctcgtatgttgtgtcccgagagcccccccaaaccccggggggttaaacccgcgcgcccacagcctgaacaggtcacccacggaaacaccgctgaatggggaataccagtatgtgcacaacggcggtacagcgtctgacactgttgtgaacagtgacggctgccagattgtcaaaaacgggggtgtggccgggaataccaccgttaatcagaaggccagactgcaggtggacgccggtggtacagccacgaatgtcaccctgaagcagggcggcgcactggttaccagtacggctgcaaccgttaccggcataaaccgcctgggagcattctctgttgtggagggtaaagctgataatgtcgtactggaaaatggcggacgcctggatgtgctgaccggacacacagccactaatacccgcgtggatgatggcggaacgctggatgtccgcaacggtggcaccgccaccaccgtatccatgggaaatggcggtgtactgctggccgattccggtgccgctgtcagtggtacccggagcgacggaaaggcattcagtatcggaggcggtcaggcggatgccctgatgctggaaaaaggcagttcattcacgctgaacgccggtgatacggccacggataccacggtaaatggcggactgttcaccgccagtggcggcacactggcgggcaccaccacgctgaataaaggcgccataattaacccttcccgggaacacggccaggtgctggctgtcggtgaagatattcaccagcttgcgcaggttgaagtatgtggtatcaagcgcgatgtgaatatcgccctgatttgtgaaggtaaccctgccgatctactgggccagtgggtgctggtacacgtcggatttgccatgagcatcatcgacgaagatgaagcccaagccacattagacgcactgcgccaaatggattacgacattaccagcgctgaattcagcagtaagcgccgtcagaccagaaaagagattttcttgtcccgcatggagcagattctgccatggcaaaacatggtggaagtcatcgagccgttttaccccaaggctggtaatggccggcgaccttatccgctggaaaccatgctacgcattcactgcatgcagcattggtacaacctgagcgatggcgcgatggaagatgctctgtacgaaatcgcctccatgcgtctgtttgcccggttatccctggatagcgccttgccggaccgcaccaccatcatgaatttccgccacctgctggagcagcatcaactggcccgccaattgttcaagaccatcaatcgctggctggccgaagcaggcgtcatgatgactcaaggcaccttggtcgatgccaccatcattgaggcacccagctcgaaccggaggattttggccctggccaaaacccaggttgcccaatggcccaaactttttaccaacaggttcatccccaacccaaattggggcccccattctggcccctggccgtgcccaatgcccccccaaaaatgggtccccaggggtcgcatgccctcaaatggcccagtgggggaaagaagcttgagaggatttcaagggctttcgggtaccacatgcgcccaatttttgggaaaggccaatgggaaccaacctaacactcccctggccagctga

SEQ ID NO: 143213 - DNA, 845 bp, Homo sapiens
acggccttgaaggggctgtagtgcaggatggtccagcggtggatgcgcggcgcctgcagcttgtactccggcagcacatccgcgcccagggacaggacagcctttcggaaagaccagtgatgaacatggttgagaatatgctcgatcaggcattcaaaaagcttaatcctcacgagcatcctgttctgcactctgaccagggatggcagtatcgtatgagaagatatcaaaatatccttatggggcgcgatgatctcaatctccgtggtggagctggagcggtgcttctccaagttgaactccacgaagttgagcgtgaactgtgggatctggctgatggtcctgtacttgcccctgcctgtgcctggccctggtccgcctggcctgccatgagagccctcggagcccaggaagctctgggacaacaggcgctgggacaagctgcggctgctgcacttggccaggagctgggccaggtcctcgaagttgagaatgaacatgatgacagccccgtcctcgttcttcacgggcaccacatcatccttgcggtagtagaggatgtccaccttgcactcctcagcccccagcagggcctgcgctaggcgggacacggcgctgcttggtgtgttggggcctgtgaggaagtcgcaggtgcagggttgctgcatcacctccactcgggagtagccgaagagttcgcagaagccgtcgttgcagtaaatgatggcgcagttctccatctgagcattggcaatcaggaacttccgactttggccctcgaacttgcggatgatggtgtccaggtaagtgttttggggagcgacgtggcccctgcggaccggcat

SEQ ID NO: 143214 - DNA, 609 bp, Homo sapiens
cgatttcggctcgatcagttcagtcgggctgtaggtcgcgccgcagacttcgcagttatcgccgtattgatccggggatttacatttcgggcaggtgcctttcacaaaacggtccggcaggaacatgcctttttccggatcgtacagctgagagatggtgcggtttttaataaaaccgttttctttcaggcgcttctctagagaatttccattaaagtggcttagctgcctttggtcatctagagcctccggcaaggcgctatccagggataaccgggcaaacagacgcatggaggcgatttcgtacagagcatcttccatcgcgccatcgctcaggttgtaccaatgtcttagaacaaaattgctcttcagcttctcatcctcagttgatgtccctttattggcggagcgtaacatgcgcacgatatcccagccgttcacgtccggcagcataatatcgaggattatcagatcataatcaccggtcatcgccagatggtagccattcagcccgttgtcggccaaatcgaccacaaaaccggcttcggttaaccctttggtcaagtattctccggttttcttttcatcttcgacaatcaacagtttcat

SEQ ID NO: 143215 - DNA, 501 bp, Homo sapiens
ccgtctggtcaacgcagtgtacgctcaagtattcgttaatagactggttactcagcagccgctgggtggtaaggcacagttcggtggtcagcgtttcggggagatggaagtgtgggcgctggaagcatacggcgcagcatacaccctgcaggaaatgctcaccgttaagtctgatgacgtgaacggtcgtaccaagatcctgatcacctggaaatttgttagaaataacaaaacggccatcaacatcgaatacatgaaagccagcatccgggccagggtggagcacccatttcgcatcatcaagcgacagttcggcttcgtgaaagccagatacaaggggttgctgaaaaacgataaccaactggcgatgttattcacgctggccaacctgtttcgggcggaccaaatgatacagtcaaagttcagccaggaatctgcagctgtcctgatgagggtgatgatgttggtgaagggtttggaggaggctggcttctcagaaag

SEQ ID NO: 143216 - DNA, 1350 bp, Homo sapiens
atgaaggcccacgggctttcctctggcagttgtggattggccagtttaaataaaacaagtgtgtatgcgggtgggggtgggggggtggcttatttgcctgactccggtgttgaccttaggtttcctcatggtcagcagctgtggagtgagttgggctttgggttggactggggcctgctcatgggagaaggggacctatttgatggctttgcagatggactaggagttgctgaagctatttcatatgtggatcctcagttccttacctacatggcactagaagaacgcttagcccaggctatggaggtcaggacatgggttgccctctatgaaaaacatggagaaaaaggtttaattcccaaacctaaaggcgttagtgctgatccagagttgcgtattaaggtcgtgaaagctgtgatcgagcagcacatgtcccttaatcaggctgctgctcactttatgcttgctgctgaaagccttagctcatcccacgaaaaagtgaaagtactcaacgagctaaggcagttttatcctcttgatgagcttctcagggctgcggagataccgcgcagtacgttttattatcatctaaaggctctcagcaagcctgacaagtatgcggacgttaaaaagcgtattagtgagatttatcacgagaatagaggccgatacggataccgtagggtaacgctgtctcttcatcgagaagggaaacagattaaccataaagctgttcagcgcctgatgggaaccctctcacttaaagcagcgattaaggtcaagcgataccgctcttacagaggagaggtagggcaaaccgcccctaatgttctccaaagagatttcaaggctacgcggccaaacgagaagtgggttaccgatgttactgaatttgcagtcaatgggcgcaagctgtatttgtctccagtaatagatctcttcaacaacgaagttatttcttacagcctttcggaaagaccagtgatgaacatggttgagaatatgctcgatcaggcattcaaaaagcttaatcctcacgagcatcctgttctgcactctgaccagggatggcagtatcgtatgagaagatatcaaaatatccttaaagaacatggtattaaacaaagcatgtccagaaaaggcaattgtctggataatgctgtggtggagtgtttctttggaaccttaaagtcggagtgtttttatcttgatgagttcagtaatataagcgaactgaaggatgctgttacggaatatattgaatactacaacagcagaagaattagcctgaaattaaaaggtctgactccaattgaatatcggaatcagacctatatgcctcgtgtttaa

SEQ ID NO: 143217 - DNA, 2462 bp, Homo sapiens
aggtaatccggctgggagcacagcaggttgtcgatatcgacgcccagtttacgtgcgtagattgggtccagcgcgtgttcagcatcgataaacgcacaggttttaccttcacgctgcgctgcggcgatcacctgcagcgtcagcgtggttttaccggaagattccggtccgtagatttcgacgatacggcccatcggcagaccacctgccccaagcgcgatatccacgcgagtcgtcgagtcatgttccttgccatggtttcttacattaaacgcgcccgctccatgcgcgatattcgtaacgaaaaaggcaccgcaaaacccgatcctgcggttatgaaacgactgattcaactcggtttgccgattgcgctggcactgttctttgaagtgacactgtttgccgtcgtggctctgttagtgtctccgctcggtattgttgatgtcgcaggacaccagattgccctgaactttagttcactaatgttcgtgcttccaatgtcgctggcggcagcggtaactatccgcgtaggttatcgtctgggtcagggctcaacgctggatgcgcaaaccgctgcgcggaccgggcttatggtgggtgtctgtatggcaaccctgacggccattttcacggtttcactgcgggagcaaatcgccctgttgtacaacgacaatcccgaggttgtaacgctggctgcgcatttgatgttgctggcggcggtatatcagatttctgactcaatccaggtgattggcagtgggattttgcgtggttataaagatacgcgttccattttctatattacctttacggcttactgggtgctgggcttgccaagcggctatattctggcactgaccgatctggtcgttgaacctatgggccagcaggcttctgatagcttattattgcctacaacactgcactggattaagatgaaaacgattgaagttgatgatgaactctacagctatattgccagccacactaagcatatcggcgagagcgcatccgacattttacggcgtatgttgaaattttccgccgcatcacagcctgctgctccggtgacgaaagaggttcgcgttgcgtcacctgctatcgtcgaagcgaagccggtcaaaacgattaaagacaaggttcgcgcaatgcgtgtctatgaagagcgcggagaagctggtttacgcgcgctcaagattggcaccaaaagaaacattgcaatatcagttgatccagaaaaagcggcatcagcattggagctgtcaaaagaccgacgcattgaggatcttgaaaggcaagttcgatttcttgaaacgcggcttatgtatctaaaaaagctgaaagccttagctcatcccacgaaaaaggctgcggagataccgcgcagtacgttttattatcatctaaaggctctcagcaagcctgacaagtatgcggacgttaaaaagcgtattagtgagatttatcacgagaatagaggccgatacggataccgtagggtaacgctgtctcttcatcgagaagggaaacagattaaccataaagctgttcagcgcctgatgggaaccctctcacttaaagcagcgattaaggtcaagcgataccgctcttacagaggagaggtagggcaaaccgcccctaatgttctccaaagagatttcaaggctacgcggccaaacgagaagtgggttaccgatgttactgaatttgcagtcaatgggcgcaagctgtatttgtctccagtaatagatctcttcaacaacgaagttatttcttacagcctttcggaaagaccaaatacggtgattcgtattaaaggcgatctggtttctaaaccttatatcgacatcacactcaatctgatgaagacgtttggtgttgaaattgaaaatcagcactatcaacaatttgtcgtaaaaggcgggcagtcttatcagtctccgggtacttatttggtcgaaggcgatgcatcttcggcttcttactttctggcagcagcagcaatcaaaggcggcactgtaaaagtgaccggtattggacgtaacagtatgccagggaagcaacagttaaaaaccatgaaacaggcaacaagaaaaccgacgacacccggagatattcttctctatgaatatctggaaccgctcgatttgaaaatcaatgagttagcagagttgctgcatgttcatcgtaatagcgtcagtgcactgatcaataacaatcgtaaactcactactgagatggcatttcgtctggcgaaagtttttgataccacagtcgatttttggctaaacctccaggcggcggttgatctttgggaagttgaaaacaacatgcgcacccaggaagaattgggacggattgaaacagtggctgaatatttggcacgccgtgaagagcgtgcaaaaaggtcgcgccggataaggcgttcacgccgcatccggcatccgagcaccattgcctaa

SEQ ID NO: 143218 - DNA, 2352 bp, Homo sapiens
atgacacgtttcctgcatgttcagttaccgctggcgttaccggtatttctgcgcagcctgcgggtggtgatggtgcaaactgtaggtatggcggtgattgcggcgttaatcggcgcaggcggttttggtgcgctggttttccaggggctgctaagcagcgccattgatttagtgttgctgggggtgatcccggtaattgttctggcggtgcttaccgacgcgctgttcgatttgcttatcgcactgctgaagggtatatttccttccagctacgttcacttgaaaaatgcctgtgtaaagaacaaaggcatgaggccctcacctgatgtggccactccgatgggcctggctcacacctttatggccgctcaggcgctggaagaagcggcggtagaagccggttatgaagtgaaaattgaaacccagggcgcggacggtatccagaatcgcctgacggcgcaggatatcgccgaagcgaccatcatcatccactccgtggcagttaccccggaagataacgaactccttcggcggcgtgttgtttggttttgccattccgatgtttgctgcttttgtggcgaactctatcggtggcaaactggcgttcccggctggttttatcggcgggttgatgtctacccagccgacgcaactgctgaacttcgatcccagcactatgcaatgggcgacctcttcgccggtgccgtccaccttcattggtgcgctgattatttctatcgttgccggttaccttgtgaagtggatgaaccagaaaatccagttaccggatttcctgttagcgttcaaaaccacatttttgctcccgattctttccgccatttttgtcatgctcgcgtgccggggaaacagggatcgctgttgcaggcaaaagcacgcggtgccgatgtgcgcatcgtttactcgccgatggatgcgttgaaactggcgcaggagaatccaacccgcaaagtggtgttcttcggcttaggttttgaaaccactatgccgaccaccgctatcactctgcaacaggcgaaagcgcgtgatgtgcagaatttttacttcttctgccagcacattacgcttatcccgacgttgcgcagtttgctggaacagccggataacggtatcgatgcgttcctcgcgccgggtcacgtcagtatggttatcggcaccgacgcctataattttatcgccagcgattttcatcgtccgctggtggttgctggattcgaaccccttgatctactacaaggcgtggtcatgctggtgcagcagaaaatagcggcccacagcaaggtagagaatcagtatcgtcgagtggtaccggatgccggtaacctgctggcgcaacaggcgattgccgatgtgttctgtgtcaacggcgacagcgaatggcgcggcttaggcgtgattgaatcttctgtgcttctctcagtcttggtttgtatgctggaatcgaggccagaattctcactaaaggctacacgagaaagtgaattcagcagtaagcgccgtcagaccagaaaagagattttcttgtcccgcatggagcagattctgccatggcaaaacatggtggaagtcatcgagccgttttaccccaaggctgcgacccccacatggaaagcctcatctaatggcgcattctgctcgctgacaagttgctcagcaatcgagcgcggttattctgttgcaaaaacaggggaactgacacctgttgctattacagcggtcaccttcccgttactgattgatgctgcggtaaatgacaatactattcttggttctgatgaaacgatcaaactggatgctgtccctcctgttcagctactgacggggtggtgcgtaacggcaaaagcaccgccggacatcagcgctatctctgctctcactgccgtaaaacatggcaactgcagttcacttacaccgcttctcaacccgccgggcagtgacgtcatcgtctgcgcggaaatggacgaacagtggggctatgtcggggctaaatcgcgccagcgctggctgttttacgcgtatgacagtctccggaagacggttgttgcgcacgtattcggtgaacgcactatggcgacgctggggcgtcttatgagcctgctgtcaccctttgacgtggtgatatggatgacggatggctggccgctgtatgaatcccgcctgaagggaaagctgcacgtaatcagcaagcgatatacgcagcgaattgagcggcataacctgaatctgaggcagcacctggcacggctgggacggaagtcgctgtcgttctcaaaatcggtggagctgcatgacaaagtcatcgggcattatctgaacataaaacactatcaataa

SEQ ID NO: 143219 - DNA, 2100 bp, Homo sapiens
ttacccccggatgaagcagggcacagggtctccgggcttgagctggcttagccacgtggagcagactccatagtgcagggggcccagcccatcctgagtcctgtatgccagcacagctacagtgaggtggatctctcctgggtgggtgctgggtgccgagctgactgagtagtaccggggctggagcagaggcagctgggtgaggagcagtggggcaggcagcgccaccgacgggaactgctccagcacctccagcagcgtggggcagcggaaccacttccactcctcgtagcgtcggggatcctggctgagggcctccagctcctgctgttccctgggctcttctgccaaggtgctgagcagccgcaagagctgagggctgggtggggaggtgatgtccaggaagaaggtgagagcctggcgcagcgtgcacgggggcagccgggggtcccgcacccagccggggggagggccaccagggctgcccttctccagctgctctactgccacgggctcagtgggcgccggcgggtcctccacgcggctcagcagcgcctccacaaggccgggccggttgggcgggcagacacctatgtggtcccccggctggtactgcagcccctcctggcctccggtgtccaggcgcaccaggatggtggccctcgtggacttgctgctttgcaggttttccactgagcggattgtagcctggaacatcttccgcctgtgcacgtggatcagacctggcagcaactgcaggccctcggcctgggcgctcagccggtacctctggcgcttccagctccgtttggggctgaagatgtctcgggcggcggccttggcatcctctcccacacagaaggtctcacaggcggcctggaaggcagcctgggcccagcctcggaaggcctcctcctggccgcacagctcgtcgccctggcccagctgcagcagccgctccccgcccagttcctccagccgtgtgtccacggcacgagcaaaggcgcagaagtgggggtatgcccgggagccgagcccgaacacacagaacctgagggtgcccagggcccctgcactgtctgtgttactggactccttcctcttccgccgccaagaggacaccagtgggtctgagcaggagatgctgttgaagcggatcttataactcttgtgctgttccggccgaggggagctgttgtaggggccggacatctccatcagggcagctgcaaagctctctccattctccgggggatccccattcccaaatgtgctggttaccaccagcaccagcgtctcgtgttcgagggacaccacgtcatactcatccatacacaggacccggggatcaaaagccttccggaagagtctccccagctgctgtgcgtagctctgggcccggccggtctcggagccatacaggattgtcgccttcactcgcttcgccatcaccgtgcccatgagcgaggcggagatcttcacggcgctaaaggcgttagtgctgatccagagttgcgtattaaggtcgtgaaagctgtgatcgagcagcacatgtcccttaatcaggctgctgctcactttatgcttgctggtagtggttctgtagccaggtggctgaaggtcgatgttactgaatttgcagtcaatgggcgcaagctgtatttgtctccagtaatagatctcttcaacaacgaagttatttcttacagcctttcggaaagaccagtgatgaacatggttgagaatatgctcgatcaggcattcaaaaagcttaatcctcacgagcatcctgttctgcactttggccacttctttaaaggtcttcttcctggtgatgccggtgcccttggcggcactccccttccaggggtctggctggtagcggaaggccggggacaggaaatagttgaccatctcctgatggaaaacaggagtgaggctgcccgagatggggggcacgatccaggcccagtctgcagggcagccccccctggccttctgctcattctccaggtgcttcatgaaagaggccgtggcggcgtggtggtccacgatggtgactttggctagctttcctgtcctgatcttggaaacagccat

SEQ ID NO: 143220 - DNA, 1389 bp, Homo sapiens; identical to SEQ ID NO: 138594

SEQ ID NO: 143221 - DNA, 2019 bp, Homo sapiens
ctaacttcctgagcggtcacagatgggaataggtggtgtagagcgtggtcgaaccgttgatatgcgccttactggtaaagcgattaccgttgatttcagtctgcaccggcaggagtttatgcacctgatattccgattcgccggagtcagcagatcccaggtggcgcgcactttgccaaaggtgactttcaggccatcacgggtggcgctgattttgcgctgatagtcagggtattcgccagcaatggttttatcggaaagcggtttcccttctttcgcttccagtttttccagcagttcgccgtcccacaccagatccagcggtttattgctggtgattttggtttccagtagtgacgtgcgcggcgtggcgaagcgcagagtcatttcgacttgcacatcttttgctgtcagtttttgcaccagcgcaccgggaatactgtatgcctccagcgtaaagtcgactttcttgccgtcctgccagacggtcaggcggtcgaaattgctggccataaagttgatgtactcttccgtcagcagcgcaacgcccggaaagccgcccatggtgttagggccgtctggcaacagatgaccatgccaggctccgagatcgaaaaacggattaaaacgctggtgatcgtcgtaatcgtaatccttcatgtactgcggcgcgccagtacggttaatcacgtttttataattgtcggcgttagcggcatgggcggaaaaacttatcagcagagcgcaacgggcttccagaatatcgaaactgtaatccggatcatcggccatcagtgtttttagcggctggacgatgttttgctccgaccatgtgtcatgacgccagcgaataaacgtcccgccgccgcgtcgactgagcagcacgccttcactcaccagttttgccagcgcgaggaagatcagcaccggtgcaccaataaacgcactgaccacagaaacgcgcagttcgccgggcacaatcacccgcccgatgatatcggcaaacagcagcagggcaggggtagcaattgttagtaaacggagaagcgaacataagtggacgtcaaggtagaaatggcgctcatagagaattcgtccagacccatccccagcaacagacgctgtagcacgttcatcgccagcaagctcaccacagtggccagtccatttgccttcagcatgagaagcatcaataacttgcttgatcaagttcagcacggacggtgacattggctggtaaaggtgtgaaatcatatcattaccacggtcaactgccagagtgtactgcgttaaatcattggtgccgatactaaagaaatcaacttctttggcttcgtcgcgcagttcctgtttgtagatttcgatctctttgcgcagtgcacgcacttcttcaacagagatgatcatcgggaacataatgcgcaatttaccgaaagccgaggcacgcaggatagcgcggagctgatcgcgcaggatctctctacgatccatcgcgatacggatagcgcgccagccgaggaacgggttctcttctttcgggaagttcatgtatggcagctctttgtcgccgccgatgtccatggtacgaacgataaccgcttgcgagccacacgcttcagccactgctttgtaagcagcaaactgttcttcttcagtgggcagtgcgtcgcggtccatgaacaggaactcagtacgatacagaccaacgccttcagcgccgttacgctctgcaccttcaacgtcacgaaccgtaccaatgttagcgcatacttctacctggtgaccgtccagcgtaatagctggcagatctttcagtttagcaagctctgctttttcagaagccacttgctcctgaacagcgcgcattttatcaataacttcgttggttggattgacgtaaacctgattatttacggcatccagaatcagatagtcgtcatttttagaatgaggtgttacgtgcagcggagaaaaagatctgaagagagtccagaaactcccaaaagaggttgacaccat

SEQ ID NO: 143222 - DNA, 1596 bp, Homo sapiens
atgagtcatcaacttagcttcgccgacagtgaattcagcaataagcgccgtcagaccagaaaagagattttcttgtcccgcatggagcagattctgccatggcaaaacatggtggaagtcatcgagccgttttaccccaaggctggtaatggccggcgaccttatccgctgggaaacatgctacgcattcactgcatgcagcattggtacaacctgagcgatggcgcgatggaagatgctctgtacgaaatcgcctccatgcgtctgtttgcccggttatccctggatagcgccttgccggaccgcaccaccatcatgaatttccgccacctgctggagcagcatcaactggcccgccaattgttcaagaccatcaatcgctggctggccgaagcaggcgtcatgatgactcaaggcaccttggtcgatgccaccatcattgaggcacccagctcgaccaagaacaaagagcagcaacgcgatccggagatgcatcagaccaagaaaggcaatcagtggcactttggcatgaaggcccacattggtgtcgatgccaagagtggcctgacccacagcctggtcaccaccgcggccaacgagcatgacctcaatcagctggcgcgaggagctggccgaggtggatgtggactggctgatcccgagcgccccggcaaggtaagaaccttgaaacagcatccacgcaagaacaaaacggccatcaacatcgaatacatgaaagccagcatccgggccagggtggagcacccatttcgcatcatcaagcgacagttcggcttcgtgaaagccagatacaaggggttgctgaaaaacgataaccaactggcgatgttattcacgctggccaacctgtttcgggcggaccaaatgatacggaaatcacgggacaatttccgtattggcatccggagagtcgacctgaaaagccggccgggttgccatgggaaattcaattcgcttgtagcaacaaaactgctgcagggcatgggtttccaaaaagttgcttggcggcccggttaccgacgttcagcgcccatcatcacccagagcgtggaggtcgatctgccagacgctactgaatcacaggcggtgagcagtaacgataatccgccagtgattgttgaagtgtctggtattggtcagtacaccgtggtggttgagaaagatcgcctggagcgtttaccaccagagcaggtggtggcggaagtgtccagccgtttcaaggccaacccgaaaacggtctttctgatcggtggcgcaaaagatgtgccttacgatgaaataattaaagcactgaacttgttacatagtgcggcagtgctgcatgtcatcttatttgcggcgctgatctggagttcgttcgatgagaatatagaagcttcagccggaggcggcggtggttcgtccatcgacgctgtcatggttgattcaggtgcggtagttgagcagtacaaacgcatgcaaagccaggaatcaagcgcgaagcgtttttatgaacggcgcttcctgaggattcttcatgttgcggataagtggcgttgccaaagacccccgatgtctgcaagcttaggggcgtga

SEQ ID NO: 143223 - DNA, 3789 bp, Homo sapiens
  misc_feature (1)...(3789): n = a,t,c or g
atgaaagtgacatttgagcagttaaaagcagcctttaatcgggtcttaatttcacgcggcgttgacagcgaaacggctgacgcctgtgcagagatgttcgcccgcaccaccgaatccggcgtttattctcacggcgttaatcgtttccctcgtttcattcaacaactggaaaacggcgatatcattcctgatgcccaacccaaacgtataaccagcctcggcgcaattgaacagtgggacgcccagcgttcgatcggtaacctgacagcgaaaaagatgatggatcgcgccattgaactggctgccgatcacggtattggtctggtggcactacgtaatgccaaccactggatgcgcggcggcagtaacggctggcaggcggcggaaaaaggctatattggcatttgctggaccaactccatcgccgtaatgccgccgtgggtgccaaaagagtgtcgcataggcactaacccgctgatcgtcgccattcgttccacgccgatcaccatggtcgatatgtcgatgattaagcatacattaccacaacgagccgctggcacagatagaaaactcgctatgtcgcgagaggcacaactgcttgagcgtcatggttatgccttcaatgagttggatcttggcaaacgcgagccggttaccgaggaagagaaactcttcgtagcagtatgccgtggcgaacgtgagccagtgacagaagcagaacgcgtgtggtccaagtatatgacgcgtattaagcgtccaaaacgttttcacaccctttccggcggtaaaccgcagccgggcaagaagattgtgattcgcccgctgccaggtttaccggtgatccgcgatttggtggtagacatgggacaattctatgcgcaatatgagaaaattaagccttacctgttgaataatggacaaaatccgccagctcgcgagcatttacagatgccagagcagcgcgaaaaactcgacgggctgtatgaatgtattctctgcgcatgttgttcaacctcttgtccgtctttctggtggaatcccgataagtttatcggcccggcaggcttgttagcggcatatcgtttcctgattgatagccgtgataccgagactgacagccgcctcgacggtttgagtgatgcattcagcgtattccgctgtcacagcatcatgaactgcgtcagtgtatgtccgaaggggctgaacccgacgcgcgccatcggccatatcaagtcgatgttgttgcaacatgaaaacgccggagtgaaaattctccggcgttttggccgtgaattactgctgcggaattgccggtacagccggaacttttttcgcttgatcttcctgataaccttccagcttcgctacctgagtcataaactcagttgccatatccaccggaatggtcagtttcgcatccagagatttaaccgaacgatctacttcctgcgccagcgtttgcggcgcttctttagtcgttgccggatctttcaggaacagcgacagattcagggcactttcaccctgatgtttttccatttaangggtctgaaatatgacgctaacaacatttacctggccactacctattctgaaacccagaatatgactgtatttgctgatcacttcgttgctaataaagcccaaaacttcgaagctgttgcacaatatcagttcgatttcggtctgcgtccgtccgttgcttacctgcaatctaaaggtaaggatcttggagtatggggcgatcaggacttagtcaaatatgttgatgtaggtgcaacctattacttcaacaaaaatatgtctactttcgttgattacaaaatcaacctgcttgacaaaaatgacttcactaaggaagggttcatcatgagtcatcaacttaccttcgccgacagtgaattcagcagtaagcgccgtcagaccagaaaagagattttcttgtcccgcatggagcagattctgccatggcaaaacatggtggaagtcatcgagccgttttatcccaaggcgggcaatggccgacggccctatccgctggagaccatgctgcgtattcactgcatgcagcattggtacaacctgagcgacggtgccatggaagatgccctgtacgaaatcgcctccatgcgtctgtttgcccggttatccctggatagcgccttgccggaccgcaccaccatcatgaatttccgccacctgctggagcagcatcaactggcccgccaattgttcaagaccatcaatcgctggctggccgaagcaggcgtcatgatgacccaaggcaccttggtggatgccaccatcattgaggcacccagctctaccaagaacaaagagcagcaacgcgatccggagatgcatcagaccaagaaaggcaatcagtggcactttggcatgaaggcccacattggtgtcgatgccaagagtggcctgacccacagcctggtcaccaccgcggccaacgagcatgacctcaatcagctgggtaatctgctgcatggagagaagcaatttgtctcagccgatgccggctaccaaggggcgccacagcgcgaggagctggccgaggtggatgtggactggctgatcgccgagcgccccggcaaggtaagaaccttgaaacagcatccacgcaagaacaaaacggccatcaacatcgaatacatgaaagccagcatccgggccagggtggagcacccatttcgcatcatcaagcgacagttcggcttcgtgaaagccagatacaaggggttgctgaaaaacgataaccaactggcgatgttattcaaatcaaagcagccatttgggccagggcacggatttgcggtaacggtgatcgagcacgcagaaccagcgccgtttgtcgctgatagccaaccggacgtgcggatctcggcgatcagcgcggcttcggtatcattgcttaaagggttaggggtctgggatgcagtacaggctatgcgttgccatccttaccgcagactggaaacgtgggagtgggaaacggcgcatgtggtgtttgacgccgctgaacttaagctaccgctgcttggctatatggtggaaaacactgtcctgcaacaggcgttgtggcaggcgctggacagctcgctgattgcgctgcatcgccatgatgatcttcaggagctggagctgaaaggcggtgaagtgattcgcgcgaacgtggtgattggtgccgacgggcaaattcgcaggtgcgagcttccatgcctgcaggtcttttgtttggtccatgacctgcctgtgctgtttgtgacgctggctgcgctggcccacccgattctgattaatcgcccgattgtggtgacgccgctgggaactcgcctgtgccgcccttcagaagtggtgctggaaattctgccagatgcgcaaaaaggcgcattctccaaggaagatggcgagaaagtggttgatgaagcggctgcgggcgttgaccagaacatcaatcagggcatcgacatcacgataaccaagattcactccctgccccgccagcggatggatggtatgcgcggcatcgcccaccagcgcaagccctggctgcacgtactgcaacgcatggcgacgcgtcagcggaaacgcaccagcggcaagcggtgtaacgtaacccagacgcgacgggaaatgcttcgcgatttccgcctggagctgtgccatattcatattctgcaactggcgaatacgcgccggagagttattcggggatcctctagagtcctgggcatggtggtgtgcacctatagtcccagctacttggaaggctga

SEQ ID NO: 143224 - DNA, 2460 bp, Homo sapiens
tcaccactggtaccgttgaccgatgcactggcgaatacgtggcaaaagcagttcccgcttgattacggcaaagtgcgactgtggggctcggtggagttgtcgggatcctctagagtcacctaagcaggcgctgctgccttgttgttgttgtcgtgctcggcgtgtggtggtcactttcttgtttgtgttgccgcttggtttgtaggtttccggtgtttgggcgtagtgctcttgggtgttgttgggcgggtcgctgctgtcggtggcgtgtttgcttcgtcggtgtgcctctgtgttttgtgtcgcgtgtttggttcgtggtgtattcctggtgtggcgtgttttcctgttggttttgcctttgtgttttggtgatttgtttcggttcgacggttcgtcttgtgtgctgtctgtttctttttggtgtagctgctgtattgtggtgtgtgtgttctcgttggcctcccgtgtcccccggcgcggtggtttccacgacagtgctttatgctgtgtgtccatcatccctatagcgcggcccaacatgccatacagaatgtagtaaaaagtatcgccattgatatataagttaattggcagccattcaaaaccgtcaattttctgcggcactgtgtttgggttagcgataatgccaatcaccgccattagcaccagcaacatttttccgccgacgttcttcacctgaatcagcggtgaaaccagataaatcaccgcaatcgcgaagaaaaaccacaagtggtaaaacactggcttttgcagcaggtttttcagcgctaactccatattgatggaggtaaacagcgcaatgtagagcagtgcgattgcgctataaaaaatcagacataagccgatacgcaagaaatggcgcggctgggcgctgcgttcgccaaaaaagagatagccggaaatcatgaaaaatagcggcacgctgacacgagaggcagaattcagaacattggcgatatcccatgtgacggggctaacactatgagcattggtcacataccaggtagtggtgtgaatcatcaccatcaggctacgcggccaaacgagaagtgggttaccgatgttactgaatttgcagtcaatgggcgcaagctgtatttgtctccagtaatagatctcttcaacaacgaagttatttcttacagcctttcggaaagaccagtgatgaacatggttgagaatatgctcgatcaggcattcaaaaagcttaatcctcacgagcatcctgttctgcactctgaccagggatggcagtatcgtatgagaagatatcaaaatatcccctttctcgcccagcagacgtaaaaatagcgaagactgtagcaggatgacaaaggtgccgccccaggccagcagcagagcaatcaccagatgccccatctgattcgggtactgatgagacaacaacatcagcgtggcgagaatagtcggcccggcgactaacggaattgccaaccccgccaagcccgggtgcggtgtcccgccggagaagagacgacaggtaaagggggcacgagtgaccggagggacgtgcaacaacactacatcatcccgccggcgagccgatgggcacacgccacggcgccagcacggctggaatgccccactcctgagttttgcaaacagcctgttggcagcttgccctttcaaatcaataagcggtatccagtgacgccactgcgtgacgggatgaacctggtagcaaaagagtatgttgctgctcaggacccagccaatccgggcgttcttgttctttcgcatattgcgcacatggtccagtaaacattcagtttgccgtctttcagcgcacggtcttgtgccaccgcgtgcagaccagatttttggcgcgtggtctgtttgttggcattcgtctttctcgataccgatcttcgcgtactcttccgatggcgttttgattgcctgtttaaggcccgctacgtactcgtaaagatcgttgaaggtaataccaagattgctttgcgatttattggtatagccgagatcgctcaaacgaagagaggtcgcatacggcaggtaatacataccgcactcggttttctcaaacggcagcgacgttggttttccttgcaggaaagaagaacaaatcgccggagatgcaccaaacagataaggaatgacccaaccgaaacgatagtaattgcggataacgcggaaatagcccgcagaaattttctctttggcatcagcgcccgagatatcaccgcacttcgcttgccagaatgccattggcaaagagaaattgtagtgcacgccggaaatggtttgcatcagcgcgccgtagcgatttttcagcccttcacgatacagcgttttaaagcgtccggtgttagaagtgccgtactgtgccagttcgatgtcctgaccttctgcgatgtagcatggcatacttaacggccacatccgctcatcgcccat

SEQ ID NO: 143225 - DNA, 1380 bp, Homo sapiens
atgcgtcgcctgacgctgcaggataatcctgctatcgcccgcgtcattcgtcaggtatccgccgaatacggtcttaccgctgataaaggctacaccgtcgccgatccgaatcttgacgagctgtatcaagtatatagtcagcctggccatgcatattgggtcgtcgatcagctcagggaggaaattattggtccagccaatgcccaggtctatagcaaggtggtcagtgggagtcagaatactatgcttggcccatttgggtcaagtgatcatctgacatcagtgaactacagagcagggtcagaaaaccgtaccgggagagaggcaatggccctgattgtggaatttatttgtgagctacctaacggcgtacatgcgcgtccggcaagccacgttgaaacgctgtgtaatactttttcatcacaaattgagtggcataacctgcgcactgaccgcaagggcaacgccaaaagcgcccttgcgctgattggcaccgatacgctggcgggcgataactgccagttactgatttccggggccgacgaacaggaagcgcaccagcgtttaagccaatggctgcgcgatgaattcccccactgcgatgcgccgctggcggaagttaaatctgacgaactggaaccactgccggtttcactgaccaatctgaatccgcaaattatccgcgcccgcaccgtgtgcagcggtagtgcaggcggcattctgacgccgatctcttctttagatctcgatgcgctggaggagcaatttgtctcagccgatgccggctaccaaggggcgccacagcgcgaggagctggccgaggtggatgtggactggctgatcgccgagcgccccggcaaggtaagaaccttgaaacagcatccacgcaagaacaaaacggccatcaacatcgaatacatgaaagccagcatccgggccagggtggagcacccatttcgcatcatcaagcgacagttcggcttcgtgaaagccagatacaaggggttgctgaaaaacgataaccaactggcgatgttattcacgctggccaacctgtttcgggcggaccaaatgatacaatattcgcttagccaatataccagtcctgtctctgatcttgatggcgtggactatccgaaaccttatcgcggtaaacataaaattctggtgatcgccgcggacgaacgttatttgccgaccgataacggaaaactgttctcgaccggtaaccatccgattgaaacgttgctgccgttgtatcatctccatgctgcaggtttcgaattcgaagtcggcgaccacttctccggtctgatgaccaagtttgaatactgggctataccgcacacagatgaaaacagtaactgccatctctcttga

SEQ ID NO: 143226 - DNA, 2550 bp, Homo sapiens
atgagaaagtacaacagccttgttgttgatatgaggaaggtttcagtggtttggatagaccaagctagccacaacattcccttaagccaaagccaaatccagatcaggcccttcaattctgtgaaggctgagagaggtgaggaagctacagaagaagagttggaagctaacacagctagcggctgtgcctctcgacttcacagctatcttctggctctccactgcttcactgtgcgcctttgtggtgtgccctctccccacctgtttgcctccagcactgcttctttgccagagtcacctggttgctgcatgcactcactggtcactaaatccccatgcggggatcctctagagcccgacgatgccaccttgtttaaacaaaatctcttctacttggagactctcaacaccaagcagaagctgtaccacaagaagatcttccggactgccatgctgttccagtttgtgaacgtgctgctccaggtcctggtccacaagtcccatgatcttctgcaggaggagattggcatcgccatctacaacatggcctcagtcgactttgatggcttctttgccgccttcctcccagagttcctgaccagctgtgatggtgtggatgccaaccagaaaagtgtgctggggcggaatttcaagatggatcgggtgtgcgagggaatcagttctctaagtcgactgcagaatgagctcagctatatcgagaagtttactgactttcttcggctctttgtgagtgttcacctaagaagaatcgagtcttactcccagttccctgtggtggagtttttgacacttttgttcaagtacacatttcatcaggatttagacatacaaccttcacaagcagtctttggcggcattgagtttacttacattctagtgaccctagtcattctaggcacgcagcgggtccccaagccgggctgcggccagggcgggcgcgccaactgccccaactcgggcgccaacgccacggccaacggcaccgccgcccccgccgccgccgccgccgccgccaccgcctacggggaacggcccacctggcggcgcgctgatacagctgggagaccggcgacgaacgcttccgcttcaggatttccacaccgtatcgaattaaaagcgggcaaaacaatcacgctggaagatggaaggcagattaacggcgcagattacttagctgctccagtgccaggtaaagcgctcgctattttcggcgataccggcccctgcgatgccgcacttgacctggctaaaggtgtcgatgtcatggtgcacgaagcgacgctggatataaccatggaagccaaagccaatagtcgcggccatagctctacacgccaggctgcgacactagcccgtgaggctggagtcggcaagctaatcattacccacgtcagctcgcgctatgatgacaaaggttgtcagcacctgttacgtgaatgcagagatttcaaggctacgcggccaaacgagaagtgggttaccgatgttactgaatttgcagtcaatgggcgcaagctgtatttgtctccagtaatagatctcttcaacaacgaagttatttcttacagcctttcggaaagaccagtgatgaacatggttgagaatatgctcgatcaggcattcaaaaagcttaatcctcacgagcatcctgttctgcactctgaccagggatggcagtatcgtatgagaagatatcaaaatatccttaaagaacatggtattaaacaaagcatgtccagaaaaggcaattgtctggataatgctgtggtggagtgtttctttggaaccttaaagtcggagtgtttttatcttgatgagttcagtaatataagcgaactgaaggatgctgttacggaatatattgaatactacaacagcagaagaattagcctgaaattaaaagcattagccgtggcgctggcgaacatcgacccgatcatcgaactgacgtcatgcgccgacgcctgcaagcgaactgcgctggttgctaatccgtggcagctgggcaacgtccgcgatgctcgaacttacaaagagctgctggatcagatcgcggaactgttgcgtattcttggtagcgccgatcgtctgatggaagtgatccgtgaagagctggagctggttcgtgaacagttcggtgacaaacgtcgtactgaaatcaccgccaacagcgcagacatcaacctggaagatctgatcacccaggaagatgtggtcgtgacgctctctcaccagggctacgttaagtatcagccgctttctgaatacgaagcgcagcgtcgtggcgggaaaggtaaatctgccgcacgtattaaagaagaagactttatcgaccgactgctggtggcgaacactcacgaccatattctgtgcttctccagccgtggtcgcgtctattcgatgaaagtttatcagttgccggaagccactcgtggcgcgcgcggtcgtccgatcgtcaacctgctgccgctggagcaggacgaacgtatcactgcgatcctgccagtgaccgagttggggatcctctag

SEQ ID NO: 143227 - DNA, 2112 bp, Homo sapiens
tcagacgaggtgccgataaacgcacccgccaccgaacgtgacgctatcaacatacagcgccttattcatattggggaatttaccgttaccatctattaagcccgctttatcagttacaccaattaatgttcctgatgaatcaaataggttgatcagcataaaggagaaaatgataccggcgagttcaagtgttaacgcgccgctcaaatctacttcaccaatgacgccgctaatatcaggcggaatggaatagacgccgctaaaatgaacatcaccgaaaaataatccacagcaagacgtcaccacaatagaaaccagcaccgcggcatgaaaatgacgtgatgacaacacggttataataaaaaaccctaaaatacctaacaacacgccgtgagaacttaaatcgccaatcatcaccagcgtgtctttattggcgacaataacgccagtattttttaatcccattaaggcgataaataatccaattccgctggtgataccaatacgtaaacttaagggaatgttggagatcatccagtaccggatacgaaacagcgtgagcaaaaatagtccaactgcgccccagaatattgcgcccatcccggtctgccaggagatgcccatcggccccacgatcacgaaggcaaagaaggcgttcaggcccattgccggagccagcgccacgggtaagttagcaaatattcccatcgcaatactggcgataccggcaatcaactgaaaatcaaaagcaaaggcttgatccgcggggacaaattgtgaacgtcccggcgcgtcgaataatccggcaaaaacggaagtgctgcaaagtagcaggatcagcgtaaagatgcgttgagccatgagaggtaatctgtgtctccgtgtgtaacaggtaaaaccagaagttccggggtttgatatggatgatgagacttcaggcattccagcagtgccttcccagtaatagagagaggtagcgccggggatcaaggtcgcgcaggccgccagtttttccgccagcactttggcggctaaatcctgggctgtcgcttcatctggtgccgtacatagcaccacgacagacgcggtattcgaacttttttcatcaagcataaacacccgggatgaagaacggatggttgaagacgaatttaccgatacgggtagtacccgtgtcatccatctgtaccgcagcaaccagcgtcgggtaggtcggcagaatgaacagaacagacaacgcagagaaagaagcaaagcgggcagcggggaaacgtcagtgccgggtacgatgcgaatggcccgatggcaaaggggttcccgaatctgtccgcgacaccagagttgcagacgtgaatgttcacgcacagcctgctggagcagcatcaactggcccgccaattgttcaagaccatcaatcgctggctggccgaagcaggcgtcatgatgactcaaggcaccttggtcgatgccaccatcattgaggcagcactcgagttcagtaccatcccagctgtcggcattaaagtaggccgtgacattctgtccttgctgaagagaagtcgcttcatttaccggcactgtggcgcacagtgtttgcccgtcgggtagcgccattaatacttcgcactgctctgcgccgcgctcaatatgactaataatacccggtaattggttgtcagcgttttgcgcgaccgcctcgtcctgagtaatacctacccacggcgcttttagcaatatcaacacttctttgccttcatccagccccagacgcgcgccgctttgtgcggtaattgcgactttcaggcgtgtttttccgtcagccagtaagacatcaacatgctgttgaacgtcatcatgatcgcgggcggtgatggtaccgaaccactggttacgggcgctggtttgcagtgaaaaacgtgagatcgcggccagcaggctgttcagcggcagggcgtcatcgtcacttaacacatcaaaggctttttgctggatttgcgccagtaagtcatagagctgaatcagtcgctgaccatagcgggtcagtactgcgccgacgacacctttaccgcctgttgcgcgctcgaccagaatatgctcacttaactgattcat

SEQ ID NO: 143228 - DNA, 1287 bp, Homo sapiens
atgggcaaatttgatgaaggtaaactgcccaccgatccacacctgatgctccgactggccattgaaactgttgctcatgactatgatgtcatagttattgacagcgcgcctaacctgggtatcggcacgattaatgtcgtatgtgctgctgatgtgctgattgttcccacgcctgctgagttgtttgactacacctccgcactgcagtttttcgatatgcttcgtgatctgctcaagaacgttgatcttaaaggtgaattcagcagtaagcgccgtcagaccagaaaagagattttcttgtcccgcatggagcagattctgccatggcaaaacatggtggaagtcatcgagccgttttaccccaaggctgctcacagagaacgaccttatccgctggaaaccatgctacgcattcactgcatgcagcattggtacaacctgagcgatggcgcgatggaagatgctctgtacgaaatcgcctccatgcgtctgtttgcccggttatccctggatagcgccttgccggaccgcaccaccatcatgaatttccgccacctgctggagcagcatcaactggcccgccaattgttcaagaccatcaatcgctggctggccgaagcaggcgtcatgatgactcaaggcaccttggtcgatgccaccatcattgaggcacccagctcgaccaagaacaaagagcagcaacgcgatccggagatgcatcagaccaagaaaggcaatcagtggcactttggcatgaaggcccacattggtgtcgatgccaagagtggcctgacccacagcctggtcaccaccgcggccaacgagcatgacctcaatcagctgggtaatctgctgcatggagaggagcaatttgtctcagccgatgccggctaccaaggggcgccacagcgcgaggagctggccgaggtggatgtggactggctgatcgccgagcgccccggcaaggtaagaaccttgaaacagcatccacgcaagaacaaaacggccatcaacatcgaatacatgaaagccagcatccgggccagggtggagcacccatttcgcatcatcaagcgacagttcggcttcgtgaaagccagatacaagggccaaattgacatagtgagcatacaccaacctccaagtatctctctacgcaaaaaggatgtagcatactactgcagatctgctggctcagatgaaagaatccgcccgaagcaattgatttactctttacaccttcggaggatcttccggaccgttctggggctgtacctcatgtcttga

SEQ ID NO: 143229 - DNA, 1122 bp, Homo sapiens
gaaatagacgcagctgcgtggatcgccttctccaccccacatactgaagccagaataagccacgacttcgtgtgctccacgcgagggccgcctgacgccagagtttctcccgcatctgccatcagaggaccgtcgccctcaggagcccgagctcccgcggatgcccacgatgggcgcttgttcacctcagtctcggtacccaaaagtatccaagcggcattcaaattctgcccctactgtggaaattctttgcctgtagaggagcatgtagggtcccagacctttgtcaatccacatgtgtcatccttccaagaacttgcacagaaaacacaagacataatcatttaccataacacccgcatagagaacgaacgagcacagacgaacaacgcatgcccaacccatataaaccgggagcatcatagcaataaagtggccgtcgacattcgcttgatcaactgtgatctgcctgcttctgacaacggtagcggaatgccggtgatgattgtggatgatcatccacttatgcgacgcggtgttcgtcagttactggagcttgatcctggctctgaagtggtcgccgaagcgggcgacggcgcgagcgctatcgatctggcgaatagactggatatcgacgtgatcttgctggatctcaatatgaaaggtatgagtggcctggatactctcaatgccttgcgcagggatggcgttaccgcgcaaattattatcctgaccgtatccgatgcctccagcgatgtctttgcgctgatagacgcaggcgcagacggttatctgttgaaagacagcgacccggaagtattgctggaagcgattcgtgccggagcgaaaggcagcaaagtctttagcgaacgcgtcaatcagtacttacgtgaacgtgaaatgtttggcgcggaagaagatcccttcagcgtgctgacggagcgcgagctggatgttctgcacgagctggcacaggggctgtcaaataaacagattgcctcggtgttgaatatttccgagcagacagtaaaagtacatattcgcaatctgctgcgtaaactcaatgtccgctcacgcgtggcggccaccattctgttcctgcaacaacgcggggcacaataa

SEQ ID NO: 143230 - DNA, 1384 bp, Homo sapiens
agcaaactgggtgcggcgatggtgattgttgccgcctggtgcgtggaagattatcaggtgattcgtctggcaggttcactcaccgcacgggctacacgcctggcccacgaagcgcagctggatgtcgccccgctggggaaaatcccgcacctgcgcacgccgggtttgctggtgatggatatggactccaccgccatccagattgaatgtattgatgaaattgccaaactggccggaacgggcgagatggtggcggaagtaaccgaacgggcgatgcgcggcgaactcgattttaccgccagcctgcgcagccgtgtggcgacgctgaaaggcgctgacgccaatattctgcaacaggtgcgtgaaaatctgccgctgatgccaggcttaacgcaactggtgctcaagctggaaacgctgggctggaaagtggcgattgcctccggcggctttactttctttgctgaatacctgcgcgacaagctgcgcctgactagctcgcgcctgccggaccgcaccaccatcatgaatttccgccacctgctggagcagcatcaactggcccgccaattgttcaagaccatcaatcgctggctggccgaagcaggcgtcatgatgactcaaggcaccttggtcgatgccaccatcattgaggcacccagctcgaccaagaacaaagagcagcaacgcgatccggagatgcatcagaccaagaaaggcaatcagtggcactttggcatgaaggcccacattggtgtcgatgccaagagtggcctgacccacagcctggtcaccaccgcggccaacgagcatgacctcaatcagctgggtaatctgctgcatggagaggagcaatttgtctcagccgatgccggctaccaaggggcgccacagcgcgaggagctggccgaggtggatgtggactggctgatcgccgagcgccccggcaaggtaagaaccttgaaacagcatccacgcaagaacaaaacggccatcaacatcgaatacatgaaagccagcatccgggccagggtggagcacccatttcgcatcatcaagcgacagttcggcttcgtgaaagccagatacaaggggttgctgaaaaacgataaccaactggcgatgttattcacgctggccaacctgtttcgggtggaccaaatgatacaagcccgcatcaacgccatgctggagggattagcacagaaaaaggatttgatatttgtgcgcaacggtgatgaacatacctgctatgaagcggtttctcatctgcgtctgaagctcggcaatacccgtaaccgcattgacactgccgagcagtttattgataaggttgcttcgtcgtcatcgattactgggaagccgtatattgtgaagatccccg

SEQ ID NO: 143231 - DNA, 2802 bp, Homo sapiens
ttattgatagtgttttatgttcagataatgcccgatgactttgtcatgcagctccaccgattttgagaacgacagcgacttccgtcccagccgtgccaggtgctgcctcagattcaggttatgccgctcaattcgctgcgtatatcgcttgctgattacgtgcagctttcccttcaggcgggattcatacagcggccagccatccgtcatccatatcaccacgtcaaagggtgacagcaggctcataagacgccccagcgtcgccatagtgcgttcaccgaatacgtgcgcaacaaccgtcttccggagactgtcatacgcgtaaaacagccagcgctggcgcgatttagccccgacgtatccccactgttcgtccatttccgcgcagacgatgacgtcactgcccggcgggttgagaagcggtgtaagtgaactgcagttgccatgttttacggcagtgagagcagagatagcgctgatgtccggcggtgcttttgccgttacgcaccaccccgtcagtagctgaacaggagggacagccgcggttttaagcgaatcgatggagactgcgccgacaaacttattaccgcgttcgataacgtagccatattcgcgatcttcatcctgcaataatttcagtgccgaacgtgggccgaagccaggggttttacgaattaagccattcggtgtccggcgggcaatatctttcgcactgaatacctgactaatatcaacgccacggaagaaggtacggacataatcattcgccggctttagagcagggcgatgagcatcgcaggtgtgtgtctccggcttaaacgagactgatccatcttgatgtctcctcaacgcggaatattgactgtgtatcatttggtccgcccgaaacaggttggccagcgtgaataacatcgccagttggttatcgtttttcagcaaccccttgtatctggctttcacgaagccgaactgtcgcttgatgatgcgaaatgggtgctccaccctggcccggatgctggctttcatgtattcgatgttgatggccgttttgttcttgcgtggatgctgtttcaaggttcttaccttgccggggcgctcggcgatcagccagtccacatccacctcggccagctcctcgcgctgtggcgccccttggtagccggcatcggctgagacaaattgctcctctccatgcagcagattacccagctgattgaggtcatgctcgttggccgcggtggtgaccaggctgtgggtcaggccactcttggcatcgacaccaatgtgggccttcatgccaaagtgccactgattgcctttcttggtctgatgcatctccggatcgcgttgctgctctttgttcttggtcgagctgggtgcctcaatgatggtggcatcgaccaaggtgccttgagtcatcatgacgcctgcttcggccagccagcgattgatggtcttgaacaattggcgggccagttgatgctgctccagcaggtggcggaaattcatgatggtggtgcggtccggcaaagcgctatccagggataaccgggcaaacagacgcatggaggcgatttcgtacagagcatcttccatcgcgccatcgctcaagttgtaccaatgtttgttgcccccctcgcttttcgcttcgcgtaaggctttatctgcttccgtcatgacaagcgagatattacgcgtgtcacccgttgaaaaaaccgtgccaatactgatggtcatttgttcaggaacatcatatctgttactaaagccggtcaggagttcgacatttttacgcatacgttccgcaatgatttttgcctgggcactattgagttcggtaaatagcaagccaaacacctcaccctccagtcgcgctaaaatatcatcggggcggatgctttgctggataatatcgacaattgaaaccagcactttatcacccacacgatgtccccattgggcattgatgcgtttgaactgattaatatcaaccagcatgacacagaagtccttaacaacaggtcgcgacaataatgactctacgctgttgaaaaagtagcgccgattataaatattggtcagcacatcatgaactgccagtttgctggagagttgcagctcgtgttgctgtcggggatcagcacggaagcggcagctgcgttcaatccgcaaatgcacgtcagtgtaattgataactggtattttatggccagctccgtagtcgtactgacgattgttggcggcctcttcgataacccacacgctgacgctgccgccgttgcaaaagaaggttgcttcgccgttttcgtcggtcactactctctcttgccggttccccagaaaatcacgccaggttttattgccgtaattctctcccagatgaatggttttttcgccatcatccccgttcgacatgaccaccacgcagccgggaaattcgtcggtgccactgcggctaaaggcaatgcagttcggatggtcgaaaaataacgtctgtacaccgtgggcgaaacgctgacgggcgagaattaactcatcaagctgttcgattattggcatatctatcggataggtttgcccggcaccaccgacatcttcgtaatgcgcaccgtagaggtccggatagaataccgaaggaacgccattttcccgcaacaaaattaaggcatacgccagcggtttaaaccacggttcgaccggcgcttcgagggcttgcaacggttgggtgtcgtgattggcaacgagcgtcacggcgtggaaaggatcggcttccactaatgtacccgtgaaaatctgcgtcat

SEQ ID NO: 143232 - DNA, 2145 bp, Homo sapiens
atgtgggggaccgtgattgtcggcctgaccaacgtacttgccacctttatcgcaatcggccttgttgaccgctggggacgtaaaccaacgctaacgctgggcttcctggcgatggctgctggcatgggcgtactcggtacaatgatgcatatcggtattcactctccgtcggcgcagtatttcgccatcgccatgctgctgatgtttattgtcggttttgccatgagtgccggtccgctgatttgggtactgtgctccgaaattcagccgctgaaaggccgcgattttggcatcacctgctccactgccaccaactggattgccaacatgatcgttggcgcaacgttcctgaccatgctcaacacgctgggtaacgccaacaccttctgggtgtatgcggctctgaacgtactgtttatcctgctgacattgtggctggccgttatgcgtcgcctgcgggaaaaactcgcccaggccaacctgaagctagggcgtaactacccggagccaaaactctcttacacccagcgcggaacctccgccggaacggcctggctggaaagctatgaaattcgcctcaatcccgttttgctgttggaaaacagtgaagcttttattgaagaagtgtctggtaatggccggcgaccttatccgctggaaaccatgctacgcattcactgcatgcagcattggtacaacctgagcgatggcgcgatggaagatgctctgtacgaaatcgcctccatgcgtctgtttgcccggttatccctggatagcgccttgccggaccgcaccaccatcatgaatttccgccacctgctggagcagcatcaactggcccgccaattgttcaagaccatcaatcgctggctggccgaagcaggcgtcatgatgactcaaggcaccttggtcgatgccaccatcattgaggcacccagctcgaccaagaacaaagagcagcaacgcgatccggagatgcatcagaccaagaaaggcaatcagtggcactttggcatgaaggcccacattggtgtcgatgccaagagtggcctgacccacagcctggtcaccaccgcggccaacgagcatgacctcaatcagctgggtaatctgctgcatggagaggagcaatttgtctcagccgatgccggctaccaaggggcgccacagcgcgaggagctggccgaggtggatgtggactggctgatcgccgagcgccccggcaagaaccttgaaacagcatccacgcaagaacaaacggccatcaacatcgaatacatgaaagccagcatccgggccagggtggagcacccatttcgaatcatcaagcgacagttcgtcttcggccggataaggcgtttacgccgcatcaggcatctgagcatgatgcctgatgcggcgctggtcgcgtcttatcaggcctacgactttctccgcatccggcataaacaacgagcttcagctaaacagcccaatcattgcggcacacagcacggcagcaacggcagtttgcgcgcgggcggtaaacgggtcgagggccagattaaactggtcttcccagcgaaattcgaagcgggctttcgacatggcgttatcgcgaatttgcgcgcccggatgccctttcgccaggtcagcggcgtgggcagcaatcttatagcgggtgtggcgaaacacgttggtgcacgcaatgtggtgatcactgatgttaacgaataccgccttgagctggcgcgtaaaatgggtatcacccgtgcggttaacgtcgccaaagaaaatctcaatgacgtgatggcggagttaggcatgaccgaaggttttgatgtcggtctggaaatgtccggtgcgccgccagcgtttcgtaccatgcttgacaccatgaatcacggcggccgtattgcgatgctgggtattccgccgtctgatatgtctatcgactggaccaaagtgatctttaaaggcttgttcattaaaggtatttacggtcgtgagatgtttgaaacctggtacaagatggcggcgctgattcagtctggcctcgatctttcgccgatcattacccatcgtttctctatcgatgatttccagaagggctttgacgctatgcgttcgggccagtccgggaaagttattctgagctgggattaa

SEQ ID NO: 143233 - DNA, 2466 bp, Homo sapiens
atgatgaataacggcggaagcatggacgctgcggcggtcatattaataatagtattcatcagatcctgcacggtattggaaccgagcatcgggataatcatcagcgggatgacgatcaggaactggatccacgctgcgcgcgccggaacgccgttttcgttcagttcgacggttttcttaccaaagatgccttccgggatttcggagaagaaaattttcaccggcgttgcggtccacatcagcagggaaccgaacatcgcggtaaaggacaccagaccgacaagcgattcatcaacgcttccggtagaccaaatacgccgccatgccgtggaatacctgcaccgatccgccggcgctgtatcgcgacatattgatcctgttcgtatgtttatgggcgacacttcgttcctgcttaatgcactggtgctgaatgttggcgactatgtgaatcgctttatgggcatgacgctcaacagttttgccttcgaccgtccggttgagtggatgaataactggacgctcttcttctgggcatggtgggtggcatggtcgccgtttgtcggcttgttcctggcgcgtatctcgcgtgggcgtaccattcgccagttcgtgctgggcacgttgattattccgtttaccttcacgctgttatggctctcggtgttcggcaatagcgcgctgtatgaaatcatccacggcggcgcggcatttgccgaggaagcgatggtccatccggagcgcggcttctacagcctgctggcgcagtatccggcgtttacctttagcgcctccgtcgccaccattactggcctgctgttttatgtgacctcggcggactccggggcgctggtgctggggaatttcacctcgcagcttaaagatatcaacagcgacgcccccggctggctgcgcgtcttctggtcggtggcgattggcctgctgacgctcggcatgctgatgactaacgggatatccgcgctgcaaaacaccacggtgattatggggctgccgttcagctttgtgatcttcttcgtgatggcggggttgtataaatctctgaaggtagaagattaccgccgtgaaagtgccaaccgcgataccgcgccgcgcaaccgcaactcctgcgccacttcttccatttacaatcgagctcggtaccggaagtatcgagcccattggtacaacctgagcgatggcgcgatggaagatgctctgtacgaaatcgcctccatgcgtctgtttgcccggttatccctggatagcgccttgccggaccgcaccaccatcatgaatttccgccacctgctggagcagcatcaactggcccgccaattgttcaagaccatcaatcgctggctggccgaagcaggcgtcatgatgactcaaggcaccttggtcgatgccaccatcattgaggcacccagctcgaccaagaacaaagagcagcaacgcgatccggagatgcatcagaccaagaaaggcaatcagtggcactttggcatgaaggcccacattggtgtcgatgccaagagtggcctgacccacagcctggtcaccaccgcggccaacgagcatgacctcaatcagctgggtaatctgctgcatggagaggagcaatttgtctcagccgatgccggctaccaaggggcgccacagcgcgaggagctggccgaggtggatgtggactggctgatcgccgagcgccccggcaaggtaagaaccttgaaacagcatccacgcaagaacaaaacggccatcaacatcgaatacatgaaagccagcatccgggccagggtggagcacccatttcgcatcatcaagcgacagttcggcttcgtgaaagccagatacaaggggttgctgaaaaacgataaccaactggcgatgttattcacgctggccaacctgtttcgggcggaccaaatgatactttcaccttccatgatacacagatcaaaagctgtaccctgcttgatggctcaagattcctatatagtcttctttgtccgcagattattaattaacactttactatgccaaacacatgcattacagatcccaccgacagtcagagaagggtgtgaacagaacacagcagaaatgtcattgttgcaccagctccatgccaggcgctgggggagattcaatggtgtacaagacctagccctgattcacaaggcccctgacctaatggtgagctggagctacgcgtacaaggcaagagccttaaccttcatcacccccaagtggatggtctccattttccaagctggcagctcaccccctctctctgtgcctctgctgctgcggtccacacacctggaatgccctctgcaccctgcacacggcatcccccctccttcaagcatcgctgctcatctgaaatatggagacaaaaatgccttcctatccacctcacagcgcaggaataagccccaaatagaaaaggtggatgggaaagattga

SEQ ID NO: 143234 - DNA, 1846 bp, Homo sapiens
cgttttcaatcgcatcaccgaagcgcgggtctacgcggcagaccaattgtttgccaccctcgacgcgacgttgcggcgtattgacgttgcagatgtcggtgaaaccgtacttgcagataccgtagggtttattcgccacctgccgcacgattgacgtatcatttgggtccgcccgaaacaggttggccagcgtgaataacatcgccagttggttatcgtttttcagcaaccccttgtatctggctttcacgaagccgaactgtcgcttgatgatgcgaaatgggtgctccaccctggcccggatgctggctttcatgtattcgatgttgatggccgttttgttcttgcgtggatgctgtttcaaggttcttacctcggccagctcctcgcgctgtggcgccccttggtagccggcatcggctgagacaaattgctcctctccatgcagcagattacccagctgattgaggtcatgctcgttggccgcggtggtgaccaggctgtgggtcaggccactcttggcatcgacaccaatgtgggccttcatgccaaagtgccactgattgcctttcttggtctgatgcatctccggatcgcgttgaattctttcatgcctgcaggtcgttttatcggaaagcggtttcccttctttcgcttccagtttttccagcagttcgccgtcccacaccagatccagcggtttattgctggtgattttggtttccagtagtgacgtgcgcggcgtggcgaagcgcagagtcatttcgacttgcacatcttttgctgtcagtttttgcaccagcgcaccgggaatactgtatgcctccagcgtaaagtcgactttcttgccgtcctgccagacggtcaggcggtcgaaattgctggccataaagttgatgtactcttccgtcagcagcgcaacgcccggaaagccgcccatggtgttagggccgtctggcaacagatgaccatgccaggctccgagatcgaaaaacggattaaaacgctggtgatcgtcgtaatcgtaatccttcatgtactgcggcgcgccagtacggttaatcacgtttttataattgtcggcgttagcggcatgggcggaaaaacagtagaaatattgcatcaggaagatttggtcgctgggatcgtgagaggcatttttcatgtagaagcggctatcaaaagccgtggcgaaacgtccgccgccgtattcgtaccagataccaaactgcatgacagacgtggtttcatcgtcagcgtggtcagggccacgtttggcgtaagtgtaagcgggggaatcagcttcatcttcaggtgactctagaggatcccccaggaatgatctgtggcgctttgcagaagccagtggcgtgggccccggggacagttccttggaggagaactccctggccgagtcacctggagaaacgggcttatcttgggcttcagctcgtgagtcgaggaagggctggggtcctgcaccatcccccggggtgggcatatggtccccagagtccccggctctggctgggcccatagatttgctctctctcccaggctggttggtggaggcatcagagctagcttccgccgcagcctggcacctcaggtgccgaccttctacctgccctacttcctggaggccggcctggaggcggcagccttggtcttcctgctcctgacggcagattgctgtggacgccgccccgtgctgctgctgggcaccatggtcacaggcctggcatccctgctgctcctcgctggggcccagtgtgagcttggggccccgcaggccatacaggagccattgtgtttgggccgacggtctgccacaccagggggccat

SEQ ID NO: 143235 - DNA, 2016 bp, Homo sapiens
atgagcagctcctatgagtcctacgatgaagaggaggaggaagggaagagcccgcagccccgacaccagtggccctcagaggaggcctccatgcacctggtgagggaatgcaggatatgtgccttcctgctgcggaaaaagcgtttcgggcagtgggccaagcagctgacggtcatcagggaggaccagctcctgtgttacaaaagctccaaggatcggcagccacatctgaggttggcactggatacctgcagcatcatctacgtgcccaaggacagccggcacaagaggcacgagctgcgtttcacccagggggctaccgaggtcttggtgctggcactgcagagccgagagcaggccgaggagtggctgaagcatctaaaggcttccagcaagcctgacaagaaagcggacgttaaaaggcgtattagtgagatttatcacgagaatagaggccgatacggataccgtagggtaacgctgtctcttcatcgagaagggaaacagattaaccataaagctgttcagcgcctgatgggaaccctctcacttaaagcagcgattaaggtcaagcgataccgctcttacagaggagaggtagggcaaaccgcccctaatgttctccaaagagatttcaaggctacgcggccaaacgagaagtgggttaccgatgttactgaatttgcagtcaatgggcgcaagctgtatttgtctccagtaatagatctcttcaacaacgaagttatttcttacagcctttcggaaagaccagtgatgaacatggttgagaatatgctcgatcaggcattcaaaaagcttaatcctcacgagcatcctgttctgcactctgaccagggatggcagtatcgtatgagaagatatcaaaatatccttaaagaacatggtattaaacaaagcatgtccagaaaaggcaattgtctggataatgctgtggtggagtgtttctttggaaccttaaagtcggagtgtttttatcttgatgagttcagtaatataagcgaactgaaggatgctgttacggaatatattgaatactacaacagcagaagaattagcctgaaattaaaagcccctaatatgtcaaagccaaaatacccttttgaaaagcgccttgaagtcgtgaatcactacttcacaactgatgatggttacaggatcatctcggcacgttttggtgtcccccgaacccaggtcaggacatgggttgccctctatgaaaaacatggagaaaaaggtttaattcccaaacctaaaggcgttagtgctgatccagagttgcgtattaaggtcgtgaaagctgtgatcgagcagcacatgtcccttaatcaggctgctgctcactttatgcttgctggtagtggttctgtagccaggtggctgaaggtctatgaagagcgcggagaagctggtttacgcgcgctcaagattggcaccaaaagaaacattgcaatatcagttgatccagaaaaagcggcatcagcattggagctgtcaaaagaccgacgcattgaggatcttgaaaggcaagttcgatttcttgaaacgcggcttatgtatctaaaaaagctgaaagccttagctcatcccacgaaaaaggctgcggagataccgcgcagtacgttttattatcatctaaaggctctcagcaagcctgacaagtatgcggacgttaaaaagcgtattagtgagatttatcacgagaatagaggccgatacggataccgtagggtaacgctgtctcttcatcgagaagggaaacagattaaccataaagctgttcagcgcctgatgggaaccctctcacttaaagcagcgattaaggtcaagcgataccgctcttacagaggagaggctgggaagtctgagatcaaggtggcagccaatttggtgtctggtgagggcctgtttcctggtgatgaccatctttttgctccctggggtctctttcctaagggcactaatcctacccatgagggctccaccctcgtgacctaa

SEQ ID NO: 143236 - DNA, 2201 bp, Homo sapiens
atgaaactcatggaaacacttaaccagtgcataaacgctggtcatgaaatgacgaaggctatcgccattgcacagtttaatgatgacagcccggaagcgaggaaaataacccggcgctggagaataggtgaagcagcggatttagttggggtttcttctcaggctatcagagatgccgagaaagcagggcgactaccgcacccggatatggaaattcgaggacgggttgagcaacgtgttggttatacaattgaacaaattaatcatatgcgtgatgtgtttggtacgcgattgcgacgtgctgaagacgtatttccaccggtgatcggggttgctgcccataaaggtggcgtttacaaaacctcagtttctgttcatcttgctcaggatctggctctgaaggggctacgtgttttgctcgtggaaggtaacgacccccagggaacagcctcaatgtatcacggatgggtaccagatcttcatattcatgcagaagacactctcctgcctttctatcttggggaaaaggacgatgtcacttatgcaataaagcccacttgctggccggggcttgacattattccttcctgtctggctctgcaccgtattgaaactgagttaatgggcaaatttgatgaaggtaaactgcccaccgatccacacctgatgctccgactggccattgaaactgttgctcatgactatgatgtcatagttattgacagcgcgcctaacctgggtatcggcacgattaatgtcgtatgtgctgctgatgtgctgattgttcccacgcctgctgagttgtttgactacacctccgcactgcagtttttcgatatgcttcgtgatctgctcaagaacgttgatcttaaagggttcgagcctgatagtttgactcttttcattggcatagccatcctatgctgtgctgtgaccgtggccaacacaaggaaaatccacaaagtcgtggacccatttcatgccagtgaattcagcagtaagcgccgtcagaccagaaaagagattttcttgtcccgcatggagcagattctgccatggcaaaacatggtggaagtcatcgagccgttttaccccaaggctggtaatggccggcgaccttatccgctgggaaccatgctacgcattcactgcatgcagcattggtacaacctgagcgatggcgcgattggagattgtctgtacgaaatcgcctccatgcgtctgtttgcccggttatccctggatagcgccttgccggaccgcaccaccatcatgaatttccgccacctgctggagcagcatcaactggcccgccaattgttcaagaccatcaatcgctggctggccgaagacaggcgtcatgatgactcaaggcaaccttggtcgatgccaccatcattgaggcacccagctcgaccaagaacaaagagcagcaacgcgatccggagatgcatcagaccaagaaaggcaatcagtggcactttggcatgaaggcccacattggtgtcgatgccaagagtggcctgacccacagcctggtcaccaccgcggccaacgagcatgacctcaatcagctgggtaatctgcttcatggagagaagcaatttgtctcagccgatgccggctaccaaggagcgccacagcgccgaggagcttgccgaggtggatgtggactggctgatcgccgagcgccccggcaaggtaagaaccttgaagcagcatccacgcaagaacaaaccgcccatcaacatcgaatacatgaaagccagcatcccgggccaggggtggagcacccatttcgcatcatcaagcgacagttcggcttcgtgatagccagatacaaggggttgctgaaaaacgataaccaactggcgatgttattcacgctggccaacctgtttcgggcggaccaaatgataccattggcatcaactgttgagtatggtgagacagttgatggtgttgtcctggaaaaagatatccagctggtttatgggaccgccaataatacgaaaatcaatcctggcggagaacagcatataaaagaatttggtgtaagtaataatactgaaattaacggagggtatcagtacattgaaatgaatggcgccgcagaatactcagtattaaatgacggttatcaaattgttcaaatgggtggcgcggcaaaccagactacgctcaataatggtgtgctacag

SEQ ID NO: 143237 - DNA, 1029 bp, Homo sapiens
catttcagcggtggctaccgcaacggcatcgtcaaaacgctgatgcgcgggcagcggcgcttctggcagcatttgctgcaagcggtcgttgtccagggtagccgacataattcgactctgaggatcccaaagcgtattagtgagatttatcacgagaatagaggccgatacggataccgtagggtaacgctgtctcttcatcgagaagggaaacagattaaccataaagctgttcagcgcctgatgggaaccctctcacttaaagcagcgattaaggtcaagcgataccgctcttacagaggagaggtagggcaaaccgcccctaatgttctccaaagagatttcaaggctacgcggccaaacgagaagtgggttaccgatgttactgaatttgcagtcaatgggcgcaagctgtatttgtctccagtaatagatctcttcaacaacgaagttatttcttacagcctttcggaaagaccagtgatgaacatggttgagaatatgctcgatcaggcattcaaaaagcttaatcctcacgagcatcctgttctgcactctgaccagggatggcagtatcgtatgagaagatatcaaaatatccttaaagaacatggtattaaacaaagcatgtccagaaaaggcaattgtctggataatgctgtggtggagtgtttctttggaaccttaaagtcggagtgtttttatcttgatgagttcagtaatataagcgaactgaaggatgctgttacggaatatattgaatactacaacagcagaagaattagcctgaaattaaaaggtctgactccaattgaatatcggaatcagacctatatgcctcgtgtttaactgtccaactttttggggtcagtacacagcagggcgttcagctcggcctcgcccagccaggcaatcaacaccttgccgatggcggtggcgtgcaccggcaggcggcggccgatgcgtgaataggcgatggcggccagcttgccttcaatcttctcgatatagaccccttcacgcccgtcc

SEQ ID NO: 143238 - DNA, 3973 bp, Homo sapiens
atggctgaagccagtgtttttcaaactgtggatccctggaggcccggatttgccaccatccccgattttctgaaggaacgttatgataaaacgacgcgtattatcatcgacttctgcttcttaattgccaccggcgtctgctttctgccgattgttctctactccggcgcgttggcgctcaacagcctgtttcacgtcggggaatcgctacagatttctcacggtgcggctatctggctactggtaattttgcttggtctggcgggaattttgtatgcggtgatcggcggactgcgcgcaatggcagtggcggactccatcaacggtattgggctggttatcggcgggttgatggtgccggtatttggcctaatcgcgatgggcaagggcagctttatgcagggcattgagcaactcaccaccgttcacgccgagaaattaaactcaatcggtggcccgaccgatcccttgccgattggcgcggcatttaccggtttgattctggtgaacaccttttactggtgtacaaatcagggcatcgtgcaacgcacgctggcgtcaaaaagcctggcggaagggcaaaagggggcgctgttaacggcggtgctgaaaatgctcgacccgctggggctgaaacccgatctgctggcgtataataccgcgctacgtgcactcatcccacagcggctgatcgctttcgatgacgcggtacgtagcacgttgaaagaggaggaaaaactggtcaactccagcgactggggctacgacgctcaggccttttgcccgctggcgaccggagtagtgaaccaaatcggcggtaaagagcgttatttctttggcaatattttgtggcagacacgggcgttgatggaccgcgcgatcggtcataagctggcgaaaggccgcccggagcgcgaatatttacagactggcgatgcggtggatagctggaaagtgattgtcgttgaaccggaaaaacaacttacgttgttatttggcatgaaagcgccggggctgggacgactgtgttttagcctggaagataaaggcgactatcgtactatcgatgtccgcgctttctggcatccgcacggcccacattggtgtcgatgccaagagtggcctgacccacagcctggtcaccaccgcggccaacgagcatgacctcaatcagctgggtaatctgctgcatggagaggagcaatttgactcagcctgatgccggctaccaaggggcgccacagcgcgaggagctggccgaggtggatgtggactggctgatcgccgagcgccccggcaaggtaagaaccttgaaacagcatccacgcaagaacaaaacggtcatcaacatcgaatacatgaaagccagcatccgggccaggggggagcacccatttctcatcattaagcgacagttcgggtttcgtgaaagccagatacaagggggttgctggaaaacgataaccaactggcgatgttattcacgctggccaacctgtttcgggcggaccaaatgatacgtcacctgcatagtagcccatcagtcggcatcagcttcgatctcgccttgctgattgacgtggggataaggcaggcctttgcgttttgcgactttcgccagcaccggatagccgccttcaaacaacaggcgttgttgctctgcttccggcaacatgctgttttcacgcagggccaatgcttcctgcgtgatgcccgttttctcctgtcccatcaaaatgcaggtcgggcgagtgtaatcaatttcgcggaaatcgacagcgttatcagaaagatgggttgccagaatctgcatgccctggcctttgagatgagcgacggcatcgccaatggtgcggtgtgttttcacctgtacccagctgttactacccgccgctgccgaagccatggtgcgcatgcggctaccaggccagacggcgtgaacttcatgtacgccaacggcatctgcgttatcaatgggacgggcacgcggcttggtgatccgatcgaggcgcaggcgctgatcgccacctacggccgtgatcgtgatcctggccggccgttgtggttggggtcggtcaagtcgaacatcggtcatacgcaagcggcggcgggtgtggctggtgtgatcaagatggtgatggcgatgcggcacgggcagctgccacgcacgttgcacgtggaatcgccgtcgccggaggtggattggtcggcggggacggttcaactccttacggagaacacgccctggcccaggagtggtcgtgttcgtcgggtgggggtgtcgtcgttcgggatcagtggtactaacgcgcacgtcatcctcgaacagcccccgggagtgccgagtcagtctgcggggccgggttcgggttctgtcgtggatgttccggtggtgccgtggatggtgtcgggcaaaacacccgaagcgctatccgcgcaggcaacggcgttgatgacctatctggacgagcgacctgatgtctcctcgctggatgttgggtactcgctggcgttgacacggtcggcgctggatgagcgagcggtggtgctggggtcggaccgtgaaacgttgttgtgcggtgtgaaagcgctgtctgccggtcatgaggcttctgggtgtggtgaccggatctgtggagggctggggggccgcatcgggtttgtgttttccggtcaaggtggtcaatggctggggatgggcccggggctttaccgggcttttccggtgttccctggtgcctttgacgaagctttggccgagctggtatttggcatgatcattactatcggccagtctatcgtgtatgtgatgaccgggatgtatggggacccttctgaaatgggtgctggaatttgcctgctaatcaccattcagctctttgttgctggcttaattgtcctacttttggatgaactcctgcaaaaaggatatggccttggctctggtatttctctcttcattgcaactaacatctgtgaaaccatcgtatggaaggcattcagccccactactgtcaacactggccgagaatctatcaaggctcggcacaaaggtactctcccaggaggccttcctgaattcttctgtgaggcagactacttcccgagctgccccggcccttctccggccaagtctctccagaaactcatcccattcgttctcagatggaaggggacccacacccacgacaagcctccgggtttgcttaatgactcagacagcgagggtgctcgcactgacgtgtctctcggcggagctgctgtgcagtggaacgcgctgggccgcgggcagcgtcgcctcacgcggagcagagctgagctgaagcgggacccggagcccgagcagccgccgccatggcaaattcagtttaaggagaaagtgctgtggaccgctatcaccctctttatcttcttagtgtgctgccagattcccctgtttgggatcatgtcttcagattcagctgaccctttctattggatgagagtgattctagcctctaacagaggcacattgatggagctagggatctctcctattgtcacgtctggccttataatgcaactcttggctggcgccaagataattgaagttggtgacaccccaaaagaccgagctctcttcaacggagcccaaaatcaggcaccgtgtatgaaatctaacaatgcgctcatcgtcatcctcggcaccgtcaccctggatgctgtaggcataggcttggttatgccggtactgccgggcctcttgcgggatatcgtccattccgacagcatcgccagtcactatggcgtgctgctagcgctatatgcgttgatgcaatttctatgcgcacccgttctcggagcactgtccgaccgctttggccgccgcccagtcctgctcgcttcgctacttggagccactatcgactacgcgatcatggcgaccacacccgtcctgtggatctacccactagtcaattcaccatcttgttga

SEQ ID NO: 143239 - DNA, 1582 bp, Homo sapiens
atgtcaaagccaaaatacccttttgaaaagcgccttgaagtcgtgaatcactacttcacaactgatgatggttacaggatcatctcggcacgttttggtgtcccccgaacccaggtcaggacatgggttgccctctatgaaaaacatggagaaaaaggtttaattcccaaacctaaaggcgttagtgctgatccagagttgcgtattaaggtcgtgaaagctgtgatcgagcagcacatgtcccttaatcaggctgctgctcactttatgcttgctggtagtggttctgtagccaggtggctgaaggtctatgaagagcgcggagaagctggtttacgcgcgctcaagattggcaccaaaagaaacattgcaatatcagttgatccagaaaaagcggcatcagcattggagctgtcaaaagaccgacgcattgaggatcttgaaaggcaagttcgatttcttgaaacgcggcttatgtatctaaaaaagctgaaagccttagctcatcccacgaaaaaggctgcggagataccgcgcagtacgttttattatcatcttaaggctctcagcaagcctgacaagtatgcggacgttaaaaagcgtattagtgagatttatcacgagaatagaggccgatacggataccgtagggtaacgctgtctcttcatcgagaagggaaacagattaaccataaagctgttcagcgcctgatgggaaccctctcacttaaagcagcgattaaggtcaagcgataccgctcttacagaggagaggtagggcaaaccgcccctaatgttctccaaagagatttcaaggctacgcggccaaacgagaagtgggttaccgatgttactgaatttgcagtcaatgggcgcaagctgtatttgtctccagtaatagatctcttcaacaacgaagttatttcttacagcctttcggaaagaccagtgatgaacatggttgagaatatgctcgatcaggcattcaaaaagcttaatcctcacgagcatcctgttctgcactctgaccagggatggcagtatcgtatgagaagatatcaaaatatccttaaagaacatggtattaaacaaagcatgtccagaaaaggcaattgtctggataatgactgtggtggagtgtttatttggaaccttaaagtcggagtgtttttatcttgatgagttcagcaatataagcgaactgaaggatgctgttacggaatatattgaatactacaacagcagaagaattagcctgaaattaaaagacctatatgcctcgtgtttaactgtccaactttttggggtcagtacagtgatggggctgctgattcgcatccttggcagcattttccagaaagccctcaacatcagcaaaatcgaatcttttgttgcggttactactattttcctcgggcaaaatgagatcccggcgatcgttaagcggtttatgatcgctgaatcgcacgaagtgttaccgcatttgtacgggatgggtcactgcgggtcgagaagatggtatgccgaatggcgtcccttgcaccgagttcatgaaccctcgggctccttgccctggccttag

SEQ ID NO: 143240 - DNA, 3177 bp, Homo sapiens
tcatccgtaaataaagatgctccaagatggtgcgaaaatgaaggaagcccataaacgttcccttgggccgggcttttgcacttgggaacccggttctctagccttgggccaccaaccctgtaccaatttgccggcccgccccagaatcccccccggtttccccttgggggaccgtgccgctacatgcaggacaaacggtgttagttcgcctgccagtttgtacagcgtcgggatcatcagcagcaaaccctgcgatgacgtaaacgatgttgaaagggcacccgtctgcaaagcgccatgcacggtagcgatagcacccgcttccgactgcatttcaaccacgcgtggtgtgtctccccaaacgttctttaagccgtttccggcccaggcatcagcctgttctgccatctgtggaacctgaggggtaactttcatatggagatccagcaagatcacgtcgatatccagtctattcgccagatcgatagcgctcgcgccgtcgcccgcttcggcgaccacttcagagccaggatcaagctccagtaactgacgaacaccgcgtcgcataagtggatgatcatccacaatcatcacctgaaaaggtgttgcttcgccgacagtgaattcagcagtaagcgccgtcagaccagaaaagagattttcttgtccccgccatggaagcagattcctgcccatggcaaaaccatggtggaagtcatcgagccgttttacccccaaggctggtaatggccggcgaccttatccgctggaaaccatgctacgcattcactgcatgcagcattggtacaacctgagcgatggcgcgatggaagatgctctgtacgaaatcgcctccatgcgtctgtttgcccggttatccctggatagcgccttgccggaccgcaccaccatcatgaatttccgccacctgctggagcagcatcatctggcccgccaattgttcaagaccatcaatcgcttgctgggccaaaacaggcgtcatgatgactcaaggcaccttggtcgatgccgccatcattgaggcacccagctcgaccaagaacaaagagcagcaacgcgatccggagatgcatcagaccaagaaaggcaatcaagggggcactttggcatgaagggcccacatggtggtcgaaggccaatagggggcaggacccccaagcccgggtcactcaccgcggcccaacgaggcaatgtccttcaatcagatggggtaatcctgctgcatggaagaggaagccaatttgtgttcagcccgatgccggctaaccaaggggcgcccacagccgcgaggaatctggacgagggtggaatgtggagctggcttgatcgaccgagctgccccggccaaggtaagaaccttggaagagcagcatcccacgcaagatcaaaacggccatcaacatcgaatacatgaaagccagcatccgggccagggtggagcacccatttcgcatcatcaagcgacagttcggcttcgtgaaagccagatacaaggggttgttgaaaaacgataaccaactggcgatgttattcacgctggccaacctgtttcgggcggaccaaatgatacacggtcaggcggtcgaaattgctggccataaagttgatgtactcttccgtcagcagcgcaacgcccggaaagccgcccatggtgttagggccgtctggcaacagatgaccatgccaggctccgagatcgaaaaacggattaaaacgctggtgatcgtcgtaatcgtaatccttcatgtactgcggcgcgccagtacggttaatcacgtttttataattgtcggcgttagcggcatgggcggaaaaacttatcagcagagcgcagtacccgtggctgacatgaccacggcacgcactatgtccgttcgtgagccacctcggcaccagatcggcatgctccatcgtccgatgcctacaggtcaccctcgctctcgacatctcaccgctccaacacagcatcgcgtgctggtacacgacatccgcaacgcagagcgagtgtgctccacgcacaccctctcttccgtcactgcgacgtgcgcaccaacgcatccacctgcatcccggccatcgggtcagctctcggagctgtgcactactgcccctcgagagctccgcgccctcactgacggccgacgactctctaatgtcgcactcgcggcggccagtaacaaggcatgctgcgtcgcatcactacgtggccgaatcttcccacaaagcacagcatataacggcctgggccagacctgcacgatgagctccgtcggctacgatcacagtgaatcgctcccatcagcctcagacttgccgatacatgctaccccgtccgcaggcgtaccaggcagggctctcagcaagcctgacaagtatgcggacgttaaaaagcgtattagtgagatttatcacgagaatagaggccgatacggataccgtagggtaacgctgtctcttcatcgagaagggaaacagattaaccataaagctgttcagcgcctgatgggaaccctctcacttaaagcagcgattaaggtcaagcgataccgctcttacagaggagaggtagggcaaaccgcccctaatgttctccaaagagatttcaaggctacgcggccaaacgagaagtgggttaccgatgttactgaatttgcagtcaatgggcgcaagctgtatttgtctccagtaatagatctcttcaacaacgaagttatttcttacagcctttcggaaagaccagtgatgaacatggttgagaatatgctcgatcaggcattcaaaaagcttaatcctcacgagcatcctgttctgcactctgaccagggatggcagtatcgtatgagaagatatcaaaatatccttaaagaacatggtattaaacaaagcatgtccagaaaaggcaattgtctggataatgctgtggtggagtgtttctttggaaccttaaagtcggagtgtttttatcttgatgagttcagtaatataagcgaactgaaggatgctgttacggaatatattgaatactacaacagcagaagaattagcctgaaattaaaaggtctgactccaattgaatatcggaatcagacctatatgcctcgtgttaaactgtccaactttttggggtcagtactacagggaccatgcaggcagtga

SEQ ID NO: 143241 - DNA, 1436 bp, Homo sapiens
  misc_feature (1)...(1436): n = a,t,c or g
gcgtctcctcgcgcgcgtgctcacgctgggcacgggcctcatcgccgtctctgcgctcgaatgcccccacgactatactcgcgatttctatgtcgtgtgccacacgtctcgctcgctcaacacgggactgtggggtccgcgcgcctaaaacattagaatctctgtatgactttctgccgctgccaatgggcacggactctccgggtacgcaggcttaagatacgcatttcgcgggtttaatcacggtatccaaaagtggatagagttcaaacaaccagcagcctgttcaatgatgatcccgtacttcatgcaacatggctgtactatcaggaaggcaaaagccagactgaagttgcagctatcatgggggtgtcccgcgtcacggttgtcaaatacctgcaaacagcccgggaaaatggactggttcatatcaacctggatgtgaatgtctttggctctatcgacgctgctttgcaaattcgcgataaattcaatctccagagagtgatcatcgtgccggatggcgaacatgccggaaaacgtgatgatacaaagctgatgcggactcgcctttcacgtgccggtggcatgtatctgaatcangtcgtgatggcggaagtagacatcctgtacatgacccgcgtgcaaaaagagcgtctggacccgtccgagtacgccaacgtgaaagcgcagtttgttcttcgcgccagcgatctccacaacgccaaagccaatatgaaagtgctgcatccgctgccgcgtgttgatgagattgcgacggatgttgataaaacgccacacgcctggtacttccagcaggcaggcaacgggattttcgctcgccaggcgttactggcactggttctgaatcgcgatctgatcggttttaagctgttgagtctgttcaagctgaccgaaacggatcagcgcatcaccattggtctgaacctgccttctggcgagatgggccgcaaagatctgatcaaaatcgaaaatacctttttgagtgaagatcaagtagatcaactggcattgtatgcgccgcaagccacggttaaccgtatcgacaactatgaagtggtgggtaaatcgcgcccaagtctgccggagcgcatcgacaatgtgctggtctgcccgaacagcaactgtatcagccatgccgaaccggtttcatccagctttgccgtgcgaaaacgcgccaatgatatcgcgctcaaatgcaaatactgtgaaaaagagttttcccataatgtggtgctggccaattaattgcggttggtaataaaagtctggctccctataatgagccagactttttaccgctgtaataaaggagaaatcatgagcaaaactatcgcgacggaaaatgcaccggcagctatcggtccttacgtacagggcgttgatctgggcaatatgatcatcacctccggtca

SEQ ID NO: 143242 - DNA, 2883 bp, Homo sapiens
tcacgctgtatgccagccgggattttgattggcgtggtggtactgattttttccctgcaacacgagctgctgccagcctatgccttgttgatgctgattggcgtgatggggggcttttttgtcgttccgctcaatgcgttgcttggcgaaaacagcgccatgttgttgatgctgggcatttactcgctggcggtaatgataggcatcccggtcgtgcccattggcattggcttcggtgcgctgtttgcgctggcaataacggcgctgatgcaccgcttcaatttcagctaatacgtcttcgcttaactccagatgcaaactttcgatgttagttttcagctgatccatcgtggttgcgcccagcagagtgctggcaacaaacggttgacggcgtacaaacgcgagcgccatctgagcagggtccaggccatgacgtctggcgatatcaacatacgccgcgacggctttttgcgtttgctcaccgctatagcgggtgaaccgactaaagagcgtattacgtgcgccagcgggttttgcaccattgagatatttcccggtcagcgtgccgaaacccaggcacgaataggccagcagttcgaccccttcatactggctgacttctgccagacctacttcaaaactgcggtttaacagactgtaagggttctgaatggtgacaatacgcggcagatcgtgtttgtccgccagatgcaggtagcgcattacgccaaatgcagtttcgttcgacacgccgatataacgaatttttcccgcgcgttggtactctgccagtgcgtccagcgtatccagcagcgaaaccgcaggcgcagaatccgtccagctataaccgagtttgccgaagcagttgtcgggcgctgcggccagtgcacctgataaagatcgagtaatcagtctggtaccgagcggtgtctttcccgggtttgccacccgtttggaatattcccccgccccatgtgcttcctcccattgcgaggcatccctcgccttatggggcaccggctcaccccgtatggaagccgtgcaatggccacgggcccacggggccatcgcctggaaaatctgtagaagatgatcaaccccatcgaagatacgcagaaacgcggcgtcaaccgcgccgagcaccgtctgcatctgcgctgcgaactgccgcatcacaccacgctgccgctgtttgaaaaactggtgcagcgcgagccggtgacgctggtgtcgctgatggaccactcgccgggccagcgccagttcgccaaccgcgagaagtatcgcgaatattatcagggcaaatactccctcactgatgcgcagatgcagcagtacgaagaagagcaactggcgctcgccgcacgctggtcgcagccgaatcgcgaatccatcgccgccctgtgccgcgcgcgaaaaattgcgcttgccagccacgatgacgccacccacgcccacgttgctgaatctcaccagcttggcagcgtgatcgccgaatttcccaccacgttcgaagcggcggaagcctcgcgcaagcatggcatgaacgtgctgatgggcgcgccgaatattgtgcgcggcggctcgcactccggcaacgtggcggccagtgaactggcgcagcttggcctgctggatatcctctcttccgactactaccccgccagcctgctcgatgcggcatttcgcgtcgccgatgaccagagcaaccgctttacgctgccgcaggcggtgaagctggtgatggggaccaaagcagtttccatgcccaaaggtgtggctgtcgtcatcatcaacagtaacttcaaacgtacactggttggcagcgaatacaacacccgtcgtgaacagtgcgaaaccggtgcgcgtttcttccagcagccagccctgcgtgatgtcaccattgaagagttcaacgctgttgcgcatgaactggacccgatcgtggcaaaacgcgtgcgtcatatactgactgaaaacgcccgcaccgttgaagctgccagcgcgctggagcaaggcgacctgaaacgtatgggcgagttgatggcggagtctcatgcctctatgcgcgatgatttcgaaatcaccgtgccgcaaattgacactctggtagaaatcgtcaaagctgtgattggcgacaaaggtggcgtacgcatgaccggcggcggatttggcggctgtatcgtcgcgctgatcccggaagagctggtgcctgccgtacagcaagctgtcgcgactgttaactttgcgtaacaacgcagggatggtagtcacgctgatggactggggggatcctctagagtgaccacagcatgcagctgcctgccctttgtacgggtgtgggcgtgtgtgtgtgcggggtgtcatacgctcagcgaaggcgcagagatccatctccctgcggacagtcgcctgacgccctctgcccgggagttgctggaaagccgccatctgcgcatcaagtttattgacgagcagggccgcctgtttgttgacgatgaacagcagcagccgcagcccgttcatgggctgaccagtagcgatgaacatccgcaggcgtgctgcgaactgtgtcgccagccggtggcaaaaaagccggatacgctgactcacctgtcggcggaaaaaatggtcgccaaaagcgatccgcgtctgggttttcgcgcggttctcgacagcaccattgcgctggcagtgtggctgcaaattgaactggcggaaccgtggcagccgtggctggcggatatccgttcgcgtcttggcaacattatgcgcgccgatgcgctgggggaaccgctgggctgccaggcgattgtcgggctttctgacgaagatctgcatcggctttctcatcagccgctgcgctatctcgaccacgatcat

SEQ ID NO: 143243 - DNA, 2415 bp, Homo sapiens; identical to SEQ ID NO: 143020

SEQ ID NO: 143244 - DNA, 570 bp, Homo sapiens
tttcgaggtaatattctggatttgacggctgacgctgcggatcggggcgggacctttatgtaccgccaacagtacgattaagacgatcaggatgctgattaccgatgcggtcataataagtttattcatcaaatcatttatgtaatgaagatgaaaatcgatcgaaagcgcgatgtagagcgtataaatcggtttgccgtccaccaacgggccaaccggcaagttaatcatccgccagttgctgtgttccatatgcccgtgaccgtggcctggcatcatcatcgtcgggccggaaaggagatacacctcgccaccctgagcgtctttatcgggtatggcgtcacgcgtaaactcgcggatatccggcgcaccgggggagtgatacaccgttttaccctgactatctgacagggaaatcaacacattggaataaccactgacgatatcttccagcgtcattaagcgtcgggcttgcgtttcgtcagggtgatttagtacccgttcaaggctggcgctaatctcttttaaatcattaatataaagactcggcaaaatgaacttttactgagt

SEQ ID NO: 143245 - DNA, 1953 bp, Homo sapiens
ttaattcagcgccgttaatgcgactttaaccacaatttttcgtatctcagaggctgtttgcataatacaacctggtcggtgaacatcctgcggaaagaaaattgcgtagctgcccggtatcatttctataaatgattcatgttcactgtcgtgataaaaaataatattgcgctgctctaatagtgattcgctgactttattatttcccgtatcaatagcaatgccgattttctcttcgccccacgccagaaactgaatatcgatataccgacgatgcacttccggacggtttaccaccgcttcgcgtgtggttaaatcgataatttgcgtataaatatttttgccgtcgatttcgacaacgcccggcatcagggcgttgaaatcggtagcgcgcagaaaatcgacgcggcgtttctgccagcaggtaataatcatgccgtgtgagggtgtgtgagggtcattaatgacacgaatacgggaaataaactcgtctggtgacaacgcagcgcaatcctgattctcatgatgcgacactgcgcaagccacttgacaggtacggcaaccgatacatttcgtcgcatccgcaataataaaccggttcatgatcactcctttgcactgtttcagacgtgatgtcgaaagcgaaatcgacacggcgtacggcacccgcccatgaatatcaaacaccggaacagcaatacaggagacgccgagttcgttttcttctctgtccatcgcccgctccgctttcacgaatgtgcgccagttcgtcgaacatcgcgggcagcatttcagcaggtcattaaacaccacaggttctatccagacctgaatattctccccacgatcggctatccgcctgatgaccaccgagtgcgcggaagcactgtcactgatgacccgcgatacctgcgcaggcgttgttgtggcagattttcgcgctgcaataatatccggcgcggcgttcttcagtcgggtgttcatcgccaccagctgctgcaatattgtctcctgttgctcaatccgttcgctcaacggctgccagatgaggacgtaatatccgacgctaaacaggaacaccaccgcctctttctgtaacgcgtcctggtgcacaacattatcggttgccagtacactacgcagtttgtcgaaactggcaaagttcgcggcccgtagctggaggtgaagtatctggcgtttttgatcaaaggtaaaaccacgcatttcgatgtcggaaagtgacgctgatttcagggtgctggctatcgtatgtatattggctttaattattttggggggccggagatgagcgtctcggaactgatcggactgctcggcatcaccaagcagtcgctcggccgcgtgctcgacgagctgggcgagcgcggactgctttgaatgcgctcttgatgtcgctagctggaatttgccaaactcaatgccgcgcggcgcatctgccggacgcggagtgaacatctgccattcgccgttaaagtcttcatcaataaacgggctggcggcgcggaagtcgaccacttccgttccgtgtttcggtgcgccgaaacgcacgcggatcttcacttcattagctaaaatcgcccgatcttcatactcaaccagcgcagcaacacgcggtgctgtggctactaagccaccggcggtcaaaccactcttaataaaacgttccgaaagcgcatacataatcaccaccggcaatgcggtcaccagtgaggccgccatcatccgtccccagatgtaatctggcgtactgaacagcgcgttcaggcccaccggtaaggtgaaattgctggcgctggagaggaaaatcgacgcaaacagatagtcgttccacgccaccataaagcagtagacgaacacggatatcagcccggacatcggcaacggcacggtgatgcggaagataatttgcagaccgttgatgccatccatcat

SEQ ID NO: 143246 - DNA, 3159 bp, Homo sapiens; identical to SEQ ID NO: 137723

SEQ ID NO: 143247 - DNA, 1827 bp, Homo sapiens
atggatgcgcgcctgttgtcggtccctggtatcgaagagggcggacgcctgcaactgaaagggccgaacataatgaacggctatctgcgggtggagaagccaggtgtactggaagtgcccaccgccgagaatgttcgcggcgaaatggagcgcggctggtatgacactggcgatattgtgcgttttgacgagcagggctttgtgcagattcagggccgcgcaaaacgctttgccaaaattgcaggcgaaatggtgtcgctggaaatggtggaacaactggcacttggtgtttcgccagataaagtccatgccactgcgattaagagcgatgccagcaaaggcgaggcactggtgcttttcaccacagataacgaactgacgcgcgataagttgcaacagtatgcccgcgagcacggcgtgccggagcttgctgtaccgcgcgatattcgctatctgaaacagatgccattacttggcagcggcaaacctgactttgtcacgttgaaaagctgggggatgaaagcggttatcgtggcgcagtttctctctgcgtttggcgataatgccctactgtttgccactctggcgttactgaaagcgcagttctatccggagtggagccagcccatcctgcaaatggtgtttgtaggtgcttacattctttttgcgccgtttgtcgggcaggtggcggatagcttcgccaaaggccgggtgatgatgtttgccaacggcctgaagctgctgggcgcagccagtatctgctttggtatcaatccgtttctcggctatacactggatgacaagtctgttcctcatgaagagtacgttcacatgatggtaaaacaccacaattaccacgcccagcggttgggcttaaacggggggttgttgcaccaagcccagtttggagcgaacgaccttacaccgaatttagatacctacagcgtgagctatgaaaagccgcacgcttcccgaaggagaaaggcggacaggtatccggggggcggagcctatggaaaaacgccagcaacgcggcctttttacggttcctggccttttgctggccttttgctcacatgttctttcctgcgttatcccctgattctgtggataaccgtattaccgcctttgagtgagctgataccgctcgccgcagccgaacgaccgagcgcagcgagtcagcgcgtaaatatccgccacagaagcggtacgcgtaaaacggggatcgacaacgatcaaggttgcgtcgttgttgtttttcgcttccatcgcccagcggaaaccgacgggatgcgcttcagcagcgttaccgcccatcaccatcacgacgttagcgtttttgatatccacccagtggttggtcatcgcaccgcgaccaaatgttggagcaagacttgctaccgttggtccgtgtcagacgcgcgcctggttgtctaccgccagcatcccgagggagcgggcaaatttctgggtcagcatcccggtttcgttgctggcaccggaggcacacagcataccggtagaaagccaacggtttaccgttacgccctgctcgttcttttcaataaagttagcgtcacggtcagctttcatcagcttcgcaatacgggagaatgcttcttcccagctaatgcgctgccatttgtcagaacctggcgcacgatattccgggtagcgcagacggttttcactgttgacgtaatccagcaaaccggcccctttcgggcacagcgcaccacggcttaccggatgatccgggtcaccttcaatgtgataaatcgcttctctggcgttttttgcgccatcacccaggctatacatcaatag

SEQ ID NO: 143248 - DNA, 2606 bp, Homo sapiens
atggcacaccaagtacctcatcgcgatgtagtgggcaagaaacaaacgtctatgtcaaatgagtattcgagtgtccaatcaatgcaagtcgcgcaatacggcatcagaataagatacaagaacggagggcaaatatgttttagacgcaaggcgctagtttatatagtcaacaaacagcatgaagtgcatgcctctatgaactggcaggatgttagcggtaaatctgccgtacctgtgaagtggcttgcgcagtgtcgcatcatgagaatcaggattgcgctgcgttgtcaccagacgagtttatttcccctgtatgctggcttgcccgtttggtgcgatggaggtgtttcttcgcgcaaaaagccagatgaagtccaggccactgcgattaagagcgatgccagcaaaggcgaggcactggtgcttttcaccacagatcacgaactgacgcgcgataagttgcaacagtatgcccgcgagcacggcgtgccggagcttgctgtaccgcgcgatattcgctatctgatacagatgccattacttggcagcggccaacctgactttgtcacgttgaaaagctgggggatgaaagcggttatcgtggcgcagtttctctctgcgtttggcgataatgccctactgtttgccactctggcgttactgaaagcgcagttctatccggagtggagccagcccatcctgcaaatggtgtttgtaggtgcttacattctttttgcgccgtttgtcgggcaggtggcggatagcttcgccaaaggccgggtgatgatgtttgccaacggcctgaagctgctgggcgcagccagtatctgctttggtatcaatccgtttctcggctatacgctggtgggtgttggtgctgcagcctattcaccggcgaaatacggtattctcggcgaattaaccacgggtagtaagttagtgaaagctaacggtttaatggaagcttctaccatagcggcgattttgctcggttccgtagccggtggtgtgctggcttactggcatgtcctcgtcgccctggccgcatgcgcactggcctacggtggtgcggtcgttgccaatatctacattcccaaactggcggcggcgcgtccggggcagtcctggaatctcatcaacatgacccgcagtttcctgaatgcctgcacctcgctatggcgcaatggtgaaacgcgtttttcgctggtgggcaccagtttattctggggagcgggtgtcacgctgcgtttcctgttggtgctgtgggtaccggtggcgctgggcattaccgataacgctacgcccacctatctcaacgcgatggtagcgattggtatcgtggttggcgcaggtgcggcagcgaagttagttacgctggaaaccgtgtcacgctgtatgccagccgggattttgattggcgtggtggtactgattttttacctgcaacacgagctgctgccagcctatgccttgttgatgctgattggcgtcttctggctgcgcgactggctgagggcgatttcggtttgcgttatgagattcgtaattgaaattggactggcgggtaaagacatcctcaatacgctcgatcatatggttgaacgacagtaccagctgttccagctcaatgggcacggtctgcgggtcgaggcgaacgtcgagatctttcgaggtaatattctggatttgacggctgacgctgcggatcggcgcgtgacctttatgtaccgccaacagtacgataaagacgatcaggatgctgattaccgatgcggtcataataagtttattcatcaaatcatttatgtaatgaagatgaaaatcgatcgaaagcgcgatgtagagcgtataaatcggtttgccgtccaccaacgggccaaccggcaagttagccacttgactgttctgcgcgaagaccgatgacgctcccacactcaaaagcaacgcgacaatagtttggtttaatccattgttttgcccgccttgatgagagtggttttcaccggaaaataatccgcgccgagatactgttccgactggcgaatttgcccttcgctgtcgatccaatagcggttatgccagcgcgcctggtcggtggagacttcttcgtccagcacgcgaaccggggtttcatcgctgccgactttgacggtatcggtgccatcccatttgaagactgagcgtgcggtggcgtagcgtacctgctggtactcggtccagcccatcgtgcgcgtccagcttgcgccatcaacgatttgtgcgggtttaatcagcgggtcggcagcaaggttattcacttcaatcaggttgtcgccgccgagcagagtcttcaccagacggccatgttgggtaacgagagtagcctgatcctgagtgacccattttttgtgtccgtcttcaacgaaagccatcaccacaaataactgcggcccgccattaaactgcatgtactggctggccgtaggcatatttttgaatatcatcattccgcagctgtacacctggtccgcgttggcatcagaaagcacaatatcagcgctgcggttcatggcgtcaaaatcagctacgctggtaccgccaaatttggagacaacaatttcagacat

SEQ ID NO: 143249 - DNA, 1743 bp, Homo sapiens
ctagccacggttggaggagactttcacggtatcgccctgggcaatgccaagtttattcgccagcgactccccgatttccacaaactgctctggctgcaaaatcgcgttcaacagcgcgtgtttggtccagtagtggaagtgctcggtcagacgataggtggttccgacatacgggaacttatcggctttacccaatgcttcggcgtcgtctttaaagatacgtgcagccgggttcgagataacgtttggatgcagcgggttagttcccagcggcgtttcaaacggctcgtagtgttccgggaacggaccttccgccatcttatcgagggcaaacagacgccccatgccttcctgctgcatgataaacggcccgacgccgctacccggaggcgctgcgctgtagtccggaatatcccagccggtccacttagtgccgtcccatttcagcaactgacgcttcggatcccacgggttaccctgcggatctgcggaggcgcggttatacagaatgcggcggttaagcggccatgcccatgcccagcccagcgtgttaccgaggccagacggatcggcgttatcacggcgtgccatctggttgccttccggcgtccagctaccggcgaaaatccagcagccacaggaggttgtaccgtcatcgcgcaattgggcgaacgaactaagttgttggcctttcttgacgattaccgcaccggttgccggatcggtaatatcggccagcgccttaccgttgctctccatcgccacttcttctgaagatggctcatgcggaatggcgtagttccatgtcatgttcagcacctggtccgggttcgcgccaccctgttcggcatacatcttgcgcaagcgcaggaagataccggagaggatctcgccgtcagtcagcgcaatccccggggcgtccgcacctttccagtgccactgtaaccagcgacctgagttaacgatagaaccgttctcttccgcgaagcaggtcgatggcagacggaacacttcggtctggatcttcgacgagtcaacttcgttcagctcaccgtggttctgccagaagttagaggtttcagtgttcagtgggtcgatggtgacgaggaacttcagtttcgacagacaaccgatcactttgtttttgttcgggaatgaggcaacagggttaaagccctggcagatatagccattgaccttggcctctttcatcatttctgtactttctgtgctctcttgtttcatattgtctttactgcgttccgtactgccgcctactggaacacggttataatatctggctaccgcttgtgttgcagaccaccgcgtaacctgccacggccgttccttcgttcgaagagtcgatgaacggtgctgcaccatgctgacaagccaaatctgtatcatggcttgccggagaacccggaaatcagcgaaaccgtgaaattctggaaaggcatctggaaaccgctcgcggctgttggctttgcggctacctttgcggccagtatcttccactacgtgggtgtcggtccgaaccgtgcggatgaggaagagaataatcactggatcaccgccttctgcttcatcctggcggcggtgagcgggctgggctttttgttcccgtccttcaactggttgatgcaaatcatgggcacaccgcagctggcgcgaattctgcacccgtttgtcggcgtggttatgtttgcctcgttcatcatcatgtttttccgttactggcat

SEQ ID NO: 143250 - DNA, 567 bp, Homo sapiens
ctaagctttcaggcctgtaggggccaggatgtaacggcgttcaccgtctttgtacagaaccagcgcgatgttcgcggaacggttcggatcgtactcaagacgttcaacaactgccgggataccgtctttgttgcgtttgaagtcaacaatacggtaagcctgcttgtggccaccaccgatatgacgagtggtgatacggccattgttgttacgaccaccggatttgtcagcgccgccaacgaagtccagattctggccttctttcagggtgacgtaagcttttttccagtcgctacgacgaccgatacgctgtccgtgacgtttaactttccctttaactaccagggtgttaacgacttcgacttcgacttcaaacagtttctgcacagcagctttgatttctgctttggtcgcgtctttagcaactttgagtaaagtcacacactggggcatgttagggggtgggaggcgacggtggctcccatcccccggcctggtccgcatcccgtcctcggactcatcctcggagccgctgctgctgtagcccaccaggggcgccgcgctcat

SEQ ID NO: 143251 - DNA, 1743 bp, Homo sapiens; identical to SEQ ID NO: 130137

SEQ ID NO: 143252 - DNA, 2571 bp, Homo sapiens
ttacgcgcgacaatcattcatggtgaaaaaatcgcctttaaaatcgcttttccccgtgccccacaggtcgcgcagcacctgaacatattcggtgagatagtcgtaacgacgggagaaatagtcatcgccaggccagatacccatctgctcatactcgggcttttgccagccagtcacgaggttgacgccaaaacgcccgccagagatggagtcgatggttgcggccatacgggcgacgattgccggaggtaacgttaaggtggcagcagtggcgtaaatctgaatgcgcgaggtcacggccgccagccccgccatcaaggtgaacgactcaaggttgtgatcccagaactcagttttgccgccaaagccacgcagtttgatcatcgacagggcgaaatcgaaatggtagtgctccgctttttgcacaatggctttattcagttcaaaggtcggcatgtactgcggcgcgtgggtcgaaatgagccagcttatacacctagtaacacggtcatagtaatctgcccagctaatgacaagcgtcatatgtctcccgtcccatgtttttccacggtttgagcacagatcgcaacttgtttgttccgatgggattgtatccgcgatttcgaatcccgaaattttgcacgcagtcggtctgcaccgaaaatttttctcacctggaccgtgatgaatttcatcactgataacctgattccggttacgatcggcaacattatcggtggtggtttgttggttgggttgacatactgggtcatttacgagggtgacgagtccttcctggctggcgctactgaagcgaccaccacccccgcgtgcgcgtattccccacgcgtcaagagccgcgtcgtcgttgcggttggcaatcaggcgcagatacgagagcgcatctttgatttcatggcgatccaagaagcgcatcccgccgtaaatacggtgcggcatactggcctcaataacgcctctgggagcacccgcgacgtccgcgccatcggtccacagttttttacccagacgcccgttattgttttcaatcagggcgttagcggcgctcagaatattgctggtagagcggtagttttgctccagacgaatagtttcggcaccggggaaatcattaaggaaacgctgaatattctccacctgcgccccgcgccagccgtagattgactggtcgtcatcaccgacgatcatcactttgccggtgtcgcccgccagcaggcggatccacgcgtactgaatgttgttggtatcctggaattcgtccaccaggatattctttagagcacagggggataccaacggaggttcacacgaagccgcatcagcggcacaaagatttcccggcaagccagcgccggagtcttcaagaaagaagagaaacaggtacatcatgccaatctgcggcaccagtggcagcacggtgttaatgccgccacccaggccctgggcgaggaagatagtcagccagtccgggaagtggagcgtgtagccaatccattgaataccatgcacaaatagcgccacggagccgacgtcaaacagcggctgtaacgccccgccgatgttgatagccagcaggaacatcaggtacatcacaaagaggaaaatcggcagaccgaggaaacggttgagcacgattttatctaccgcagtggtgaaacggctgggttctgccgtcagggtgttgcttaccacatcacagatggcagcaatgcactggtaacgcgcatcggcaatgtgcagcgccggatcgtccatctcattacgcagacgggcgagggcggcatccagatgctgcgacgcttcaccggcgtaggcgcggctgtagatatcgccttccagcatttgcaggcccagccagcgacgttgtttcagcgggatgtcggaaggcatcacttttgccagtgaatctgcttcgttgagcagcggctgtgcgtaatgcaccagttccacattctcgttagctttatagcgatcatcgattagagtcccgacaggctgtccttcgcggtaatttccatgggtgctgtggaacacggctgtttgagtcgttcggcggtattgtatccgcctcacgcggtaaacccaccgtcgcatcgctacgagcgacgcgttgctgagctgaaaacccgcggttacgacaatgcgggtctgtacgatccggcaggcgtcggtggtacacacgttatgtacgtgctgcaccatgctgacaagccaaatctgtatcatggcttgccggagaacccggaaatcagcgaaaccgtgaaattctggaaaggcatctggaaaccgctcgcggctgttggctttgcggctacctttgcggccagtatcttccactacgtgggtgtcggtccgaaccgtgcggatgaggaagagaataatcgccttctgcttcatcctggcggcggtgagcgggctgggctttttgttcccgtccttcaactggttgatgcatatcatgggcacaccgcagctggcgcgaattctgcacccgtttgtcggcgtggttatgtttccctcgttcattatcatgtttttccgtactggcat

SEQ ID NO: 143253 - DNA, 651 bp, Homo sapiens
  misc_feature (1)...(651): n = a,t,c or g
atgggaacgaaacaggccgtacccgaagcacacatcatggggaacctaatagttgcaaaacaggaaccgagaaatcgttacngaaccagcgcgatgttcgcggaaggttcggatcgtactcaagacgttcaacaactgccgggataccgtctttttgcgtttgaagtcaacaatacgcaacggagcaaaaggtttgcccttgtgcagctcagggttaccactttaactacgtggcgacgacccggagatgtcggtttacatttaaaactgccattgtattactcctccgacttactcagcgccgccaacgaagtcagattctggccttctttcagggtgaccgactggcttttaaacccagcgttgcggcgcttcgataccttcgaaaataatcaccggttctgtttctgtcagcttcgcaaacaagccgacagctcaatgctgtttcctcttctttacgctgacacgccaccaacgtcaatcgatggggcgcgtttgccgaagcgcaaacttgccgtcgtctggtattgcgaactattttggcgaagggcgtcaggagccgtgcgggaactgcgatatcgcctcgatccgccgaaacagtacgacggttcaaccgatgctcagattgcctttccaccattggtcgtgtga

SEQ ID NO: 143254 - DNA, 1716 bp, Homo sapiens; identical to SEQ ID NO: 138563

SEQ ID NO: 143255 - DNA, 6732 bp, Homo sapiens; identical to SEQ ID NO: 138900

SEQ ID NO: 143256 - DNA, 1581 bp, Homo sapiens
ctaggagacagttttgatgctagcatgataaaaggtagggaactgggtctcagtcatgagagtgcagagaacgacaaactggaatggctgatccgcaaagacggctgtatgcactgttccgatccaggctgcctgaaagcgtgcccggcggaaggtgcaattattcagtatgccaacggtatcgtcgacttccagtccgagcagtgcattggctgcggttattgcattgcgggctgtccgttcgacattccgcgcctcaacccggaagacaaccgcgtctacaaatgtacgctgtgcgttgaccgcgtggtggttgggcaagaaccagcctgcgtgaagacctgcccaacgggcgcgattcacttcggtacgaaagagtcgatgaaaacgctggcgagcgagcgcgttgctgagctgaaaacccgcggttacgacaatgcgggtctgtacgatccggcaggcgtcggtggtacacacgtcatgtacgtgctgcaccatgctgacaagccaaatctgtatcatggcttgccggagaacccggaaatcagcgaaaccgtgaaattctggaaaggcatctggaaaccgctcgcggctgttggctttgcggctacctttgcggccagtatcttccactacgtgggtgtcggtccgaaccgtgcggatgaggaagagaataattgggtgggtcaatattctggggtccctggggattccaaggctgaccccagtggaggaggagggcagccggggacataacgtggcagactgctctctcgaggaagccataaccttgtccatgacagagttccatgtggctttctctgtactcctcccagacactgcccatggagccatgtcatagacatcgttttcatcacggcgataattatctttattgtttgcccaaacgtgatcgttaaatgtccggtaatcacgcgacgaataacgccaggccgccagaccaaaacgcgtcgacgtttggctcacaaatttgttgtaggcaatttgataactttgcccgtcaaacacatcgccgttgtcttgtttactatgcgacttagtggcatcgacggaaatggcaccaatgcgtgtattccagccagcccccaaagtaaacgcgtaataattattcgcgaccatcgagccaccatacagcgtcaataaattattaaaaccatactgataacccgcctggacaaaatcactttgtttgctcgccccttcaatatggctacgacccgccgctaaatcatatttcgacacgccgggttgcagcatatttggcaccgctgcataaggcaccagataggtggttaccgagccgtccgcctctttcacgctgacatcaagatctgctccaccaccggccaactgcaaatctgtaatcgcgaacgggccaggaggaacctctttctgataaaccacaaaccatttctcaaatgttaatggtctgaaacggataggtttcccaataatattattttgcacaacaccaagtgtttttaaggcagtctgattaacaaactgaacccgattttcatcatctacaactaatacgccctgatccatattatcgatcat

SEQ ID NO: 143257 - DNA, 1470 bp, Homo sapiens
atggcatcgttttatctgcgttccaaccgccacggcaaaaactttggcttataccgtacccgtatgcgtgatgagcaacagtgggaagagttaattccgccacgcgaaaacatcatgctggaagggtttacgctgtttaccgactggctggtggttgaagagcgtcagcgcgggttaaccagtttgcgccaaattaaccgcaagacccgggaagtcattggtattgcctttgatgatccggcctatgtgacctggattgcctacaatccagaacctgaaaccgcgcgattgcgttatggttattcttccatgactacaccagacactttgtttgaactggatatggataccggtgagcgtcgtgtattaaaacaaacggaagttcctggtttttatgcggcgaattaccgcagtgaacacctgtggatagtcgcccgtgatggcgtcgaagttccggtttcgttggtctaccatcgcaaacattttcgcaaaggacacaacccgttgctggtgtatggctatggttcttacggcgcaagtattgatgccgatttcagttttagccgcttgagtttgttagatcgtggctttgtctacgccattgtccatgttcgcggcggtggttgcaaaatcaacctggtcgtcgataacggcaaaatcgtccgggcggaggcagcgcaggggaaaaccaaccagggtaccctgtgtctgaagggttattatggctgggacttcattaacgatacccagatcctgaccccgcgcctgaaaacccccatgatccgtcgccagcgtggcggcaaactcgaacctgtttcctgggatgaggcactgaattacgttgccgagcgcctgagcgccatcaaagagaagtacggtccggatgccatccagacgaccggctcctcgcgtggtctgcaccaatcggtcggtaatggcgcaatgagcaatgctattaacgaaattgataataccgatttagtgttcgttttcgggtacaacccggcggattcccacccaatcgtggcgaatcacgtaattaacgctaaacgtaacggggcgaaaattatcgtctgcgatccgcgcaaaattgaaaccgcgcgcattgctgacatgcacattgcactgaaaaacggctcgaacatcgcgctgttgaatgcgatgggccatgtcattattgaagaaaatctgtacgacaaagcgttcgtcgcttcacgtacagaaggctttgaagagtatcgtaaaatcgttgaaggctacacgccggagtcggttgaagatatcaccggcgtcagcgccagtgagattcgtcaggcggcacggatgtatgcccaggcgaaaagcgccgccatcctgtggggcatgggtgtaacccagttctaccagggcgtggaaaccgtgcgttctctgaccagcctcgcgatgctgaccggtaacctcggtaagccgcatgcgggtgttaacccggtt

SEQ ID NO: 143258 - DNA, 1776 bp, Homo sapiens
tcgcgcgtaatgttgctcactgatcaacgccgtcattgcgcggctgatcgacgcttcaatatcgatagccggatagtgcccggcttccgccagtcggcgagacagcacaatgtgaccgtcgaggatcgcccgcgcggagtcggcaatcggatcctgctggtcatcgccagcgatatccagcgggtccagcgccacgccgcgcaggtagtaatcgaacggtgaacggctggcgtgatgatattgctccagatgctgaccgataaaccaggcttcatctgtactggtaatgtcttgtgctgccagtggcgctttggcgacgtccggtaacggcaacgcttgcggctgatgttcctgataactcagtacaatattgccgtcggcatcggagagctcaatggtcagcctttcaggattgataccgtgcaacacgccctggatggcggtcgcaggcatcagtgccacggcatcatcaagtaacgcgttgcatttaccgatttcgcggatcgccaggcggtatccgttcaacggagagatggcatacagcccccactcaatcccccgcttactacgctggagttttatcaccgcatcgcgggaggcattttgcaccatgcccaaagaatgataaggcaggaaatactgctcaaaacgcttctcttcgtaagcatcaagccaggtaaaatcgggctggttatcggcaaaaataccggtcatcagttcgatatacgggccgttattgtcggtcagactcttatcccacgcctggccaaattcactgtgtccccaactccactgttttttacctggcgcaatatggagtgcctcttcattgcttaaatctggcaacaggccattaatacggctggcgagcattgttttacctgttcccggcggcccaatcagtaaaaggttgtgcccgccagcagcggtaatttccagtcctcgctttccttgttcctgaccgataacatcactgagatcatgttgtagcgcccggatacgtggacacacgtcatgtacgtgctgcaccatgctgacaagccaaatctgtatcatggattgccggagaacccggaaatcagcgaaaccgtgaaattctggaaaggcatctggaaaccgctcgcggctgttggctttgcggctacctttgcggccagtatcttccactacgtgggtgtcggtccgaaccgtgcggatgaggaagagaataatctgcacgaagagaaagacgaggagcgcaaatgttcccaagacatacaactggtcaaggaacgcgtcatttttctgactggccaggttgaagaccacatggctaacctgattgtggcgcagatgctgttcctggaagcggaaaacccagaaaaagatatctatctgtacattaactccccaggcggggtgatcactgccgggatgtctatctatgacaccatgcagtttatcaagcctgatgtcagcaccatctgtatgggccaggcggcctcgatgggcgctttcttgctgaccgcaggggcaaaaggtaaacgtttttgcctgccgaattcgcgcgtgatgattcaccaaccgttgggcggctaccagggccaggcgaccgatatcgaaattcatgcccgtgaaattctgaaagttaaagggcgcatgaatgaacttatggcgcttcatacgggtcaatcattagaacagattgaacgtgataccgagcgcgatcgcttcctttccgcccctgaagcggtggaatacggtctggtcgattcgattctgacccatcgtaattga

SEQ ID NO: 143259 - DNA, 3049 bp, Homo sapiens
ttaagcagtactggtttgccctgagtcagcacatgccgcctgataaaactgccccggattgtccagtggattcgtagacagaaacttcggcacaggcttgccaatgagcgccgattccagattggtcggatcatccccttcggcattacgctccagctgccacagctattccgcttgtatcgccaggaagataatcaacggaattaacaatactttgcgcttcatacggcctccggcgcagttttttgcggactcacgcgcttacgatagcgaggatcaaacagacacagcagtccgcccaacgccatcatcagcccgcccgcccaaatccagcgaacaaatggtttgtagtaaagacgcacggcccacgcgccgttttccagctcttcaccgagggccgcgtacaggtcacgcgtgatgccgccgtcaattgccgcttcggtcatcatcgacccggcagtgttgtaataacgtttttccgcatacagcaccgtttccggcttgccatcgcgcgttacgccgatagtcgccacaccgccacgccagttcgggccagtcacctctttgacatcacggaaggtgaagcgatattcatgaatatcgacgctatcgccggacttcatgcgcacatcacgctcaacgctatagttctggctaaaggcaatgccaacaattgtctcgtttttgttcggtttgacaatatactgggcatcctcgatatcttgtagttcccccgttgtgaggtacgctgtgtctcttaccaaattatttgcggcgaatatttgtggataatcgccggggttattacccaatgtgtgacccctcttacacctgtcgtgggcctcgcacataatagttgcgggcaacacatttacgcgtgcgattatctcgggattagcgcgcgtaactctccgtgggtcgtttttctggcacaactggctccttaggctaagtttacggtctatatctatgcggcggccctttggacgaaattcagggatagttgcagatcccgtgacggatgttccgatccaggctgcctgaaagcgtgcccggcggaaggtgcaattattcagtatgccaacggtatcgtcgacttccagtccgagcagtgcattggctgcggttattgcattgcgggctgtccgttcgacattccgcgcctcaacccggaatacaaccgcgtctacaaatgtacgctgtgcgttgaccgcgtggtggttgggcaagaaccagcctgcgtgaagacctgcccaacgggcgcgattcacttcggtacgaaagagtcgatgaaaacgctggcgagcgagcgcgttgctgagctgaaaacccgcggttacgacaatgcgggtctgtacgatccggcaggcgtcggtggtacacacgtcatgtacgtgctgcaccatgctgacaagccaaatctgtatcatggcttgccggagaacccggaaatcagcgaaaccgtgaaattctggaaaggcatctggaaaccgctcgcggctgttggctttgcggctacctttgcggccagtatcttccactacgtgggtgtcggtccgaaccgtgcggatgaggaagagaataatctgcacgaagagaaagacgaggagcgcaaatgaaacgacgtgacaccatcgtgcgctacaccgcgccggaacgtatcaaccactggatcaccgccttctgcttcatcctggcggcggtgagcgggctgggctttttgttcccgtccttcaactggttgatgcaaatcatgggcacaccgcagctggcgcgaattctgcacccgtttgtcggcgtggttatgtttgcctcgttcatcatcatgtttttccgttactggcatcacaacctaatcaatcgggatgatatcttttgggcgaagaatattcgtaagatcgtcgtcaacgaggaagtaggtgacaccgggcgttataacttcggtctgcaccaatcggtcggtaatggcgcaatgagcaatgctattaacgaaattgataataccgatttagtgttcgttttcgggtacaacccggcggattcccacccaatcgtggcgaatcacgtaattaacgctaaacgtaacggggcgaaaattatcgtctgcgatccgcgcaaaattgaaaccgcgcgcattgctgacatgcacattgcactgaaaaacggctcgaacatcgcgctgttgaatgcgatgggccatgtcattattgaagaaaatctgtacgacaaagcgttcgtcgcttcacgtacagaaggctttgaagagtatcgtaaaatcgttgaaggctacaaccgcccggagctccggttgaagatatcacccggcccgtcagcgccaagcctcgcgatgctgaccgtaactcaaccgggtgttacctggtttgattgcagcatcaacgccagactgaatctggtcgccagctttcaggcctttaggggccaggatgtaacggcgttcaccgtctttgtacagaaccagcgcgatgttcgcggaacggttcggatcgtactcaagacgttcaacaactgccgggataccgtctttgttgcgtttgaagtcaacaatacggcgttccgatcgcagccgccggaaggcgcagcggaagaggtgcgggcaggtgatgccgcagcaccgtcgctcgatccggccactattgcagccaataacaccgagtttgaaccggaacctgcaccggtcgccccaccgaagccgaaaccggtggagccgcctaaaccgaaggttgaagcaccacctgcgccgaagccagaaccgaagccggtcgtggaagaaaaagctgcaccgacgggtaaagcctatgttgtgcaactgggtgcgctgaaaaatgccgataaagtgaatgagattgtcggtaagctgcgcggtgccggttatcgggtttatacgtcgccatccacgccagtgcagggtaaaattacccgtattctggttgggccggatgcctcgaaagataagctgaaaggttcgctgggtgagttgaagcaactttctggcttaagtggcgtggtaatgggctatacgccgaattaa

SEQ ID NO: 143260 - DNA, 3667 bp, Homo sapiens
atgggctgttccaggaacaagccctggggtaaaaacctggcgcaaccccattacccccggttaataacgatttcaccggttacgctggagttgtcggccataatcaggacgtgtgcgaaaaacgggccagcacaacgctttggctggatgttgggcggagcagtggactggatcgtgacctatcagaccctgaatgtgaagaatgacctgtcacacttcccggtgccattctttgacccgagcgataaccgcaccaacaccttgccgatggtctttgcgggtgcgccggatgttgggctgcaacaagcctctgccattgtcgcctcgtggtttggttcgcgttctggctggcgtgggcagaacttcccggtactctataaccaactgccggatcgcaatgccattgtctttgcaaccaacgacaaacggccggacttcctgcgcgatcatccggcggtaaaagccccggtgattgagatgattaaccatccgcagaatccttacgtcaaactgctggtggtgtttggtcgtgacgacaaagacctgttgcaggcagcgaaaggtatcgctcagggtaacattctgttccgtggtgaaagcgtggtagtgaatgaagtgaaaccgctgctaccgcgtaagccgtacgatgcgccgaactgggtacgtaccgatcgtccggtcacatttggcgaactgaaaacctatgaagaacagttacaatccagcggtcttgagccagcagcgattaacgtttcgctaaacctgccgccggatctctacatgatgcgcggtaccgtgtctcctgttcgtgttgctttctggttgttgtccgtcttttcgctcttttgctctgcttccttggtccttgcttttttctctgtgttttctttttcttgtctctttcttgttgttctctcgcttgagagagaagacaggttgaaaaacaggattgatatgacgaatctacccaagttctccaccgcactgcttcatccgcgttattggttaacctggttgggtattggcgtactttggttagtcgtgcaattgccctacccggttatctaccgcctcggttgtggattaggaaaactggcgttacgttttatgaaacgacgcgcaaaaattgtgcatcgcaacctggaactgtgcttcccggaaatgagcgaacaagaacgccgtaaaatggtggtgaagaatttcgaatccgttggcatgggcctgatggaaaccggcatggcgtggttctggccggaccgccgaatcgcccgctggacggaagtgatcggcatggaacacattcgtgacgtgcaggcgcaaaaacgcggcatcctgttagttggcatccattttctgacactagagctgttcggggatattcacgccggggtcgtcacatccgaacggctcgtaaatattgcatccggcgaattttggatccaacaggcccccgtttggctccagaggggtaaattaacgaggcccctgacgtcattccaacttccgcggcgatccagtgggaaccatgcggcaacaacttgcccggacccggtcacgcactgtgcacaacggctttatcagcagaacctgtgtaccacaccaccatgttctccgagtggtatggcgatggatctgctgacaaaacaggatggctcggtggtgggatgtaccgcactgtgcatcgaaaccggtgaagtggtttatttcaaagcccgcgctaccgtgctggcgactggcggagcagggcgtattaatcagtccaccaccaacgcccacattaacaccggcgacggtgtcggcatggctatccagtgccggcgtaccggtgcaggatatggaaatgtggacagttccacccgaccggcattgccggatgcgggcgtactggtcaccgaaggttgccgtggtgaaggcggttatctgctgaacaaacatggcgaacgttttatggagcgttatgcgccgaacgccaaagacctggcgggccgtgacgtggttgcgcgttccatcatgatcgaaatccgtgaaggtcgcggctgtgatggtccgtgggggccacacgcgaaactgaaactcgatcacctgggtaaagaagttctcgaatcccgtctgccgggtatcctggagctttcccgtaccttcgctcacgtcgatccgagccgattccggttatcccacctgtcactacatgatgggcggtattccgaccaaagttaccgatataatgatacgcgtgatatggttccgatcaatggttcgatccatcgaattggtcgagagccccactatcattatcaaaggggacagcaatatataggtctatgccgtaattgtaatgttatcgatacacatatttgtatttatctggttgatcagcccattatggacgatataagaaggcttttgctatattctgagatatctagtgcaataatatggctattaccagtagtgcagggcgagcactatatgttagtagatccagataccaacgaacgagaagagagaggaagaagcgagacgcggggatttccgcgggttccacttgggcgaactgtgtccaccgtgtggtaccctctgtctaacgctgccaccttggcggcaactagatgctctcgctcccctcatgctttcgcggaaccctcctcgaacaacggcttcattaccgcaacaccattagggcgaacccatttcctgggtatggcgtttccgccatcagcatgttggcgactgctacgcgcagaaccagaaagagttgaagcagtactatcagcaagtgggatgaacaaggcaatgcgctgtggcgtgtcgctcatctgcaacttccgtctggattacgcccctattgagaaacagtgggatttgcacttcgctgattactttgcggaagatctcaagctgctcgccccgttagcaaaagatgggctggtggatgtggatgagaagggaatacaggtgacggcgaaaggccggataaggcgtttacgccgcatcaggcatctgagcatgatgcctgatgcggcgctggtcgcgtcttatcaggcctacgactttctccgcatccggcataaacaacgagcttcagctaaacagcccaatcattgcggcacacagcacggcagcaacggcagtttgcggaccctgtggaattctatagatagcggtagtgtactcacttggtgcgcgtcgctaattttcagtagcaggaaatcgttatcgcctatccagcttgtaaggtctgtcgaccgtggcgatgtgaaaaagagatattcgatgcgcgaattttcattgggcgaaacacacagtgaagccgagtttcgcgagctgctggaacagaacccgtctttcgtcttctttaaaccgcaatcttttgctccggtgaaaggggcaagtgcggtgccgctggttggtcgcgcgtcagttgcctctgatcgttccattattccgccaggtactaccttgctggcagaagtgccgttgctggataataacggcaaatttaatggtcagtacgaactgcgtctgatggtggcgctggatgtcggtggtgcaatcaaaggccaacacttcgatatctatcaagggatcgggccggaagccggacaccgcgcaggttggtacaaccactatggacgtgtctgggtgctgaaaaccgccccgggcgcag

SEQ ID NO: 143261 - DNA, 2157 bp, Homo sapiens
ttaatctggcgaatacgctccgccataacttccgctttgccagcccaacgttatcgcgcagggcatgaatttgccgattggtattgtgacgcacacatcatccatatcgataagcgtgattgcgccaatccccgtcgcgccagcgcttccgccgcccaggaaccgacaccaccgataccaaccaacaaatatgcgcgtcagcaaacagttgcaacgctttttcaccatacagagcgctgtgccaccaaaacgctgacgccatgcatcactgcgcggtgtccggcttccggcccgatcccttgaagatatcgaagtgttggcctttgattgcaccaccgacatccagcgccacatcagacgcagttcgtactgaccattaaatttgccgttattatccagcacggcacttctgccagcaggtagtatgacattgcgcgcgtcattgaagtcaggtcttccagcaaatccatcatatgcgccagcggccagcgcacatgtggtgcggctctggctcatcgccttccagtgattccgggtagagatcttgcgcaccacgatattcattttgctggaaaagtaagacggtgccatgctgagctctaattcgtaggattcagttcccactgcgtattcgcggatcagatcaggtgatcgtccacaatcggcacaatcatcactgcttcccggttgttggacgcattcgttcataaacacgccgcacgccattgctgaactccagtccacgctctcgacggtaaacagtcgggaacgggctacagtttcaacatcagaatggtgggtttttgtaatgatttgctcatcgtgggatctatgctggaaatcagcggttattgtgcgatatcggacacgctttcggcaatgtgaatgcatgttatttacatttggggatcctctagagtggacttcacgagggaacgcttcaccaatcacttcagcggcatagtgaagttttgacaactgcggtagccagttcgcggcgtagcgccagaaaccaccgatttcggctcgatagttcagtcgggctgtaggtcgcgccgcagacttcgcagttatcgccgtttgatccggggatttacatttcgggcaggtgcctttcacaaaacggtccgcaggaacatgcctttttccggatcgtacagcaagctgctgagctttcagcatgatcggtgtaccgtggcatcgtcggcgcagatgaagttgacctcgtggccgcgcattcgctggaacggacccagacatcagcctggatgtgctccagcatatggccgaggtgattgagccgttagcgtacggcagtgcgcacgtcaccagaattttcttcggacttgagtcatagtaggcattacttctaatagtgtaacggtagcggccgtgagttcttggtgtcgcacctgggtacctgtttctgttttgtgcttgaattgttatcctgcctccatggctttggtgcgcggtgtaatacggggtgtgtgaacttgcttgagcctttgccctaactgcgccgcgatttttatattcgcttttggggcggttatattctgtatcacctcggtgggttttttgttccccccaatggtgtacaagtctggactccggttttttgtgttcacctaaatgcgggatactggcgttccacaaaggttgcgcgcacccagaaggtctttgtcggccaaactgggacctgcttgtccctttgcctatattgtgccccatatctggtgtcgctggattggctggggcacatgtgtgtgcctggctatttgtgtgtgtgtgtgcgtggctgattgaacagcaatctgtgcaatgctgtgtgtgtgggcaatgacactgggcaatgacctgtgggtttgaggttgtattgtgtggtttgattggtgctggtgcctgcgcaatgcctgtgcgactcctaggaaactggtggaaaggtctgtcgcaatggtatgattggcaaggatgggctgtgatgctggtgtggtgaactgctagggtgatgacggctgtgacgtgcactgatgcaacatatgtgggaggatctgcaaatgataatggttgtcgtggaataaatgtggatgcagaattacgttgttgaaagactcgtgcatctagcttagtctccgggcactcggtgggctgcat

SEQ ID NO: 143262 - DNA, 2367 bp, Homo sapiens; identical to SEQ ID NO: 123315

SEQ ID NO: 143263 - DNA, 2187 bp, Homo sapiens
atgggcggtgttctctttggtctgtcgatcggttcgatgagcggtattctctgctcggcgtggttagtgaaacgctttgggacacgtaatgtcatcctggtcacgatgtcctgcgcattgatcgggatgatgatattaagtctggcactctggctgacatcgcccctgctctttgccgttggtctcggcgtctttggggcaagttttggttctgcggaagtggcgatcaacgttgaaggtgctgccgttgagcgagaaatgaataagacggttttgccgatgatgcacggtttttatagcctgggcacgctggcaggcgcaggtgtcgggatggcactgacggcctttggcgttccggcaacggtgcacattttacttggcggcgctggtgttgtggtgctggcgatggccttttccgaaggttctgccaacgactggttacccttattaatggttgacggtcacggttttagccctacttccggctcgctgatttatgccggttttaccctggggatgaccgttggacgcttcaccgtcgtgatgcgtttcatgctgaaaggggatacccagaccccgcagcgcgaaggctggacgcgtcgaacctttcgcgatcttatccgtgaatatcgactgaccgggcgtgcgcgacgtctggctattcgccccggatcgccaatgattggtcaacggctggatgatctcaaattacgtgagcgttatggcgctaacgtcatcggtgttgaacgctggcggcgttttcgtcgcgttatcgtgaacgttaatggggtttctgaatttcgcgcgcgtgacgttttgcttattgatatgtctgcggctgatgtcgatctccggccattttgtagtgagccattgctggagccgatggtattgcgcggcgagtatttttctgaccaggcccttgatgtgggcatggcagagatttcattaattcctgagtcagaactgattggtaaatcggtgcgcgaaattggttttcgtacccgctacggactgaatgtggtggggctaaagcgccatggcgtggcgctggaaggttcgctggcggatgagcctctgctgctgggcgatatcatcctggttgtgggtaactggaaactgatcggtctggttgcccgtttcctcgggagtttgctcatcgcgccccgcgtcagcgatccttcccgcctgatttccgccttgcgcgtgctggcactgctgacacttctctttgctgtcgccttctgggcgggggcgcacgtagcgtggctgatgctggtgatgattggctttaacctctttttctcaccactgggggcacatgcggcctattacggttttagcgccatttactggcaggcagctggctactcggcctcggcggtggggtatttgtggtcgctgggcgtggtggcggaagtcatatctttgcggtaccgagctcgagtcgtatcatgtagtggtgcaaggccttgtgcacaacctgggccggaatcaattttgctctccgacgtcagcggcattctcgacggcaaagggcaacgcattgccgaaatgaccgccgcgaaagcagaaccactgattgagcagggcattattactgacggcatgatagtgaaagtgaacgcggcgctgaatgcggcccgcacgctgggccgtccggtagatatcgcctcctggcgtcatgcggagcagcttccggcactgtttaacgcagatcaacggttcaaacaattcaacgactcactgcgctttgattaccgtctggcggagcaggatattgttggctctgtggcctggtccaaagccctggtcacggtaggcgtgttaaccgcagaagagcaggcgcaactggaagaggcgctgaacgtgttgctggaagatgttcgcgccaggccacaacaaatccttgaaagcgacgccgaagatatccatagctgggtggaaggcaaactgatcgacaaagtgggccagttaggcaaaaagctgcataccgggcgtagccgtaatgatcaggtagcgactgacctgaaactgtggtgcaaagataccgttagcgagttactgacggctaaccggcagctgcaatcggcgctggtgaaaccgcacaaaacaatcagacgcggtaccgactatcccaatcttgtcataagacccatgcggcaaaatgggggttctctggtctaa

SEQ ID NO: 143264 - DNA, 1370 bp, Homo sapiens
acggtattgaacgcaaactggaaatagaaaaagcggtcactgacgttgcggaactgaacggtgaattacgtaatcggcagtatcttgtcgagcaattaacaaaagcacatgtcaacgatgtgaattttacgccgtttaaatatcagttaagcccgtcattgccagtgaaaaaagacggtccgggtaaggcgattattgtgatcctttccgcgttgatcggcgggatgttgtattgtcgcgtctgcattaagcggaacgctgacagtccagaagtattttccggcttttctgatcctaacgttgtcctgattgccgccgtgtttattattggcgatggtttggtccgtaccggtgttgccaccgtaatgggaacatggctggtcaaagttgcgggcaatagtgaaatcaaaatgttggttttgttgatgctgaccgtcgcggggcttggcgcgtttatgagttcaaccggcgttgtcgctatctttattcccgtggtgttaagcgttgccatgcgtatgcaaacgtcgccgtcacgtctgatgatgccgttaagttttgccgggctgattagcggcatgatgacgctggtggcgacgccgccgaacctggtagtcaacagtgaattgctgcgtgaaggctatcacggcttcagtttctttagcgtaacacctattggcctggtcgtgctggtgctgggtattttgtatatgttagtgatgcgtttcatgctgaaaggggatacccagaccccgcagcgcgaaggctggacgcgtcgaacctttcgcgatcttatccgtgaatatcgactgaccgggcgtgcgcgacgtctggctattcgccccggatcgccaatgattggtcaacggctggatgatctcaaattacgtgagcgttatggcgctaacgtcatcggtgttgaacgctggcggcgttttcgtcgcgttatcgtgaacgttaatggggtttctgaatttcgcgcgcgtgacgtttcgcttattgctatgtctgcggctgatgtcgatctccggcaattttgtagtgagcgcttgctggagcctgatggtattgcgcgattctctttaattcctgagtcagaactgattggtgaatcggtgcgcgaaataggtttgcgtacccgctacggactgaatgtggtggggctaacgcgcactggcgtggcgctggacggttcgctggcggatgagcctctgctgctgggcgatatctcctggttgtgggcactggaaagtgatcggtatgcggccatgctgggccggagtcggagcctgacttaccggagaggtgatgaacattgccgtgccagcaggtcccctgcattctggcgggcgaaggggggtaagctccgataa

SEQ ID NO: 143265 - DNA, 2352 bp, Homo sapiens
atgatcgctattactggtgccactggccaacttggtcactatgttattgaatccttgatgaaaacggttcctgccagccaaatagtggctatcgttcgtaatccggcaaaagcccaagccctggcagcacaaggcattaccgtgcgtcaggctgactacggcgatgaagccgcactgacatctgcacttcagggagtggaaaaactactgctgatctcttccagcgaagtgggtcaacgtgccccgcagcatcgtaatgttattaatgccgcaaaggcggctggcgtgaaatttatcgcttataccagcctgctacatgcagatacctccccgctcggcctcgccgatgagcacatcgagacggagaaaatgctggctgattctggcatcgtttacaccctgctgcgcaacggctggtacagcgaaaactacctcgccagcgcccggcacgggggtctctcaatggactgccgatgcagtcactcaaaaagtattcttcgcggatcattgtcttctgaatttttttgtagggaaaaaatggttttcggttccgactctgccattaatatggcaagtcaacacattaatatccatacaaccggtgtgatgtcggaaaatgtcaccactgcaggggggaaaccggggaatgtactgaccgttaacggcaactataccggaaacaatggcctgatgacgttcaacgcgacgctgggcggcgataattcgcccaccgataagatgaacgtgaaaggcgatacccaagggaacactcgcgttcgggttgataacattggcggcgtcggtgcacaaacggtcaacggtattgaactcattgaggttggcggtaattctgcaggtaacttcgcgctgaccaccggaactgtcgaagctggggcttacgtctacacgctggctaaagggaaggggaatgacgagaaaaactggtatctgaccagtaaatgggacggcgtaacgccagcggatacacccgatcccatcaataatccccctgttgtggatccggaaggcccatcagtttatcgcccggaggccgggggatacaattccttattaatggttacccatggaaaagttataaacggcgggagggggatcctcatagagtccgatggaacccggggacgcgcgttagtcaagcggctcgtgtgccaggcacggactcgtattctggttgtgctcttgtcgccggtgtatgccgcagaccatcgaagcaatccagcacccgaatgcggcgcagtgaacaagatcgatagaccagaagctgatccggatcgcgttaagtacgtactctcccagtacggcatcctgccggaagagtgggtcggtgaaagccagttcgtacacggatctgcgaaagcgggtaccggtatcgatgaactgctggacgctatcctgctgcaggcggaagttctggagctgaaagcggtacgtaaaggtatggcgagcggtgcggttatcgaatccttcctcgataaaggtcgtggtccggttgctaccgttctggtacgtgaaggtactctgcacaagggcgatatcgttctgtgtggcttcgaatacggtcgtgttcgtgcgatgcgtaacgaactgggtcaggaagtgctggaagcgggtccgtccattccggtggaaatcctcggcctgtccggcgtaccggctgcgggtgatgaagttaccgttgtacgtgacgagaagaaagcgcgtgaagttgcactctatcgtcagggtaaattccgcgaagttaaactggcgcgtcagcagaaatctaaactcgagaacatgttcgccaacatgaccgaaggcgaagttcacgaagtgaatatcgtcctgaaggcagacgtacagggttctgtcgaagcgatctccgactccttgctgaaactgtctactgacgaagttaaagtgaagatcatcggttctggcgtaggtgtgattgaagcggaaagcctggatctgcgttactactccgtcatctataacctgattgacgaagtgaaagcggcgatgagcggtatgctgtctccggaactgaaacagcagattatcggtctggcggaagttcgtgacgtgttcaaatcgccgaaatttggtgccatcgcaggctgtatggttaccgaaggtgtggttaaacgtcacaacccgatccgcgttctgcgtgacaacgtggttatctacgaaggcgagctggagtccctgcgccgcttcaaagatgacgttaacgaagtccgtaacggtatggaatgtggtatcggcgttaagaactacaacgacgtccgcactggcgatgtgatcgaagtattcgaaatcatcgagatccaacgtaccattgcttaa

SEQ ID NO: 143266 - DNA, 1493 bp, Homo sapiens
ttagtgaacgcggttaaaaataaaaggcatcacggtggtgaataatgccgctttcggccaagccggattaatcgccgtcaattcagcgcgagcagactcatattgcgcaacctccccgagtcccgcggacgccagcatcgccaccatcaggcatttttctttatgctgctgttgtaaatcgccatacagcgacaacaagtcaggttgcgagacggcaaagaaatccgcttcgatactggttttcgccatctcttgcgcccactgtttcatttcactaaacagttgctgtgcggtttgttgttcgcccagcagtcgcagcgccatcccttgccagaagagataatcaaccggctgatcgttgtaataactgtgaatgttaatagtgcgatcgccggtcgccgccagacgtaaacaacgcgtcgcttcagtttcatcgccctgcgcgttggcgcatatcgcctgccagaaccagatgtcgttatcagtttgccccggtaaacggccttcgcttaaattctccggataatgcagcgcggcatgaagcagttcgcaggcctgctgcggctgtctggcatcaagatgctgccaagcgcgtaataactgggtgagctgctccatgctgcgggcagtttcttccagcgcggatgcctgctgttcagtacgggaggaaagatcggtgttgcccgccgcaatttcacgggtaccggcatagatggcatctgaaccttcgcggacatgagtgacggtgtcagtcaaagagcgttgcatatgtgaaacgctctgcgccaggtcgcccatttcactgcgcccgtcaatggtcagggtattcgccaggttaccaccggcgatttcgcgaatgtgagcaataatttttgccagcggagtaagcaacatacggcgaatgccgtaccacgccaccagcagaatcaataccaccaccagcgcgataaccgccagttgccactgggcaaatcggtaatcatctgcgttgtcagtgacgatatcgcgatacagtttttcactgctgagggcgtactgagcaaacgcttcgcccattgccttatgccttccctgggtgggctaagcaaaataggacccagtatgccattatttagaataatcagccagttcagttaacgctgggtaatagtttttatatttttcatcaatattacgactggtagcgaccatttcaggtaacggtgccatgcttttgaattttttataatgcgtcgctgcctgcgccaatgttttcctggcgctatcgagcaattcaactttggcgttactttgttgattggaggaatccatcatcatccgtaccgctgaacgactcaggttaatgcgcgtttgcagcattaaatcccaggttgacgtcagctcgccctgctgttcccgtaattgattggaaaccacaaagctcttctggctatggtgaagggaagaaaataacagactgccggaaatgggtagtcacagtgcgaataccccca

SEQ ID NO: 143267 - DNA, 3373 bp, Homo sapiens
atgatcgctattactggtgccactggccaacttggtcatctgtttattgaatccttgatgaaaacggttcctgccagccaaatagtggctatcgttcgtaatccggcaaaagcccaagccctggcagcacaaggcattaccgtgcgtcaggctgactacggcgatgaagccgcactgacatctgcacttcagggagtggaaaaactactgctgatctcttccagcgaagtgggtcaacgtgccccgcagcatcgtaatgttattaatgccgcaaaggcggctggcgtgaaatttatcgcttataccagcctgctacatgcagatacctccccgctcggcctcgccgatgagcacatcgagacggagaaaatgctggctgattctggcatcgtttacaccctgctgcgcaacggctggtacagcgaaaactacctcgccagcgccccggcagcactggaacacggcgtatttatcggtgcggcgggcgatggcaaaatcgcctcagcaacgcgggcagattatgcggcagctgcggcacgcgtgattagcgaacgcggtcacgaaggcaaggtttacgaactggcgggcgatagtgcttggacgttgacacagttagcggcagagctgaccaaacagagcggcaaacaggttacctatcaaaatctgagcgaacgcgatttcgccgcggcactgaaaagcgtcggactgcccgacggactggcggatatgctggcggattctgacgttggcgcatcgaaaggcggtctgtttgatgacagcaaaacacttagcacattgattggcccaccaacgacaacagtgcgtatggatgcggtcgctttgtttgttattgtcgcgtttgcattaagcggaacgctgacagtcccagaagtattttccggcttttctgatcctaacgttgtcctgattgccgccttgtttattattggcgatggtttggtccgtaccggtgttgccaccgtaatgggaacatggctggtcaaagttgcgggcaatagtgaaatcaaaatgttggttttgttgatgctgaccgtcgcggggcttggcgcgtttatgagttcaaccggcgttgtcgctatctttattcccgtggtgttaagcgttgccatgcgtatgcaaacgtcgccgtcacgtctgatgatgccgttaagttttgccgggctgattagcggcatgatgacgctggtggcgacgccgccgaacctggtagtcaacagtgaattgctgcgtgaaggctatcacggcttcagtttctttagcgtaacacctattggcctggtcgtgctggtgctgggtattttgtatatgttagtgatgcgtttcatgctgaaaggggatacccagaccccgcagcgcgaaggctggacgcgtcgaacctttcgcgatcttatccgtgaatatcgactgaccgggcgtgcgcgacgtctggctattcgccccggatcgccaatgattggtcaacggctggatgatctcaaattacgtgagcgttatggcgctaacgtcatcggtgttgaacgctggcggcgttttcgtcgcgttatcgtgaacgttaatggggtttctgaatttcgcgcgcgtgacgttttgcttattgatatgtctgcggctgatgtcgatctccggcaattttgtagtgagcaattgctggagccgatggtattgcgcggcgagtatttttctgaccaggcccttgatgtgggcatggcagagatttcattaattcctgagtcagaactgattggtaaatcggtgcgcgaaattggttttcgtacccgctacggactgaatgtggtggggctaaagcgcaatggcgtggcgctggaaggttcgctggcggatgagcctctgctgctgggcgatatcatcctggttgtgggtaactggaaactgatcggtatgctggccaaacagggccgcgacttcgtagcgctgaacttaccggaagagctggccagcgagccgtcaggccaggaatttctggtatttacccttggtgatgaagagtacggtattgatatcctgaaagtgcaggagatccgtggctacgatcaggtaacacggattgcgaacacgccagcgtttatcaaaggcgtcacgaatctgcgcggcgttattgtgccgattgttgacttacgaattaagttcagccaggtggatgtggactataacgacaacacggtagttatcgtcctgaatctcggacagcgggtggtcggcatcgtggttgacggcgtctcagacgtgctttcattgacggcggagcaaattcgtccggcaccggaatttgccgtgacgctttcaacagaatatctcactggactgggcgcactgggcgaccggatgttgattctggtgaacatcgaaaaactgctgaacagcgaagagatggcgctgttagatagcgcggcgtcagaagtggcccagaagagctttgtggtttccaatcaattacgggaacagcagggcgagctgacgtcaacctgggatttaatgctgcaaacgcgcattaacctgagtcgttcagcggtacggatgatgatggattcctccaatcaacaaagtaacgccaaagttgaattgctcgatagcgccaggaaaacattggcgcaagcagcgacgcattataaaaaattcaaaagcatggcaccgttacctgaaatggtcgctaccagtcgtaatattgatgacaaatataaaaactattacacagcgttaactgaactgattgacctggcagatggaaggtgccgacaactatgtaactccctgatggataacttcattatggatgtgcagggtagtgggtatatcgactttggtgatggcagtccgcttaactttttcagctatgcagggaaaaacggtcatgcctatcgcagcattggtaaggtgctgatcgaccgtggcgaaagtgaaaaaagaagatatgtcgatgcagccgattcgtcactggggcgaaacacacagtgaagccgaggttcgcgagctgctggaacagaacccgtctttcgtcttctttaaaccgcaatcttttgctccggtgaaaggggcaagtgcggtgccgctggttggtcgcgcgtcagttgcctctgatcgttccattattccgccaggtactaccttgctggcagaagtgccgttgctggataataacggcaaatttaatggtcagtacgaactgcgtctgatggtggcgctggatgtcggtggtgcaatcaaaggccaacacttcgatatctatcaagggatcgggccggaagccggacaccgcgcaggttggtacaaccactatggacgtgtctgggtgctgaaaaccgccccgggcgcaggtaacgtctttagcggctga

SEQ ID NO: 143268 - DNA, 168 bp, Homo sapiens
atgatgcccgccatcgcgcttattgtgtcggttattgcctcggtagtcattggcggagcggggagtctggcgttcccgctgcctgcattaatctggtgtgcagtgcgctatacgccgcagatacatcttcagggtaaatttctggtagtggaattgcctgatcaaaag

SEQ ID NO: 143269 - DNA, 1104 bp, Homo sapiens
ttagggagaacctacatggccataagcatcaagggtgttaataccggtgttattcgcaagagtaataatttcattgcactggcgctgaaaattaaagaacctcgcaataaagaatcgttgttctttatgtctgtcatggaactgcgcgacctgctgattgcgctggaaagtcgtctgcatcaaaagcataaactggatgctgctgcacaccttcagtatgagcaagctcgcgataaagtcatctttgtcaccggtgcggtggaaatcgtactggtggcaaattcggtgattgatatctcggtcggttcgccgttctccattccgcaaatgttctccgcacgtctcggtattgccacgatggcgatatgcccaattatggtttcttttagcgtggcagcgatcaattcgcgtgatgtcataaccaccgcgttcgttagagacgaaacgttcgatctccacggtcgcggagtacggcagttcagcgccgaggaaacgcatcagtttttcgcggatgatttcagacgccatacaacgctgtgagcgatcggtgatgtaatcttccgggaagtgatgagtcgcttcaggtagatgcttacgcacgattgccgcaatagtgtcaacattcagcccggtttcggcagagattggcacgatatcgaggaagttcatctggcttgccaggaactgcaggtgcggcagcagatcggctttctcctgcacgttgtccactttgttcaccgcgaggattaccggcgctttgccttcgcgcagtttgttgagcaccatttcgtcgtccggcgtccagcgggtgccttcaacgacaaaaatcaccagctcaacatcgccaatagagctgctcgccgctttgttcatcaggcggttaatggcgcgtttttcttccatatgcaggcccggtgtatcgacgtagatcgcctgatacgcgccttcagtatggatccccacaatgcggtgacgagttgtctgcgccttgcgggaagtgatggagattttctgccccagcagtttgttcaacaatgtggatttgccaacgttcggacgtccgacgatggcaataaatccgcagtaacttttatcgatgctcat

SEQ ID NO: 143270 - DNA, 1884 bp, Homo sapiens
atgacggccttccatcgcggcggctaccgtaccggaataaataacatcatcccccagattcggcccggcgttaattccggacacaacaatgtccgggcgcggacgcatcagagcattcacgccaagatagacgcaatcggtcggggttcccatttgcacagcaatatcaccattttcaaagggaggattccagtgtcagagaatttgaagcgccgctgcggttacgatcgggggcgaccactcttagagcacataggagtcttcaagcgcatcgaatccggttcggtggaaatcgtactggtggcaaattcggtgattgatatctcgaagattgtcggtgataaggggctggtggcgcgaatgggcggcgaagaatttgctgttgcagtgccgtcggtgaatcctgtcgatggtctgctaatggcggaaaaaatccgtaaaggcgttgaactgcaaccattcacctggcaacaaaaaacgctttatctcacggtaagtattggcgtcggtagtggtcgcgcatcgtacctaacgctgaccgatgactttaataaattgatggtcgaagccgatacgtgtctgtatcgctcgaagaaagatgggcgcaaccgtaccagcactatgcgttacggagtcgatggcgtcgccggtatcccgtttgataattaccccttcgcttacatggtaagtaacctggcactggcgattattttgctcgacggcgggatgcgcactcaggccagttcctttcgtgtggcgttaggaccggcactgtcgctggcgacgctgggcgtgcttatcacctctggtttaaccggcatgatggcggcgtggctgtttaatcttgatttgattgaaggcttattaatcggcgctatcgtcggctctaccgatgctgcagcggtcttttctctgctgggtggtaaggggcttaacgaacgtgttggctcgacgctggaaattgaatccggcagtaatgatccaatggcggtctttctgacgattaccctaattgcgatgatccagcatcatgagagcaatattagctggatgttcattgtcgatattctgcaacaatttggtctgggcattgtaataggtcttggcggcggttatttactactgcaaatgatcaaccgcatcgccctgcccgccggattatatccattgctggcattaagtggcggtattctgattttctcattaactactgcgctggaaggtagcggtattctggcggtgtatctgtgcggttttatggcgtgggcgtctggttcgtttcgcaaaacccgtctgatattccggataatgtgctcggccagctcggtaatcgcgttcaacatgctttgcgggcttttacgccaaaaggatcagaaagcagtgaagccagcggcgcaaaccatgcgggccaatccggcgtttgataccgaaaaggcgattcaggaactgggcaccggcgaggcgttgatctcttttctggatgcgaaaggaagcccttctgtggtggagcgtgcgatggtgatcgcgccttgttcgcggatggggccggtgacggaagatgagcgtaatggcttgattaatcactctccggtgtatggcaaatatgaggatgaggtggaccgggaatccgcctatgagatgttgcaaaaaggctttcaggccagtaccgagcagcaaaataatcctcccgcgaaagggaaagaggtagcggtggatgacggcattcttggtggattgaaggatattttgttcggcactaccggaccacgcggcgggaagaaagatggtgtggtgcaaacaatggccaaaagcgccgctcgccaagtgacgaatcagattgtacgcgggatgttggggagtttgctgggggggagaagaaggtaa

SEQ ID NO: 143271 - DNA, 2160 bp, Homo sapiens
atgagcgcctggtgcagctatcataccttcgaaggtgctgccgcgttcctgcgccgtcacgcccaggaagagatgacgcatatgcagcgtctgtttgattacctgactgataccggcaatttaccgcgtattaataccgttgaatctccgtttgctgaatattcctcacttgatgaattattccaggaaacctataaacacgaacaattaatcacccagaaaattaacgaactggctcatgctgcaatgaccaatcaggactacccaacatttaatttcctgcaatggtatgtttctgagcagcatgaagaagagaaactgttcaaatcgattattgataaattaagcctggcaggcaaaagcggcgaaggtttactgccgccgtttcaaatcagtgacggcaaatcttactctgatcggtcgaaaaaccgtctttcgaagatatcactcgggatccttagagtcgacctagcatgcagggtggaaccggagattatcctcaatgcaccgcaacaatatctgctggcggggatcggtgacacgctggcgaaatggtatgaagcggtggtgctggctccgcaaccagaaacgttgccgctaaccgtgcgactggggatcaataatgcgcaagccattcgcgacgtcttgttaaacagtagcgaacaggcgctgagcgatcagcaaaatcaacagttaacgcaatcattttgcgatgtggtggatgctattattgctggtggtgggatggttggtggtctgggcgatcgttttacgcgtgtggcggcagctcatgccgtgcataacggtctgaccgtgctgccgcaaaccgagaagtttctccacggcaccaaagtcgcctacggaattctggtgcaaagcgccttgctgggtcaggatgatgtgctggcgcaattaactggagcgtatcagcgttttcatctgccgactacactggcggagctggaagtggatatcaataatcaggcggagatcgacaaagtgattgcccacaccctgcgtccggtggagtccattcattacctgccagtcacgctgacaccagatacgttgcgtgcagcgttcaaaaaacaacttcaaaccgtcagcacggctggaaaaaccatacgcgatggtgtgcatcaatattaccgccgtgaaagtgccaaccgcgataccgcaccgcgaccgctggggcttcaggatcgcctgagctggaaaaaacgtctctcgcgcctgatgaattatccgggcacgcgttacactaaacagatgatggagacggtctgttacccggcaatggttattaaattatgctttcagtacagccagagctgcttcgtaatccggctcggtggtgatttcatccaccagctggctgaaaatcacattgtcattttcgtcaataaccacaacggcacgcgctgccagacctttcagtgggccatcagcaattgccacaccgtaagcttgcagaaattcagcgtacgaaagggagcaaagcaatgcaaaataagtaaatgctttgaattaaaagcactggagcgacagcattccagggacagaagcagactggagcgcctctacgacttccggctgtgcgggtttcgccgcttttgcctgctccagttcctgagtgatttgtttgctatcgggggccgtcgcggcgtacgccccccaactgaggcaccaggccatcagaaaagtgataatcaggcgcacgtcagcgtttcctttgatggattagacctggtcttttttgtcgtcaaccaatgggctggcgtcgtgttctgcttcgatctcttcagcaggaagcggggcaggttcagcgtctggcgtaacaaaggtttcggtagatactgccagcggctggccaattttcgtgacagacaggctttccagttgctcaaccagattcactttacccggtgcaaacaggttgataacggtggaaccgagtttaaagcgacccatttcctggcctttcagcagtgccacagaaccgtcgttttccccggcaggccaggtccagcgcttgatgataccttcgcgcggcggcgtaatggtgcccgcccagaccgtctcaatgctgccaacaatcgtcgctccgaccggaccctattcttcccaccttttaggcagtttcaccctttctcctcctag

SEQ ID NO: 143272 - DNA, 1713 bp, Homo sapiens
atgatgaataacggcggaagcatggacgctgcggcggtcatattaataatagtattcatcagatcctgcacggtattggaaccgagcatcgggataatcatcagcgggatgacgatcaggaactggatccacgctgcgcgcgccggaacgccgttttcgttcagttcgacggttttcttaccaaagatgccttccgggatttcggagaagaaaattttcaccggcgttgcggtccacatcagcagggaaccgaacatcgcggtaaaggacaccagaccgacaagcgattcatcaacgcttccggtagaccaaatacgccgccatgccgtggaatacctgcaccgatccgccggcgctgtatcgcgacatattgatcctgttcgtatgtttatgggcgacacttcgttcctgcttaatgcactggtgctgaatgttggcgactatgtgaatcgctttatgggcatgacgctcaacagttttgccttcgaccgtccggttgagtggatgaataactggacgctcttcttctgggcatggtgggtggcatggtcgccgtttgtcggcttgttcctggcgcgtatctcgcgtgggcgtaccattcgccagttcgtgctgggcacgttgattattccgtttaccttcacgctgttatggctctcggtgttcggcaatagcgcgctgtatgaaatcatccacggcggcgcggcatttgccgaggaagcgatggtccatccggagcgcggcttctacagcctgctggcgcagtatccggcgtttacctttagcgcctccgtcgccaccattactggcctgctgttttatgtgacctcggcggactccggggcgctggtgctggggaatttcacctcgcagcttaaagatatcaacagcgacgcccccggctggctgcgcgtcttctggtcggtggcgattggcctgctgacgctcggcatgctgatgactaacgggatatccgcgctgcaaaacaccacggtgattatggggctgccgttcagctttgtgatcttcttcgtgatggcggggttgtataaatctctgaaggtagaagattaccgccgtgaaagtgccaaccgcgataccgcgccgcgcaaccgcaactcctgcgccacttcttccatttacaatcgagctcggtaccggaagtatcgagcccattggtacaacctgagcgatggcgcgatggaagatgctctgtacgaaatcgcctccatgcgtctgtttgcccggttatccctggatagcgccttgccggaccgcaccaccatcatgaatttccgccacctgctggagcagcatcaactggcccgccaattgttcaagaccatcaatcgctggctggccgaagcaggcgtcatgatgactcaaggcaccttggtcgatgccaccatcattgaggcacccagctcgaccaagaacaaagagcagcaacgcgatccggagatgcatcagaccaagaaaggcaatcagtggcactttggcatgaaggcccacattggtgtcgatgccaagagtggcctgacccacagcctggtcaccaccgcggccaacgagcatgacctcaatcagctgggtaatctgctgcatggagaggagcaatttgtctcagccgatgccggctaccaaggggcgccacagcgcgaggagctggccgaggtggatgtggactggctgatcgccgagcgccccggcaag

SEQ ID NO: 143273 - DNA, 3039 bp, Homo sapiens
tcatccagttttgccacgccgcggcgcacaagccacagtgactcgctgcgggctgtagccgtcctcaccgggaaacaggtgctcaaaatacaggcttctgccgccgttatcactgagtatcagtgtgttatcgcgcagctgtaagcggatatccgcaggcattttccagccggggccgaggctccccaccggcgcgggcgtttttgtccggtaactgctgtaggtgcgggagaggatgaacggcagcgggccgggcagggcgatgtcggtttcaccgggaaggacctttgcaccgagcaggggattgaccggatggccggacgtcactccgccggggcacaccgaacaggccacgccggtgggggcaccaatacgtaccccggctgaaccctgaacaatgctaccgccatactgcgtcatgtcaccctgacgcgccgccggttttccgctcatcgtaaaatccttttctattattttaatgacagtatcttcatacgaaaaagcgaagaaaaagccgcgctgggcgataacgtcatcggcaaaatgctgcacgtcacccatgtcacctttcaacacggcgatttccagacagtcgtcgtggttgatgtgcacatgcagcgtggcgacggagaggtcgcggtgatgatgctgggtggagacaatgcggctggctaagtcgcgtctaacgagtgcatacacatacgacagcaccgcgaaaacttgcgtgccgtgctgatgggtggcctcttgcgcggttctggtgacaactgtttcgtgtttataaccagatacccatgctttggaccaagatatcgtggctgctgtttctagtaagaatagcaaccagatgactccaggatcccaatggaaacggcggctacgaccattgtcgtcatatctactggtaattgacgcgcgaccacctgaccctcggatgctgctccattgctcaccatatgcgtcgaagccacctagcgccgtggaacatatatgtgggtagaactgtagatgttgcacaataccggacgagcataggccgaagatggtcgaaggaatgagacaaccgatgatctcaagtagcgctggagactcgatgtgcccaacggagagagagggtccatggagggcacacgagccactcgtctccaagtgctccaggccgcctaacacatcgacgctaacatcagtcaacagcaagggttcttcttcagtccacggataacgcccttgcaaatcagccgtaatatttttcgctgtcaccagattaatcacttcggcaattcgcaacgtaacgggaccgcgagtccccagatgccaggctccatcggcaaaacggaaaggcaggacaaaatcgacaccgttaacctgattatctggcatccaggcactaccgcctttcaacacgccgtgtcctcccgcgcggaatccttgttcaggcgcagcagaaaatgcaacctgagcatacagttcaccatcgcgtaagttcatcttccagtcgggtggcaccagcggctggaatacggtcagtgattgtttaggccaccaggcgttaccgcgcagacgaataccgtcccagcgaccatttacccgaaccgggccaatctcaccagcatgtaaatcgcctttgtcctgcgacatcgccaggtggcattgcatacgcgtgtaaaactcccttttccccagtagcgccaccgcttgcccctgggtcagcacactcagtcgtccgctgaccagagcgttctcaagccctgcctgccagttgtcgactttgacacccagtcggccactcaaaggaaaacctgcatacggccagctccagcgaccatcgcttacggtcaattgttgacgagtaatttgccacggcaaatcgagcaacggatcgccgttatcccgtgccagcacgatcaattgcccgctattttcctgccagtccagctcggcatccaccagtgacggttcctgcggcaagtttaacgtcgcagtagcatgcccacttacaggaagtccatccggcacgagcggcatagcaaattcccccaccagttttaccggcggctgattttcaaacgcgacgacatccagttcgctgactgtaagttgttgccctttcagctggccttgaaatttaactttttcgccctgagtcgcagcgatgtaaacaatacctgctaaaccagtacccagcatggttgccagcggaacggtacgtttcgggtttttaaccataccagtacttacagctgcggattcaacacccacgaaggcccacaggcagagcagaatacttttaatgatcgcatgaccatcagtggtatccgcagtattccagttagctgcataagttgccgcatcaaaccaatgccagccaacaatagcagtcatcaccacaggaataagaaccagcaccagaccaatagtggcggcattaccggctttgtcaccggtgcggtggaaatcgtactggtggcaaattcggtgattgatatctcggtcggttcgccgttctccattccgcaaatgttctccgcacgtctcggtattgccacgatggcgatatgcccaattatggtttcttttagcgtggcagcgatcaattcggccagccacaatcgacaaggtttcgcgttgcagttcttcttcaacgatgcggcgtgcggcagcggcgagttcaggatcttgatgcaggaagagcatcccgacagcgtagttttttgctaaacgccagccgcgctcctgcgcaacgatgcgaaaaaagcgatccggtttttgtaacagcaagccgcaaccgtcgccggttttaccatcggcgagaatcgcgccacggtgctgcatgcgggccagtgcgtgtattgcagtacgcactaccttgtggctaggttcgccttctatgtgggcgatcaggccgaaaccacagttatccctctcaagggatttatcgtacaacatatcgtgaacctcccccaggctctgcgggaaccccacttccgaaccgctgcgcacgggcacagaaagagcgtggcgacggggtttgcgtgtcat

SEQ ID NO: 143274 - DNA, 586 bp, Homo sapiens
ggattttgccgatttcggaaccaccatcaaacaggattttcgcctgctggggcaaaccagcgtggaccgcttgctgcaactctctcagggccaggcggtgaagggcaatcagctgttgcccgtctcactggtgaaaagaaaaaccaccctggcgcccaatacgcaaaccgcctctccccgcgcgttggccgattcattaatgcagctggcacgacaggtttcccgactggaaagcgggcatcattggcggagcggggagtctggcgttcccgctgcctgcattaatctggtgtgcagtgcgctatacgccgcaggtaacatgtctgttgacctttgtcaccgggattttgccgatttcggaaccaccatcaaacaggattttcgcctgctggggcaaaccagcgtggaccgcttgctgcaactctctcagggccaggcggtgaagggcaatcagctgttgcccgtctcactggtgaaaagaaaaaccaccctggcgcccaatacgcaaaccgcctctccccgcgcgttggccgattcattaatgcagctggcacgacaggtttcccgactggaaagcgggcagtga

SEQ ID NO: 143275 - DNA, 1518 bp, Homo sapiens
ttcttcgtgatggcggggttgtataaatctctgaaggtagaagattaccgccgtgaaagtgccaaccgcgataccgcaccgcgaccgctggggcttcaggatcgcctgagctggaaaaaacgtctctcgcgcctgatgaattatccgggcacgcgttacactaaacagatgatggagacggtctgttacccggcaatggaagaagtggcgcaggagttgcggttgcgcggcgcgtacgtggagctaaaaagcctgccaccggaagagggacagcagttgggtcatctggatttgttggtgcatatgggcgaagagcaaaactttgtctatcagatttggccgcagcaatattcggtgccgggctttacctaccgcgcacgcagcggtaaatcgacctactaccggctggaaaccttcctgttagaaggcagccagggcaacgacctgatggactacagcaaagagcagcgaacatgctatcttggttcggtcagtattgatagtctggatttctggcctttgcttgcggactggttcagtgagcaattctcaacgggcgtgttgatcgtgccttgtatgctgacgttggctattcctggagtgctgccgcgctttaaagcagaacagatgatgcccgccatcgcgcttattgtgtcggttattgcctcggtagtcattggcggagcggggagtctggcgttcccgctgcctgcattaatctggtgtgcagtgcgctatacgccgcaggtaacatgtctgttgacctttgtcaccggtgcggtggaaatcgtactggtggcaaattcggtgattgatatctcggtcggttcgccgttctccattccgcaaatgttctccgcacgtctcggtattgccacgatggcgatatgcccaattatggtttcttttagcgtggcagcgatcaattcgctaatgaagcaagttgcgctgcgagccgactttgattttctgactcaggtttactcacggtccggtctttatgaggcgctgaaaagtccatcgctgaaacagacacaacatctgactgtcatgctgcttgatatcgactatttcaaaagcattaacgataactatggacatgaatgtggcgataaagtgttaagcgtgtttgcccggcatattcagaagattgtcggtgataaggggctggtggcgcgaatgggcggcgaagaatttgctgttgcagtgccgtcggtgaatcctgtcgatggtctgctaatggcggaaaaaatccgtaaaggcgttgaactgcaaccattcacctggcaacaaaaaacgctttatctcacggtaagtattggcgtcggtagtggtcgcgcatcgtacctaacgctgaccgatgactttaataaattgatggtcgaagccgatacgtgtctgtatcgctcgaagaaagatgggcgcaaccgtaccagcactatgcgttacggtgaggaagttgtctgacatctttattcattacgcgcgatttgaatgcaatgtgttctaccactttat

SEQ ID NO: 143276 - DNA, 810 bp, Homo sapiens
ttatgcaaactgagcaacagcgacggtaacacggctttgtatccagtgtggattatttcttttgcaacatggtgcggaaagcgcgttggttgatgagctttcctcacgactgggtcgggcactgggaatggacagcgtcgaaagttctatctcttcgaacgccatagtgctgacaactattaaagatggcaatgcctgacatcgacacgtaaaaatcacgatcgcggcattaatatgcatgtggtgactgaagtccagcacattgtgattctgcggagcatcatctgccagatccagagccataggagcagctccaaaccttctgggtcccccaggagagagtccacagtcactcatccagtgctcagagcctgccagagtagaggtatcagctgggtcatccatcaccaggataggaggtgcaacaggcgtcagcttgtttctacacgggcagggaagttcagtcaggcctccttgtatagcaatagcagacttaaccctgttagcaaactggactgcatcttctccttccggttcagcagtgtcacctctgcagccctggtatctcttcactggcccaaattttctcttcttatgaggataccagtcagattggattagggaccaccctaaagatttcatttttaactgaactcctttaagtcctaatctccaattttttcttaatataacttccatcccaccttcctcgtctgcttgccaaagaaggaaaatagacttgttctctcgaataatcaaatgagactgaaagctggcgttctgaaagaaactgattaaatgacgcatcat

SEQ ID NO: 143277 - DNA, 1866 bp, Homo sapiens; identical to SEQ ID NO: 135692
  misc_feature (1)...(1866): n = a,t,c or g

SEQ ID NO: 143278 - DNA, 1106 bp, Homo sapiens
ttaacctaccgcaaaacaaccgtgcttcatgatacaaatggattctcattatctgaacaatacgcagcacgtctatgacaaagggcgagttatgcaaactgagcaacagcgagccgtaacacggctttgtatccagtgtggattatttcttttgcaacatggtgcggaaagcgcgttggttgatgagctttcctcacgactgggtcgggcactgggaatggacagcgtcgaaagttctatctcttcgaacgccatagtgctgacacctattaaagatgggcaatgcctgacatcgacacgtaaaaatcacgatcgcggcattaatatgcatgtggtgactgaagtccagcacattgtgattcttgcggagcatcatctgctggattacaaaggcgtagagaaacgatttagccaaattcagccattacgttacccaagatggctggtagccttaatggttggcctttcttgcgcctgtttctgtaaactcaataacggtggctgggatggtgccgtcatcaccttctttgccagtacgaccgcgatgtatatccgccagctgctggcacaacgtcatcttcatccacagatcaacttttgccttaccgctttcgccgccaccacctcaacgttaagtcagctttcggcattttcgctctcctttatgctgctggcactgctgctggtgttgcgtggcgatctgctcgaccgctggcagcagcagctacctccagaaagcccgaactactttttaattaacatcgccacagaacaggtagcaccgctaaaagcgttcctcgcggaacatcagatagtcccggaatcgttttatccggtggtgcgggcgcggctgacggcgattaacgataagccgacagaaggtaatgaagatgaggcgcttaaccgcgaactcaattttaccttggcaaataccgcggcccgatcataatccgattgtcgccggtaactggccgccaaaagccgatgaaatgtccatgaaacagagaactgactgcttctgcagtcactctatgatccccaatggtttattcataataaaatttgagaacttgctcattaaatttaactcaaattttgcctggtaa

SEQ ID NO: 143279 - DNA, 696 bp, Homo sapiens; identical to SEQ ID NO: 121287

SEQ ID NO: 143280 - DNA, 1086 bp, Homo sapiens; identical to SEQ ID NO: 143203

SEQ ID NO: 143281 - DNA, 978 bp, Homo sapiens
cgccgtgttcttcggttcaagtcccaacatccgggcgaactggcgtgtttcattagcccggtagcatgaaccattatccgtcagccactccactggagacgacggaagatcgttgccgaagcggcgttccaccgctcccagcatgacgtcctgtactgtttcactgttgaagccgccggtagtgaccgcccagtgcagtgcctcacgatcacagcagtccagcgcgaacgtgacacgcagtctctgtccgttatcacagcagaactcgaacccgtcagagcaccatcgctgattgctttctttcacggccactctgcctgtatgtgcccgtttcgatggcggtacagcaggttttcgatcaagcaacagcgcattctggcgcatgatccggtaaacacgtttggcattgatcgcaggcatacctatcaagttctgcctgtgtgcgaagcagcgcccatacccgacgataaccatacgttggcagctccccgataacatggcgtatacggagaagcacatccgtatcatcagtgtgacgactgcggcggccatccatccagtcatcggttcgtctgagaatgacgtgcaatccccatccccgggcaataagggcgcgtgcgctatccacttttttgcccgtccatattcaacggcttctttgaggagttcattttccatcgttttcttgccgagcaggcgctggagttctttaatctgcttcatggcggcagcaagttcagaggcaggaacaacctgttctccggcggcgacagcagtaagacttccttcctggtattgcttacgccagagaaataactggctgggtgctacaccatgttgccgggaaacggacctgcaggcatgcatgcttgcatcagcaagcttgacaagtaggcggccgttaaaaagcgtattagtgagattattcacgagaatagaggccgatacggataccgtagggtaccgctgtctcttcat

SEQ ID NO: 143282 - DNA, 705 bp, Homo sapiens
cgaatcggggaccaccgccagcatctgatacaggttaatcaggtcagcgctgacgtcagccagaaggaagcgttcgtgcttgtctgagttaaggaacaccgagccgccacccacaaaaggctcaataaggcgtttacctgcggggatcaaacgatccagttccggcagcagcgaatatttgccgccagcccatttaaggaacgggcgctgccagtgcgcagcgccggttcttctatgggcatcgccgcagctccattgcctttcaagatcctcaatgcgtcggtcttttgacagctccaatgctgatgccgctttttctggatcaactgatattgcaatgtttcttttggtgccaatcttgagcgcgcgtaaaccagcttctccgcgctcttcatagaccttcagccacctggctacagaaccactaccagcaagcataaagtgagcagcagcctgattaagggacatgtgctgctcgatcacagctttcacgaccttaatacgcaactctggatcagcactaacgcctttaggtttgggaattaaacctttttctccatgtttttcatagagggcaacccatgtcctgacctgggttcgggggacaccaaaacgtgccgagatgatcctgtaaccatcatcagttgtgaagtagtgattcacgacttcaaggcgcttttcaaaagggtattttggctttgacat

SEQ ID NO: 143283 - DNA, 2910 bp, Homo sapiens; identical to SEQ ID NO: 132383

SEQ ID NO: 143284 - DNA, 2544 bp, Homo sapiens
atgagtcatcaacttaccttcgccgacagtgaattcagcagtaagcgccgtcagaccagaaaagagattttcttgtcccgcatggagcagattctgccatggcaaaacatggtggaagtcatcgagccgttttaccccaaggctggtaatggccggcgaccttatccgctggaaaccatgctacgcattcactgcatgcagcattggtacaacctgagcgatggcgcgatggaagatgctctgtacgaaatcgcctccatgcgtctgtttgaccggttatccctagatagcgccttgccggaccgcaccaccatcatgaatttccgccacatgctggagcagcatcaactggcccgccaattgttcaagaccatcaatcgctggctggccgaagcaggcgtcatgatgactcaaggcaccttggtcgatgccaccatcattgaggcacccagctcgaccaagaacaaagagcagcaacgcgatccggagatgcatcagaccaagaaaggcaatcagtggcactttggcatgaaggcccacattggtgtcgatgccaagagtggcctgacccacagcctggtcaccaccgcggccaacgagcatgacttcaatcagctgggtaatctgctgcatggagaggagcaatttgtctcagccgatgccggctaccaaggggcgccacagcgcgaggagctggccgaggtggatgtggactggctgatcgccgagcgccccggcaaggtaagaaccttgaaacagcatccacgcaagaacaaaacggccatcaacatcgaatacatgaaagccagcatccgggccagggtggagcacccatttcgcatcatcaagcgacagttcggcttcgtgaaagccagatacaaggggttgctgaaaaacgataaccaactggcgatgttattcacgctggccaacctgtttcgggcggaccaaatgatacacggtcaggcggtcgaaattgctggccataaagttgatgtactcttccgtcagcagcgcaacgcccggaaagccgcccatggtgttagggccgtctggcaacagatgaccatgccaggctccgagatcgaaaaacggattaaaacgctggtgatcgtcgtaatcgtaatccttcatgtactgcggcgcgccagtacggttaatcacgtttttataattgtcggcgttagcggcatgggcggaaaaacttatcagcagagcgcagtacccgtggctgacatgaccacggcacgcactatgtccgttcgtgagccacctcggcaccagatcggcatgctccatcgtccgatgcctacaggtcaccctcgctctcgacatctcaccgctccaacacagcatcgcgtgctggtacacgacatccgcaacgcagagcgagtgtgctccacgcacaccctctcttccgtcactgcgacgtgcgcaccaacgcatccacctgcatcccggccatcgggtcagctctcggagctgtgcactactgcccctcgagagctccgcgccctcactgacggccgacgactctctaatgtcgcactcgcggcggccagtaacaaggcatgctgcgtcgcatcactacgtggccgaatcttcccacaaagcacagcatataacggcctgggccagacctgcacgatgagctccgtcggctacgatcacagtgaatcgctcccatcagcctcagacttgccgatacatgctaccccgtccgcaggcgtaccaggcagggctctcagcaagcctgacaagtatgcggacgttaaaaagcgtattagtgagatttatcacgagaatagaggccgatacggataccgtagggtaacgctgtctcttcatcgagaagggaaacagattaaccataaagctgttcagcgcctgatgggaaccctctcacttaaagcagcgattaaggtcaagcgataccgctcttacagaggagaggtagggcaaaccgcccctaatgttctccaaagagatttcaaggctacgcggccaaacgagaagtgggttaccgatgttactgaatttgcagtcaatgggcgcaagctgtatttgtctccagtaatagatctcttcaacaacgaagttatttcttacagcctttcggaaagaccagtgatgaacatggttgagaatatgctcgatcaggcattcaaaaagcttaatcctcacgagcatcctgttctgcactctgaccagggatggcagtatcgtatgagaagatatcaaaatatccttaaagaacatggtattaaacaaagcatgtccagaaaaggcaattgtctggataatgctgtggtggagtgtttctttggaaccttaaagtcggagtgtttttatcttgatgagttcagtaatataagcgaactgaaggatgctgttacggaatatattgaatactacaacagcagaagaattagcctgaaattaaaaggtctgactccaattgaatatcggaatcagacctatatgcctcgtgttaaactgtccaactttttggggtcagtactacagggaccatgcaggcagtga

SEQ ID NO: 143285 - DNA, 1569 bp, Homo sapiens; identical to SEQ ID NO: 143209

SEQ ID NO: 143286 - DNA, 845 bp, Homo sapiens; identical to SEQ ID NO: 143213

SEQ ID NO: 143287 - DNA, 1350 bp, Homo sapiens; identical to SEQ ID NO: 143216

SEQ ID NO: 143288 - DNA, 2460 bp, Homo sapiens; identical to SEQ ID NO: 143224

SEQ ID NO: 143289 - DNA, 2550 bp, Homo sapiens; identical to SEQ ID NO: 143226

SEQ ID NO: 143290 - DNA, 1383 bp, Homo sapiens
atggcgatccatcaggttagcccctttcgtgaagagccagtggattgcgttctgtgggttaaaaacagccaacttatgcctaatgattacaacccaaacaacgtggcaccacccgaaaaaaaactgctgcaaaaatccattgaaatagatggttttacccaacccattgtggtcacacatacggataaaaatgccatggaaatcgtggatggttttcaccgccatgaaattggtaaaggctcatcatcattaaaattacgcttaaaaggttatttgccggtgacctgtctggaaggtacgcgtaatcaacgcatcgccgcgactattcgtcataatcgcgctcgtggacgccatcaaatcaccgccatgtcggaaatcgtccgtgaacttagccagttgggatgggacgataataaaattggcaaagagctgggaatggacagcgacgaagtgctgcgcctgaagcaaattaacggcctgcaagagttgtttgccgaccgtcaatattcccgcgcctggacgctaaagctggcgcagcgttcagctgctgccagcaacgtcgattccttcttggcaaacagagacgaatcagtttatgggaagggatcggccaacaccgacagcggaatcgccgtacgccgtgctcctgcgtcagccactggcaaaactcaacatcatccaggaccagtgatgaacatggttgagaatatgctcgatcaggcattcaaaaagcttaatcctcacgagcatcctgttctgcactctgaccagggatggcagtatcgtatgagaagatatcaaaatatccttaaagaacatggctgcggcgtcacgccgattatgtcgatgcgtcgctggcttgcgaagaaccgtccacaggccgatgtgcgggtgatctacaacgtgcgtacgccgcaggatgttattttcgccgatgagtggcgtaactatccggtaacgctggtggcagaaaataacgttaccgaaggctttatcgctggtcgtctcactcgcgaactgctggcaggtgtacctgacttagcttcacgtaccgtgatgacctgcggcccggctccgtatatggattgggtagagcaggaagtgaaagcgctcggcgtgacgcgtttctttaaagagaaattcttcaccccagtagcagaagcggcgaccagcggtctgaaattcaccaaactgcaaccggcacgagaattttacgccccggttggcaccacgctactggaggcgctggaaagcaataacgttccggttgtcgctgcctgccgtgcgggtgtttgcggctgctgtaagacaaaagtggtttccggtgaatatacggtgagcagcacaatgacgctgaccgacgccgaaatcgctgaaggttac

SEQ ID NO: 143291 - DNA, 2499 bp, Homo sapiens
atgctggaagagaaatacatcgcgtcggtcctgttgttcgtggcccacggggattgttacctgaactctgattcgggtcctctgggatcccgtgtgcacggcaactcccgggacctcccttcaggtaatacgggggcccggggagtaaacctttctgtttcccccacgggggcggatatcccatcggcaccaccacttttaccgtatcgccaaattgccgatgaaactctggcgttgatgcgcgagatgacccatgcgggtgaactggaacacctgacgcctgaacgggtatggaaagagacggaaagcgccctcaccacccgcaatccacaggtgttcttccaggtactgcgcgattgcggcgcactgcgcgttttattcccggaaattgacgcactgtttggcgttccggcgcctgccaagtggcatccggaatcatacggtatgatggaccggcgcaggaacgtggtcaaccctcgccccgcacatcggggtcatgtcttccgccatatcttcgtggtccagacccgcgataccgttcagcgcagaagagtaaacgatcgggaagtccagctgctcgtctgtcgcgtcgaggctctcagcaagcctgacaagtatgcggacgttaaaaagcgtattagtgagatttatcacgagaatagaggccgatacggataccgtagggtaacgctgtctcttcatcgagaagggaaacagattaaccataaagctgttcagcgcctgatgggaaccctctcacttaaagcagcgattaaggtcaagcgataccgctcttacagaggagaggtagggcaaaccgcccctaatgttctccaaagagatttcaaggctacgcggccaaacgagaagtgggttaccgatgttactgaatttgcagtcaatgggcgcaagctgtatttgtctccagtaatagatctcttcaacaacgaagttatttcttacagcctttcggaaagaccagtgatgaacatggttgagaatatgctcgatcaggcattcaaaaagcttaatcctcacgagcatcctgttctgcactctgaccagggatggcagtatcgtatgagaagatatcaaaatatccttaaagaacatgacttcagcgatatttttggtgacgttttcggcgatatttttggcggcggacgtggtcgtcaacgtgcggcgcgcggtgctgatttacgctataacatggagctcaccctcgaagaagctgtacgtggcgtgaccaaagagatccgcattccgactctggaagagtgtgacgtttgccacggtagcggtgcaaaaccaggtacacagccgcagacttgtccgacctgtcatggttctggtcaggtgcagatgcgccagggattcttcgctgtacagcagacctgtccacactgtcagggccgcggtacgctgatcaaagatccgtgcaacaaatgtcatggtcatggtcgtgttgagcgcagcaaaacgctgtccgttaaaatcccggcaggggtggacactggagaccgcatccgtcttgcgggcgaaggtgaagcggcttttggtccacaatgccaggcggtcgaacagcaagattggtgtagtgaaacagaatcggtgctttacgcattttttcgtacctggcgcggcgaacgcaactggctggagaatatgcacgggcatgattatgagcatcatcatcacgatcacgaacatcaccacgaccatggacatcatcaccatcacgaacatggcgagtatcaggatgcccatgcacgagcccatgccaatgacatgtgctgctttggtcactctagaggatcccccaacttaaatgtacatctctatgtcatagaggggaacgaagatatagaccacgtccctgaatctctggcttgtcgactgttattacgcgcctggcagcatcttgatgccagacagccgcagcaggcctgcgaactgcttcatgccgcgctgcattatccggagaatttaagcgaaggccgtttaccggggcaaactgataacgacatctggttctggcaggcgatatgcgccaacgcgcagggcgatgaaactgaagcgacgcgttgtttacgtctggcggcgaccggcgatcgcactattaacattcacagttattacaacgatcagccggttgattatctcttctggcaagggatggcgctgcgactgctgggcgaacaacaaaccgcacagcaactgtttagtgaaatgaaacagtgggcgcaagagatggcgaaaaccagtatcgaagcggatttctttgccgtctcgcaacctgacttgttgtcgctgtatggcgatttacaacagcagcataaagaaaaatgcctgatggtggcgatgctggcgtccgcgggactcggggaggttgcgcaatatgagtctgctcgcgctgaattgacggcgattaatccggcttggccgaaagcggcattattcaccaccgtgatgccttttatttttaaccgcgttcactaa

SEQ ID NO: 143292 - DNA, 2056 bp, Homo sapiens
aggtaatccggctgggagcacagcaggttgtcgatatcgacgcccagtttacgtgcgtagattgggtccagcgcgtgttcagcatcgataaacgcacaggttttaccttcacgctgcgctgcggcgatcacctgcagcgtcagcgtggttttaccggaagattccggtccgtagatttcgacgatacggcccatcggcagaccacctgccccaagcgcgatatccacgcgagtcgtcgagtcatgttccttgccatggtttcttacattaaacgcgcccgctccatgcgcgatattcgtaacgaaaaaggcaccgcaaaacccgatcctgcggttatgaaacgactgattcaactcggtttgccgattgcgctggcactgttctttgaagtgacactgtttgccgtcgtggctctgttagtgtctccgctcggtattgttgatgtcgcaggacaccagattgccctgaactttagttcactaatgttcgtgcttccaatgtcgctggcggcagcggtaactatccgcgtaggttatcgtctgggtcagggctcaacgctggatgcgcaaaccgctgcgcggaccgggcttatggtgggtgtctgtatggcaaccctgacggccattttcacggtttcactgcgggagcaaatcgccctgttgtacaacgacaatcccgaggttgtaacgctggctgcgcatttgatgttgctggcggcggtatatcagatttctgactcaatccaggtgattggcagtgggattttgcgtggttataaagatacgcgttccattttctatattacctttacggcttactgggtgctgggcttgccaagcggctatattctggcactgaccgatctggtcgttgaacctatgggccagcaggcttctgatagcttattattgcctacaacactgcactggattaagatgaaaacgattgaagttgatgatgaactctacagctatattgccagccacactaagcatatcggcgagagcgcatccgacattttacggcgtatgttgaaattttccgccgcatcacagcctgctgctccggtgacgaaagaggttcgcgttgcgtcacctgctatcgtcgaagcgaagccggtcaaaacgattaaagacaaggttcgcgcaatgcgtgtctatgaagagcgcggagaagctggtttacgcgcgctcaagattggcaccaaaagaaacattgcaatatcagttgatccagaaaaagcggcatcagcattggagctgtcaaaagaccgacgcattgaggatcttgaaaggcaagttcgatttcttgaaacgcggcttatgtatctaaaaaagctgaaagccttagctcatcccacgaaaaaggctgcggagataccgcgcagtacgttttattatcatctaaaggctctcagcaagcctgacaagtatgcggacgttaaaaagcgtattagtgagatttatcacgagaatagaggccgatacggataccgtagggtaacgctgtctcttcatcgagaagggaaacagattaaccataaagctgttcagcgcctgatgggaaccctctcacttaaagcagcgattaaggtcaagcgataccgctcttacagaggagaggtagggcaaaccgcccctaatgttctccaaagagatttcaaggctacgcggccaaacgagaagtgggttaccgatgttactgaatttgcagtcaatgggcgcaagctgtatttgtctccagtaatagatctcttcaacaacgaagttatttcttacagcctttcggaaagaccaaatacggtgattcgtattaaaggcgatctggtttctaaaccttatatcgacatcacactcaatctgatgaagacgtttggtgttgaaattgaaaatcagcactatcaacaatttgtcgtaaaaggcgggcagtcttatcagtctccgggtacttatttggtcgaaggcgatgcatcttcggcttcttactttctggcagcagcagcaatcaaaggcggcactgtaaaagtgaccggtattggacgtaacagtatgccagg

SEQ ID NO: 143293 - DNA, 2100 bp, Homo sapiens; identical to SEQ ID NO: 143219

SEQ ID NO: 143294 - DNA, 1569 bp, Homo sapiens
atgcagctggttggcgacatcaagggcgatgccaagatccttatgggcaagatcgatcatgaaggcgggagaaagatctccgctgaggactttgtttggccaggaagtggtgaagtgacctttaccggcggcggtaccgctcatcactttgacggcaacatcgaagggaagattcagggcttcgcacaaaacggcggcttctgccgaaagcgcattgagcgcgatgctcatgtagttgttgatgagcttaacgcggatccccatgcccggaccgccagcgttgatcaactcactgcccatcgccatcaggatcggtgtggcacgttcaacttgttcagcggtgccgccagccagcagatcatctcggcacgttttggtgtcccccgaacccaggtcaggacatgggttgccctctatgaaaaacatggagaaaaaggtttaattcccaaacctaaaggcgttagtgctgatccagagttgcgtattaaggtcgtgaaagctgtgatcgagcagcacatgtcccttaatcaggctgctgctcactttatgcttgctggtagtggttctgtagccaggtggctgaaggtctatgaagagcgcggagaagctggtttacgcgcgctcaagattggcaccaaaagaaacattgcaatatcagttgatccagaaaaagcggcatcagcattggagctgtcaaaagaccgacgcattgaggatcttgaaaggcaagttcgatttcttgaaacgcggcttatgtatctaaaaaagctgaaagccttagctcatcccacgaaaaaggctgcggagataccgcgcagtacgttttattatcatctaaaggctctcagcaagcctgacaagtatccggacgttaaaaagcgtattagtgagatttatcacgagaatagagcccgatacggataccaagggaaacagattaaccataaagctgttcagcgcctgatgggaaccctctcacttaaagcagcgattaaggtcaagcgataccgctcttacagaggagaggtagggcaaaccgcccctaatgttctccaaagagatttcaaggctacgcggccaaacgagaagtgggttaccgatgttactgaatttgcagtcaatgggcgcaagctgtatttgtctccagtaatagatctcttcaacaacgaagttatttcttacagcctttcggaaagaccagtgatgaacatggttgagaatatgctcgatcaggcattcaaaaagcttaatcctcacgagcatcctgttctgcactctgaccagggatggcagtatcgtatgagaagatatcaaaatatccttaaagaacatggtattaaacaaagcatgtccagaaaaggcaattgtctggataatgctgtggtggagtgtttctttggaaccttaaagtcggagtgtttttatcttgatgagttcagtaatataagcgaactgaaggatgctgttacggaatatattgaatactacaacagcagaagaattagcctgaaattaaaaggtctgactccaattgaatatcggaatcagacctatatgcctcgtgtttaa

SEQ ID NO: 143295 - DNA, 1605 bp, Homo sapiens
atgaaagttcccaggggagatgtgatgttccagctgaatcttcgcaaagatgacgggcagttcgaggatcagctgcttcttcttgttctccttcccaaacacagagggcatctccttcttcaggtagctgatgatgtttggttcaagaaccggagggctaaatgcaggcagcagcgacagcagcagaaacagcagcagcagcccccagggggccaggccaaggcccggcctgccaagaggaaggcgggcacgtccccaagaccctccacagattttagatcccgggatggcattcctgagaaagcaacccgaaccagctgtccttctgacagctcggtgttcagcttacagagaccacccctttcctccacagggagaggctcctccctctcctgggacagctcacaagtcctagtgattctctcaaccctaacaccgtctggcacgattgtgaccgctgaaccaaaatacccttttgaaaagcgccttgaagtcgtgaatcactacttcacaactgatgatggttacaggatcatctcggcacgttttggtgtcccccgaacccaggtcaggacatgggttgccctctatgaaaaacatggagaaaaaggtttaattcccaaacctaaaggcgttagtgctgatccagagttgcgtattaaggtcgtgaaagctgtgatcgagcagcacatgtcccttaatcaggctgctgctcactttatgcttgctggtagtggttctgtagccaggtggctgaaggtctatgaagagcgcggagaagctggtttacgcgcgctcaagattggcaccaaaagaaacattgcaatatcagttgatccagaaaaagcggcatcagcattggagctgtcaaaagaccgacgcattgaggatcttgaaaggcaagttcgatttcttgaaacgcggcttatgtatctaaaaaagctgaaagccttagctcatcccacgaaaaaggtaacgctgtctcttcatcgagaagggaaacagattaaccataaagctgttcagcgcctgatgggaaccctctcacttaaagcagcgattaaggtcaagcgataccgctcttacagaggagaggtagggcaaaccgcccctaatgttctccaaagagatttcaaggctacgcggccaaacgagaagtgggttaccgatgttactgaatttgcagtcaatgggcgcaagctgtatttgtctccagtaatagatctcttcaacaacgaagttatttcttacagcctttcggaaagaccagtgatgaacatggttgagaatatgctcgatcaggcattcaaaaagcttaatcctcacgagcatcctgttctgcactctgaccagggatggcagtatcgtatgagaagatatcaaaatatccttaaagaacatggtattaaacaaagcatgtccagaaaaggcaattgtctggataatgctgtggtggagtgtttctttggaaccttaaagtcggagtgtttttatcttgatgagttcagtaatataagcgaactgaaggatgctgttacggaatatattgaatactacaacagcagaagaattagcctgaaattaaaaggctctgactccaattga

SEQ ID NO: 143296 - DNA, 1119 bp, Homo sapiens
acggcagcaacatagtagaagcaaacgacagagtacatcccgtggagagaaagtacccgcggcaacaacgcgggtaccactggtgtggcgaaaggcgcgatgctgactcaccgcaatatgctggcgaacctggaacagcccctaatatgtcaaagccaaaatacccttttgaaaagcgccttgaagtcgtgaatcactacttcacaactgatgatggttacaggatcatctcggcacgttttggtgtcccccgaacccaggtcaggacatgggttgccctctatgaaaaacatggagaaaaaggtttaattcccaaacctaaaggcgttagtgctgatccagagttgcgtattaaggtcgtgaaagctgtgatcgagcagcacatgtcccttaatcaggctgctgctcactttatgcttgctggtagtggttctgtagccaggtggctgaaggtctatgaagagcgcggagaagctggtttacgcgcgctcaagattggcaccaaaagaaacattgcaatatcagttgatccagaaaaagcggcatcagcattggagctgtcaaaagaccgacgcattgaggatcttgaaaggcaagttcgatttcttgaaacgcggcttatgtatcttaaaaagctgaaagccttagctccttccccgaaaaaagtgaaagtactcaacgagttaaggcagttttatcctcttgatgagcttctcagggctgcggagataccgcgcagtacgttttattatcatttaaaggctctcagcaagcctgacaagtatgcggacgttaaaaagcgtattagtgagatttatcacgagaatagaggccgatacggataccgtagggtaacgctgtctcttcatcgagaagggaaacagattaaccataaagctgttcagcgcctgatgggaaccctctcacttaaagcagcgattaaggtcaagcgataccgctcttacagaggagaggtagggcaaaccgcccctaatgttctccaaagagatttcaaggctacgcggccaaacgagaagtgggttaccgatgttacaaaattagcagtcaatgggcgcaaccagtatttgtctacagtaatagatctccgggtaccgagct

SEQ ID NO: 143297 - DNA, 1029 bp, Homo sapiens; identical to SEQ ID NO: 143237

SEQ ID NO: 143298 - DNA, 3385 bp, Homo sapiens
atgagcgaaaagctacagaaagtcgcctcggcgcgtgccggccacggttctcgccgtgaaatcgaatctattattgaagccggtcgtgtgagtgatgatggcgaaattgctaaactcggcgataatgttgaagcttggtaccgagctcgattagcgggcgcttttacacttcaggagtgtgttatggcagcttcaacgttctttattccttctgtgaatgtcatcggcgctgattcattgactgatgcaatgaatatgatggcagattatggatttacccgtaccttaagtgtcactgacaatatgttaacgaaattaggtatggcgggcgatgtgcaaaaagcactggaagaacgcaatatttttagcgttatttatgatggcacccaacctaaccccaccacggaaaacgtcgccgcaggtttgaaattacttaaagagaataattgcgatagcgtgatctccttaggcggtggttctccacacgactgcgcaaaaggtattgcgctggtggcagccaatggcggcgatattcgcgattacgaaggcgttgaccgctctgcaaaaccgcagctgccgatgatcgccatcaataccacggcgggtacggcctctgaaatgacccgtttctgcatcatcactgacgaagcgcgtcatatcaaaatggcgattgttgataaacatgtcactccgctgctttctgtcaatgactcctctctgatgattggtatgccgaagtcactgaccgccgcaacgggtatggatgccttaacgcacgctatcgaagcatatgtttctattgccgccacgccgatcactgacgcttgtgcactgaaagccgtgaccatgattgccgaaaacctgccgttagccgttgaagatggcagtaatgcgaaagcgcgtgaagcaatggcttatgcccagttcctcgccggtatggcgttcaataatgcttctctgggttatgttcatgcgatggcgcaccagctgggcggtttctacaacctgccacacggtgtatgtaacgccgttttgctgccgcacgttcaggtattcaacagcaatgagcgtggggaaattagcgacgaagcgttcgcagaggcgctgtgtcatgagatggctctaccgctaagctacgagcagttctctcacggctggcaggcggtgtttgttgcgctgcgcccggaagtgatcgccatcatgcataaactgcgtgagcaggggcatcgcgtggtggtgctttccaataccaaccgcctgcataccaccttctgcaaagttctggtagagaaagcagtctctatggctcgcccctacaatgcgaaagtttctctgatccacgtagatgtaaactactctgacctatacaccgggcttattgatgtgaatctgggtgatatgcagaaacgcatctctgaagagacacatcatgcactgaccgagctttccactaatgcaggctacccaatcactgaaaccctgagcggcagcggcgacctgggccaggttctggtcgatgcaatcaagaaatacgatatggatttggtggtttgtggtcaccaccaggacttctggagcaaactgatgtcttccgcacgtatcgccattggcggcaacgcaacgtcggcgaatctgatggggatttccactcgcagcaccactattcgcatttatatgctctccaccggactggcaacgctggcggggattgtcttctcgatttatacccaggccggatatgcgctggcgggcgtaggtgtggaactggatgctatcgcctcagtggtaattggcgcccctaatatgtcaaagccaaaatacccttttgaaaagcgccttgaagtcgtgaatcactacttcacaactgatgatggttacaggatcatctcggcacgttttggtgtcccccgaacccaggtcaggacatgggttgccctctatgaaaaacatggagaaaaaggtttaattcccaaacctaaaggcgttagtgctgatccagagttgcgtattaaggtcgtgaaagctgtgatcgagcagcacatgtcccttaatcaggctgctgctcactttatgcttgctggtagtggttctgtagccaggtggctgaaggtctatgaagagcgcggagaagctggtttacgcgcgctcaagattggcaccaaaagaaacattgcaatatcagttgatccagaaaaagcggcatcagcattggagctgtcaaaagaccgacgcattgaggatcttgaaaggcaagttcgatttcttgaaacgcggcttatgtatctaaaaaagctgaaagccttagctcatcccacgaaaaaggctgcggagataccgcgcagtacgttttattatcatctaaaggctctcagcaagcctgacaagtatgcggacgttaaaaagcgtattagtgagatttatcacgagaatagaggccgatacggataccgtagggtaacgctgtctcttcatcgagaagggaaacagattaaccataaagctgttcagcgcctgatgggaaccctctcacttaaagcagcgattaaggtcaagcgataccgctcttacagaggagaggtagggcaaaccgcccctaatgttctccaaagagatttcaaggctacgcggccaaacgagaagtgggttaccgatgttactgaatttgcagtcaatgggcgcaagctgtatttgtctccagtaatagatctcttcaacaacgaagttatttcttacagcctttcggaaagaccagtgatgaacatggttgagaatatgctcgatcaggcattcaaaaagcttaatcctcacgagcatcctgttctgcactctgaccagggatggcagtatcgtatgagaagatatcaaaatatccttaaagaacatggtattaaacaaagcatgtccagaaaaggcaattgtctggataatgactgtggtggagtgtttatttggaaccttaaagtcggagtgtttttatcttgatgagttcagcaatataagcgaactgaaggatgctgttacggaatatattgaatactacaacagcagaagaattagcctgaaattaaaagacctatatgcctcgtgtttaactgtccaactttttggggtcagtacagtgatggggctgctgattcgcatccttggcagcattttccagaaagccctcaacatcagcaaaatcgaatcttttgttgcggttactactattttcctcgggcaaaatgagatcccggcgatcgttaagcggtttatgatcgctgaatcgcacgaagtgttaccgcatttgtacgggatgggtcactgcgggtcgagaagatggtatgccgaatggcgtcccttgcaccgagttcatgaaccctcgggctccttgccctggccttag

SEQ ID NO: 143299 - DNA, 2019 bp, Homo sapiens
atgagcagctcctatgagtcctacgatgaagaggaggaggaagggaagagcccgcagccccgacaccagtggccctcagaggaggcctccatgcacctggtgagggaatgcaggatatgtgccttcctgctgcgtttataagtgtttcgggcagtgggccaagcagctgacggtcatcagggaggaccagctcctgtgttacaaaagctccaaggatcggcagccacatctgaggttggcactggatacctgcagcatcatctacgtgcccaaggacagccggcacaagaggcacgagctgcgtttcacccagggggctaccgaggtcttggtgctggcactgcagagccgagagcaggccgaggagtggctgaagcatctaaaggcttccagcaagcctgacaagaaagcggacgttaaaaggcgtattagtgagatttatcacgagaatagaggccgatacggataccgtagggtaacgctgtctcttcatcgagaagggaaacagattaaccataaagctgttcagcgcctgatgggaaccctctcacttaaagcagcgattaaggtcaagcgataccgctcttacagaggagaggtagggcaaaccgcccctaatgttctccaaagagatttcaaggctacgcggccaaacgagaagtgggttaccgatgttactgaatttgcagtcaatgggcgcaagctgtatttgtctccagtaatagatctcttcaacaacgaagttatttcttacagcctttcggaaagaccagtgatgaacatggttgagaatatgctcgatcaggcattcaaaaagcttaatcctcacgagcatcctgttctgcactctgaccagggatggcagtatcgtatgagaagatatcaaaatatccttaaagaacatggtattaaacaaagcatgtccagaaaaggcaattgtctggataatgctgtggtggagtgtttctttggaaccttaaagtcggagtgtttttatcttgatgagttcagtaatataagcgaactgaaggatgctgttacggaatatattgaatactacaacagcagaagaattagcctgaaattaaaagcccctaatatgtcaaagccaaaatacccttttgaaaagcgccttgaagtcgtgaatcactacttcacaactgatgatggttacaggatcatctcggcacgttttggtgtcccccgaacccaggtcaggacatgggttgccctctatgaaaaacatggagaaaaaggtttaattcccaaacctaaaggcgttagtgctgatccagagttgcgtattaaggtcgtgaaagctgtgatcgagcagcacatgtcccttaatcaggctgctgctcactttatgcgttgctggtagtggttctgtagccaggtggctgaaggtctatgaagagcgcggagaagctggtttacgcgcgctcacagattggcaccaaaagaaacattgcaatatcagttgatccagaaaaagcggcatcagcattggagctgtcaaaagaccgacgcattgaggatcttgaaaggcaagttcgatttcttgaaacgcggcttatgtatctaaaaaagctgaaagccttagctcatcccacgaaaaaggctgcggagataccgcgcagtacgttttattatcatctaaaggctctcagcaagcctgacaagtatgcggacgttaaaaagcgtattagtcagatttatcacgagaatagaggccgatacggataccgtagggtaacgctgtctcttcatcgagaagggaaacagattaaccataaagctgttcagcgcctgatgggaaccctctcacttaaagcagcgattaaggtcaagcgataccgctcccacaccggagaggctgggaagtctgagatcaaggtggcagccaatttggtgtctggtgagggcctgtttcctggtgatgaccatctttttgctccctggggtctctttcctaagggcactaatcctacccatgagggctccaccctcgtgacctaa

SEQ ID NO: 143300 - DNA, 378 bp, Homo sapiens
gccaatgtcagccagccagatacaccgtttggtggtggacagactgtggtttctccccaaacgcagatcgatttacgccagagcggcgtttcgctgcaaagcgtacgttccagcgccagcctcaataacgtgtgcgggatgtctgcggccaaaactgtatatcatctgatgatcagcgtcagcatactactggcaagtgcggcttgggatgcgcaatcactcaccgaactaaagtcgaaaccggttgaagatccggcggcaaatatctgtctggtggcccgtcaggtggaaggcatgttcgcgcagatcatgttaaacagcatgcgtgacgctttacctaaagatggcctgttcagcagcgagcacactcgcctgtaa

SEQ ID NO: 143301 - DNA, 5082 bp, Homo sapiens; identical to SEQ ID NO: 131977

SEQ ID NO: 143302 - DNA, 1269 bp, Homo sapiens
atgagcgaaagtaataagcaacaggcagtgaataagttgacagagattgtcgctaactttaccgccatgatttctacccgaatgcctgatgacgtggtggataaactaaaacagctaaaggatgccgaaacgtcgtcgatggggaaaattatctaccatacgatgttcgacaacatgcaaaaagcgattgacctgaatcgtcctgcctgtcaggacaccggggagattatgttcttcgttaaagtcggttcccgcttcccactgcttggcgagctgcaaagcatactcaaacaagccgtggaagaggcaaccgtcaaagcgccactacgtcacaatgcggtagaaatttttgacgaagtaaacaccggcaaaaataccggtagcggcgtaccgtgggtcacctgggacatcatccccgacaatgacgatgcggaaatcgaagtttacatggcaggcggcggctgcacgctacctggccgctcgaaagtgttaatgccgtcagaaggctacgaaggcgtggtgaaattcgtcttcgaaaatatctccaccctcgccgtaaacgcctgtccaccggtactggtgggcgtgggcatcgccacctcggtggaaaccgccgccgtactctcgcgtaaagccattttgcgcccgattggcagccgccatcccaatccaaaagcggcagaactggagctacgcctggaagaaggactcaaccgtctggggattggtccacaagggctgaccggcaacagttcagtgatgggcgtacatatcgaatctgccgcccgccatccgtcaaccatcggcgttgctgtctctaccggctgctgggcgcatcgtcgcggcacgctgctgcgcgttatgaaaaagatcctgacaaccccgatcaaagctgaagatctgcaagatattcgcgtcggcgatgtgatctacctgaccggtacgctggtgacctgccgcgacgtttgtcaccgccgtttgatcgaactgaaacgtccgatcccttacgatctcaacggcaaagcgatgttcctatacttatatggtatgctgtttgaaacgaaggtgaagaactgcgcacgtggcaaccgacggccaccgtctggcggtctgttcaatgccaattggtcaatctttgccaagccattcggtgatcgcgtgattgaactgatgcgtatgctcgacggcggcgacaatccgctgcgcgtacagattggcagcaacaacattcgcgcccacgttggcgactttatcttcacctccaaactg

SEQ ID NO: 143303 - DNA, 946 bp, Homo sapiens
gaattcattgtcgcgacccggacatcaggtggacggggagatccctgacaatacccaacttagtcagcttgtaatgcaactggctggtctgagagtgctgacaaacgcaaaactgcctgatgcgctacgcttatcaggcctacgtggagcccacaatatattgaattagcacgatttcgtaggccggataaggcgttcacgccgcatccggcgtgtacaacgcgcacttggtcaacaatctgaggccagtcagtaatgttactgcctggcctttaatcaatgaatcagaaacgcttacagcgccatcaacttgtccagcgacggtgcgaaataatagccgccggttaccggtttggtgaaacgcaacatcgcatcacgcttaccatcggtatcgccaaacatgctcagcagttgctgctcaatgttatgcagacgcgcggcagtaggcgcagaagtacagaccgtgagtgccactggcagtgccgtacggcaggctctggcgaacaatcttcagccctttgccatcttctttcagatcaacgcgggtgaggtgagaggtttccggacgttcgtcgccgtcgatctcttcgttggcctctttggtgcgcccgatcaccatctcctgatcgtgaacgctcatccggttgagctgcttcaggttgtgttcccaacgctggacaaacacatagctgccgcccgcatccacgccgtctttgataaccgccacttcgcgacgcgtctcttcacccgccgggttttccgtaccgtcaacaaagccgctcaggtcacgctcttcaacccaacggaagccgtggatctcttctttcacttcaatgcagtcaccaaaggcttccatctccgccagggcgacaaagaagggtacgtccaggctcatacaaataatggcgatctccgggtacggacctcgaatccgtagtcatggtcg

SEQ ID NO: 143304 - DNA, 2180 bp, Homo sapiens
  misc_feature (1)...(2180): n = a,t,c or g
atgaaaaagatcctgacaaccccgatcaaagctgaagatctgcaagatattcgcgtcggcgatgtgatctacctgaccggtacgctggtgacctgccgcgacgtttgtcaccgccgtttgatcgaactgaaacgtccgatcccttacgatctcaacggcaaagcgattttcgtccgctgcattcttgatgctgatgcccagcgcgaaggtatcaatgcctcgacacgctacccgaaaaactgggtgcagtcgggggatccggcgcgcgaatccaccatgattcagtcacaaattaaccgcaatattcgtcttgatcttgccgatgccattttgctcagcaaagctaaaaaagatctctcatttgccgagattgccgacggcaccggtctggcagaagcctttgtaaccgcggctttgctgggtcagcaggcgcttacataaagacgccgcccgcctgaatattgcatgccagcgcggcgcgtcgaagaggcggttatcaaaggaccgcgtggatgcaggcggcagctatgtgtttgtccagcgttgggaacacaacctgaagcagctcaaccggatgagcgttcacgatcaggagatggtgatcgggcgcaccaaagaggccaacgaagagatcgacggcgacgaacgtccggaaacctctcacctcacccgcgttgatctgaaagaagatggcaaagggctgaagattgttcgccagagcctgccgtacggcactgccagtggcactcacggtctgtacttctgcgcctactgcgcgcgtctgcataacattgagcagcaactgctgagcatgtttggcgataccgatgctgtagcgcgtaccatctcgggcaaccacgcgaatgacttcgcaaagacgatcagcaatacgcgtgcgcccgacggagataaagtcgtagtaaggagaaaggcgtttgaaatcggtatagataagcgatggcagagaatcaacaatgtaatcgccattaagcgtgaacggttcaatccatttagcctgattgctacggttaaacttgcgtcgatcaataccagaagattcgatcagcgcatccagttcacccactgcgtcgcgccactgctgttttaccgtatcaatacgcgccacaatttgcgcataacgattaatatcgcgcagcaacgcctgcggccctttccaggtttcaaagacgacctgggctatttcacgcggcagcttaagcaggtggcgacgcagcaaatcggcgcaggctcattcaacatgtctgcagccttcctctctacacagggcttccacgtggaccacacggccgagctgcggggaatccggtggaccagcagtttgcggcgggagacctcggactatcaccgcacgctgacgcccaccctggaggcactgatgatgtacgttggtgtctcatctccacttaaaaacgttgggactcaggtgtataagctggcgcagggcaatattctggttggcggcgcaggagcctccgctggcggtagcagtgttcaggttaaccaactgaacggtggacggatcaccaatggtgcggttattgaacgtgaattgcccagccagtttggcgtcgggaatacccttaatttgcaacttaacgacgaagatttcagcatggcgcagcaaatcgctgacaccatcaaccgcgtgcgtggatatggcagcgccaccgcgttagatgcgcggactattcaggtgcgcgtaccgagtggcaacagttcccaggtccgcttccttgccgatattcagaatatgcaggttaatgtcaccccgcaggacgctaaagtagtgattaactcgcgcaccggttcggtggtgatgaatcgcgaagtgaccctcgacagctgcgcggtagcgcaggggaatctctcagtaacagttaatcgtcaggccaatgtcagccagccagatacaccgtttggtggtggacagactgtggttactccacaaacgcagatcgatttacgccagagcggcggttcgctgcaaagcgtacgttccagcgccagcctcaataacgtggtgcgcgcgctcaatgcgctgggcgctacgccgatggatctgatgtccatactgcaatcaatgcaaagtgcgggatgtctgcgggcaaaactggaaatcatctgatgatcagcgacacccacctnntnncaattgtgcc

SEQ ID NO: 143305 - DNA, 450 bp, Homo sapiens
tcaatgtcccactccttcatcttctttctccacactcactctcttggtcacttcagccaatctaatgactttaagtgtcatcttgatatctgtaactccccagattgtatcttcacctttctgctgaattccacatgcatatttctggctaccttcctgatactcccacttgaatgttgaatgccttgttactctttgagatggggtgattagaaaaggccttgggaagagacaacagttaagttcatcccagaagtatgaggaggtatcaggcattgtgaggacagagggaagtgtttcagcacctgcaaattcagaaagcggcagatcctgcttctggatccagagacagaccctcccatttttctcatagaactctgtggcacttgaaaaaggtcctcggggaagtaaattctttgagacaaactgtttctggctgctaataactga

SEQ ID NO: 143306 - DNA, 1770 bp, Homo sapiens
atgctgatcctctctgctatttgtatgctgggcttcagtgccagtatgggcagcggctcggttagcctgttcctgatgattgccttctacgccttaagcggctttttccagagtaccggcggttcgtgcagttactccaccatcaccaaatggacgccgcgtcgtaaacgcgggacattcctcggtttctggaatatttctcacaaccttggcggtgcaggcgcagcaggtgtggcgctgttcggggcaaattacctgttcgatggccatgtcatcggcatgtttatcttcccgtcgattatcgcgctgattgtcggttttatcggcctgcgttacggcagcgactccccggaatcttatggcctcggcaaagctgaagaactgttcggcgaggagatcagcgaagaggacaaagagacagaatctaccgatatgaccaagtggcagatctttgttgagtatgtgctgaaaaacaaagtgatctggctgctgtgcttcgccaacattttcctctatgtggtacgtattggtatcgaccagtggtcaaccgtatacgcgttccaggaactgaaactctctaaagcggtggcgattcagggctttacgctgtttgaagctggtgcgctggtcggaaacggctgctcatacgcgcaggggatgtgtggtaaaacggcggaaacttctgaccttcaggatttactcatcgcggcgctgcaagggctttctgcctgggcggtaaaagcgcgtgaatacggcatcatcaaccacgatgttgacagcttcgcgccacgtgcctttttctcaaccctgaccaacgttaacttcgattctccgcgtattgtcggctacgctcgtgaagcgattgccctgcgcgaggcgctgaaagcgcaatgcctggctgtagatgccaacgcgcgcgtcgataacccgatggctgacctgcaactggtgagcgacgatctcggcgagctgcaacgtcaggcagcagaatttacccctaacaaagataaagcggcgattggcgaaaacattctcggcctgcgtctgctgtgcctgtatggcctgaaagtgttcaatggaagagaagaccaactagactcttgttatcacgggaataggcagctgcgcggcagcctgcgcctgttgtttttggcgtttatccgccagcgtctgcgcgacctgataataaccgctcaccgcgtcattcgggttaatcgccagcacgccgcactgggcgtcaagcactgcaggttgcccggcataacgggcaatcgcatccagcggcaagccactcagtaccgggatcgccgaggcacgggccagaatcagtgtatgcgaggtgatatgcagcaactgttcgctgatatcgcgaatgtcgctaacacgttcgcgcagataatcgctggcagaggcagaaagtttggcgcaaacctgctccatattgctgatgatcgccgcccccagcccctgatgctgttctgtcatcaggcgacggatattgcctgcaaattcatcatcctgaatcagcgacaaatgggcgctgaggatagttttgctttcgccgtcacgctcacgcaattgctggttcagttgctcggcaagcgttgccaggctgtgctccagccggatggacagtgtacgctcgacagcgacccggatgacatgaaggacttcatggagaacgtgctgcgctatctatccgacgatagatggaagccgacgcgaaagccacgcatgaccgtaggcaccaaacacgtggatactgtctag

SEQ ID NO: 143307 - DNA, 2502 bp, Homo sapiens; identical to SEQ ID NO: 143147

SEQ ID NO: 143308 - DNA, 607 bp, Homo sapiens
cggccgccgcgcccccgccggagctgccggagtggctgcgggacctgcctcgcgaggtgtgcctctgcaccagtactgtgcccggcctggcctacggcatctgcgcggcgcagaggatccagcaaggcacctggattggacctttccaaggcgtgcttctgcccccagagaaggtgcaggcaggcgccgtgaggaacacgcagcatctctgggagtaaatgtcccttcaacggtaatggaagccatgtgcagacaagacgccctgcagcccttcaacaaaagcagcaaactcgcccctaccacccagcagcgctccgttgttttcccccagactccgtgcagcaggaacttctctcttctggataagtctgggcccattgaatcaggatttaatcaaatcaacgtgaaaaaccagcgagtcctggcaagcccaacttccacaagccagctccactcggagttcagtgactggcatctttggaaatgtgggcagtgctttaagactttcacccagcggatcctcttacagatgcacgtgtgcacgcagaacctcgacagaccctaccaatgctgccactggtctcagttcttttaccagccttcagac

SEQ ID NO: 143309 - DNA, 541 bp, Homo sapiens
gttgcgacatgtgcgcggacaaccgcaacggcgagtgccctatgcatgggccactgcactcgctgcgccggcttgtgggcaccagcagcgctgcggccgccgcgcccccgccggagctgccggagtggctgcgggacctgcctcgcgaggtgtgcctctgcaccagtactgtgcccggcctggcctacggcatctgcgcggcgcagaggatccagcaaggcacctggattggacctttccaaggcgtgcttctgcccccagagaaggtgcaggcaggcgccgtgaggaacacgcagcatctctgggagatatatgaccaggatgggacactacagcactttattgatggtggggaacctagtaagtcgagctggatggaggtatatcccgatgtgcaaggcactgcggagaacagaatctaacagtagttcagtacaggaatagctttatttgcacaacagcatgggaaaccaagaactcgctaccttcccaaggatacctttccaaaaccgttagacttagtggcagtgacagagccagg

SEQ ID NO: 143310 - DNA, 4003 bp, Homo sapiens
caggtccgtccgcactctcgcgccctccgcgggcctcccaattttctcgcttgcaggtcgggaggtttccgggcggcacaatctctaggactctcctcccgcgctgctcaggggcatgtagcgcacgcagggcgcacactctcgcgcacccgcacgctcaccgagacacccgcacgcacccaccggcagcaccgagttttcagttcgaggcgccggacatgctgaagcccggagaccccggcggttcggccttcctcaaagtggacccagcctacctgcagcactggcagcaactcttccctcacggaggcgcaggcccgctcaagggcagcggcgccgcgggtctcctgagcgcgccgcagcctcttcagccgccgccgccgcccccgcccccggagcgcgctgagcctccgccggacagcctgcgcccgcggcccgcctctctctcctccgcctcgtccacgccggcttcctcttccacctccgcctcctccgcctcctcctgcgctgctgcggccgctgccgccgcgctggctggtctctcggccctgccggtgtcgcagctgccggtgttcgcgcctctagccgccgctgccgtcgccgccgagccgctgccccccaaggaactgtgcctcggcgccacctccggccccgggcccgtcaagtgcggtggtggtggcggcggcggcggggagggtcgcggcgccccgcgcttccgctgcagcgcagaggagctggactattacctgtatggccagcagcgcatggagatcatcccgctcaaccagcacaccagcgaccccaacaaccgttgcgacatgtgcgcggacaaccgcaacggcgagtgccctatgcatgggccactgcactcgctgcgccggcttgtgggcaccagcagcgctgcggccgccgcgcccccgccggagctgccggagtggctgcgggacctgcctcgcgaggtgtgcctctgcaccagtactgtgcccggcctggcctacggcatctgcgcggcgcagaggatccagcaaggcacctggattggacctttccaaggcgtgcttctgcccccagagaaggtgcaggcaggcgccgtgaggaacacgcagcatctctgggagactggggagcagtgctggatctctgtggatctgaggctccaggctgaaatccacaaatgtcccgggctttgcatccagatatatgaccaggatgggacactacagcactttattgatggtggggaacctagtaagtcgagctggatgaggtatatccgatgtgcaaggcactgcggagaacagaatctaacagtagttcagtacaggtggcagtgggtttggccctttgatgattcaggatttgtttcagttgatgaggcagtttccgggcatagagaagcccctggtttcctgaaagtaacaaggcattcaacattcaagtgggagtatcaggaaggtagccagaaatatgcatgtggaattcagcagaaaggtgaagatacaatctggggagttacagatatcaagatgacacttaaagtcattagattggctgaagtgaccaagagacactgtcccccgggaagatcggttctcggagatagtccaaccatcttgaaacaaggaacagtagcacaccgagcaaccaccaacgccgggaaccaacacgtggacatgcccaaagagatccccaagaatgtggcgcccgatgacccgagcgctgtggcacatcctggggacacgagtttgcagggggagctggtaaccccctgccagactgcacaggggggaaaccgcagtattcaaaagggggcctcaatcagcggaaagaagggggtcaatggaatagggagctcagggggccagcatcgtttccggctagccccccgaattctaaacgcatcttctggagacactctaaaagccacacgcagtaaagctgatgatctgggagcagtggaagcaagactgctctctgttggctcagtcacaggacacataggaaaagaattcatttatggctgctgtggtgttgtcccatggggaaggaagatggatttgtcaaccccggagcgaggttctccctacccgaggctgctgccgtgtggagatcccctgggtgaaaccattgtcgccattgaccaggaggcaaaaccttcaactgaggacttagggaataagaaggaaacaaaatacattaaactcaaagtcattagatgggataacagtgacttcaatttcctgtattctaattatgagaggattcgggcacgcacaacaaagaaagaggactctgcgactaatgtcccggtgacgtttgaaaaacacggttcccacgccgtcgtatatgcacggcgcagcgccacggtgctgaccgaccggaacaaggaggccccaagagtgccccaaggcggttatatggtttcttttgtggatatccctgaagcgttgacccagggcgaaactgtcgctgaagcgatggaagcggcaaaagatgctttactgaccgcatttgatttttattttgaagataacgagcttatccctttaccttcgccattaaatagtcacgatcactttattgaagtacctttgagcgtcgcctctaaggtattgctgttaaatgcttttttacagtcagaaatcactcagcaagagttagccaggcgaattggcaaacctaaacaggagattactcgcctatttaacttgcatcatgcgacaaaaatcgacgccgtccagctcgcggcaaaggcgcttggcaaagagttatcgctggagtgccttatggacattctcaatcttaataaacatatttccggacagttcaacgccgaactggaaagtatccgcacgcaggtgatgaccctgggcggcatggtggacaagcagctttctgatgcaatcaccgcgatacataaccaggacagcgatctggcgaagcgcgtcatcgaaggccacaagaacctcaacatgatggaagtggcgatcgatgaagcccgcgttgagccatcatcgccaaacatcagtcagacggcgagcgacactgagactggttatggtgatcagtaaaaccattgccgagctggagcgtattggtcgacgtaggtcggaacaaaatctgccgtacagcgctggagaaattatcccaacagcatcagccgtaggtggtaagtgctggagtacgttggaccgtcataccatccagatgctgcacgacgtagtgaaagcgttcgcgcggatggacattgacgaaacggccaagtgccagatctttgttgagtatgtgctgaagcccaaagtgatctggctgctgtgcttcgccaacattttcctctatgtggtacgtattggtatcgaccagtggtcaaccgtatacgcgttccaggaactgaaactctttaaagcggtggcgattcagggctttacgctgtttgaagctggtgcgctggtcggtacgctgctgtggggctggctctctgacctggcgaacggtcgccgtggcctggtggcctgcatcgcgctggcgctgattatcgccacgctcggtgtgtatcaacatgccagtaacgaatatatctatctggcttctctctttgcgttgggtttcctggtctttggcccgcaattgttgattggtgtggctgctgttggctttgtacctaaaaaagcgattggcgctgccgatggtattaaaggcacctttgcttacctgattggtgacagctttgccaagttaggtctgggaatgattgccgatgggacgccggtattcggccttaccggctgggcaggcaccttcgccgcgctggatatcgccgcgattggttgtatctgcctgatggcgatagtggcggtaatggaagaacgcaaaatccgccgcgagaaaaaaattcagcagttgacagtggcataaacgtaactggtgacttttgccccggaatgacgcccggctttttttaatatatcggggacttccagcgtagtggagggaaactttttgc

SEQ ID NO: 143311 - DNA, 2094 bp, Homo sapiens
atggtgcggcacacaaaacccacagggacaacacaaccaccccaaagactaacacacgagacccgcgccatcaggcaaccacccaactggcacccagcgcacacacaccagtggtgcaaccacaccaacgcggaatcacaacaccgcaacccaagactacaactggaaacccgaatatgcgccaacccaaaacaacggcactcgcaggcgcatcacacccaccatgtccaccaccaaacacagcaacggaacaacaccaccaccgacaccagcacacacgcgacaaagcggatactcgaaccgacacccaacccatcaaccacatctacaacccagtgtggaacaacacaaaaaacgcgaagacatccactccacccaccaccaaggcatccacaacaaagaaaaccagctcgcacccaccaacaccacccatcgcgcaaccgcagcgcaacacaacaacatgtgtccacaaccaacaaactgcccacccacgagcacgaaccccaccaccgacggtcaacacacacgagcacccgtgaactgaccgtcccaccacacagcgaccccccgcagaccaacactgcaggaggacacaaaccacccaccgaggtcatcaccaccccccccccgagagaccaccacacccgacggccgactcccacacccaccaccacccggtaccccacattctcccacaccgctaccgacccacaaaacaccacggatcacccgcaccccacaccagtgcacaccaacaacactgattctgattattctcacaaaacattaataccagacacacaaagcctcaacgttgtgatctacgacaagccgcgaatggaactcgcagcattgacaaattcacccatgggaacatcaaaaggtcgcgccgggcgcatgggcgttcacttcgtcggcaaaatcttttgcctggaggaaatcccggaagacaatctcaatcaagaggtggatattccgctcggtattcagggcattgataccccaatcaacctgttagccagcgttcaaccagaccacttgtccgagttttcacaggatcgctttgatgaggttattcataaacgaccgtgtttccatcgaccttgtgaagaagcattcgtacttccgtgtcgagcagttcgaatgtgctggaaagcgaaccagggaaaagtgcagggatttacgccagaagcgattgatgcactggtgcaacgaccagagtgtgacgtaattctcattgaagcagatggctcgcgtggaatgccgttaaaagcgcctgatgagcacgaaccttgcatacccaaaagcagttgctgcgtgattgctgtgatgggaggacatactttgggcgcgaaagtgagcacagaaaatgtccatcgctggtcgcagtttgctgatattaccgggttaacacctgatgcaaccttgcaactgagcgatctcgttgcgctggttcgccaccctcagggggcgtttaaaaacgtaccgcaaggttgtcggcgagtctggttcattaaccgtttttctcaatgtgagaatgcgattgcaccaagcgagctccttcaaccgctgcaacaacacgacatttgtgaattagcggcccgggtattccgggttactgaaaggatatccattgaggttggtatgaatattttcacagaggctgcaaaactcgaagagcaaaattgtccgtttgctatggcgcaaattgttgatagccgaggctcgactccccgccattctgcacaaatgttagtgcgcgccgatggttctatcgtcggtacaattggtggcggaatggttgagcggaagagccacactctgtctggaggtctcttcataacactcacatatccggtgccgagggggaaactttttgatcctagtatgccaacaagtaacaccgtgaatcctaggagtaaagctaggcctgctgaagacttggtttgttgggagcaagttgccatagtaacagctgtacaagtgagaacaactgttgagatgctaagattatctaagacccacatccttgtacttcaggatgataccatgactgtaaataggaagttcctaacttatactacactatcttaa

SEQ ID NO: 143312 - DNA, 751 bp, Homo sapiens
atgcagctgccgccagaaaccgtttacgcccagacgctgtatcaaattggcgcgctggcaacgattgcccgtgcgcaaggcggcgtaatgcgtcatgtcaaaccgcacggcatgttgtacaaccaggcggcgaaagaagcacaactggcagacgccatcgccagagcggtatacgcttgcgatccagcattgattctcgtcgggctggcgggaagcgagctgattcgtgcaggcaagcaatatggtctgacaacgcgcgaggaagtgtttgccgatcgcggttatcaggctgacggctcgctggtgccgcgaagccagtcaggcgcgttgattgaaaacgaagaacaggcgctggcgcaaacgctggagatggtgcaacacggcagagtcaaaagtatcaccggcgaatgggcaacggtcgcggcgcaaacgttaaaaccttatcaatcacaacttatcggtcaacacgttacccatgtggaaacgcgtggtaaggcgttgttaactcatttttccaacgacttaacgctctacagccataatcagctttacggcgtctggcgcgtggttgataccggcgaagagccgcagaccacgcgagtattgcgggtaaaactgcaaacggctgacaaaaccattctgctttatagcgcctcggatattgagatgttgaccccggaacaactgaccacgcatccgtttttacaacgcgttggtcccgatgtgctggatccgaatctgacgcccggag

SEQ ID NO: 143313 - DNA, 930 bp, Homo sapiens
atgagcgggcagtgtcatactactcaggggaatccgtatattggcgtcaattttggcgttaaaaccctggaggaagaagcaaatacggcaggggtagttaaagacaaattttatcagtggaacgaatcgaatgattattatgtttcctgtgattgcgataaagacaatgtcagaagtggccgatgggcattcgccgcggattcaccgttagtctatttaggcgacaactggtacaaaattaatgactatcttgccgccaaagttttattgcaggttaaaggcagttctcctactgcggttcctttcgaaaacgtgggcacagggggggatacccgatggcatatttgcgaccctggcggtcaacgtttaggtgggcagggggcaagcggtaatagcggtagcttttccctgaaaatattgcagccgttcgttggctcggtcgtcattcctcctatggcgctggcgcgattatatgaatgctacaacatacccgcaggtgattcctgcacgactacaggagaagaacctagacgatttgtatctacttccctgtcgccgcgctttcgtaaccgtcagtttgctggattactgctcgatcaagcgtttctggctgggcttggcaattatttgcgggtggagatcctctggcaggttgggttgactggaaatcataaagcgaaagatctcaatgcggcgcaactggatgcactcgcacacgcgttactggagattcctcgattttcctacgctacgcgggggcaggtggatgagaataaacatcatggggcgctgtttcgctttaaggtttttcatcgagatggcgaaccgtgcgaacgttgtggcagcatcattgagaaaaccacgctgtcatctcgcccgttttactggtgccctggctgccaacactatgccgaccgcttcggcgcataa

SEQ ID NO: 143314 - DNA, 1116 bp, Homo sapiens
atgtgcctgatatttggcctaggcctcaataatagcattggcaaacagggtttccttggggcccagggacttgaattgggtacccgaattgcgtctggtgttttacgccagcaactggatttgattgccacgcgcactggggaaaataaatggctgacgcgtgagcaaacctctggcgtgcagcaacaaatccgccaggctttgtcggcgttgccgttgccggttaaccgactggaagaattcgataactgccgtgaggcgtggcgtaaatatgttggctttggtaaaacagaagtggcgatgcgcgcagctttcctggcagtagataaccacaagcaggcttattttcaaaaatgttttggccaactggccaagacctgccctgtgcagctgtgggttgattccacacccccgcccggcacccgcgtccgcgccatggccatctacaagcagtcacagcacatgacggaggttgtgaggcgctgcccccaccatgagcgctgctcagatagcgatggtctggcccctcctcagcatcttatccgagtggaaggaaatttgcgtgtggagtatttggatgacagaaacacttttcgacatagtgtggtggtgccctatgagccgcccttacaagaaaccatcgttaagcgtctgcaacaggaatcctggtttgtgggcaccagcaactacgatctggcgcgtcggctttccctcacgccgatgggaacacaggcacacgaatggttccagattatcctgaattgtcctgctacttgggaggtgcttgctggattactgctcgatcaggcgtttctggctgggcttggcaattatttgcgggtggagatcctctggcaggttgggttgactggaaatcataaagcgaaagatctcaatgcggcgcaactggatgcactcgcacacgcgttactggagattcctcgattttcctacgctacgcgggggcaggtggatgagaataagcatcatggggcgctgtttcgctttaaggtttttcatcgagatggcgaaccgtgcgaacgttgtggcagcatcattgagaaaaccacgctgtcatctcgcccgttttactggtgccctggctgccagcactag

SEQ ID NO: 143315 - DNA, 1100 bp, Homo sapiens
atggagctcggtaccacatttaacgccaaaaacactacaaaactggaatatttaaacttaagcaataacaatttactgccaaccaatgacattgatcaactaatatcatcaaaacatctttggcatgtattagttaacggcatcaacaatgatccacttgcacaaatgcagtactggactgcagtaagaaatataattgatgacactaatgaagtgaccattgatttatcaggacttaatttaaccactcaaccaccagggctgcaaaacttcacatctatcaatcttgataataaccaattcacacattttgatgcaaccaactacgatagactcgtaaagctaagtctgaatagtaatgctcttgagtcaataaattttcctcaaggcagaaatcgcctcgatattgagatgttgaccccggaacaactgaccacgcatccgtgtgttgtacaacgcgttggtcccgatgtgctggatccgaatctgacgccggaggtggtgaaagaacgattattgtcgccgcgctttcgtaaccgtcagtttgctggattactgctcgatcaggcgtttctggctgggcttggcaattatttgcgggtggagatcctctggcaggttgggttgactggaaatcataaagcgaaagatctcaatgcggcgcaactggatgcactcgcacacgcgttactggagattcctcgattttcctacgctacgcgggggcaggtggatgagaataagcatcatggggcgctgtttcgctttaaggtttttcatcgagatggcgaaccgtgcgaacgttgtggcagcatcattgagaaaaccacgctgtcatctcgcccgttttactggtgccctggctgccagcactaggccgaccgcttcggcgcataggttgaaataaaccgcgcaatggcaggccctgtcagcaaaatactgaacaggcgtagggtttgcatcgccataatgagcgccatatcggcattgctcctgcggcgatgaccgcaacgtaatcaagcccgccgggtggttggccaagtaagcagtcataaatcatgggataaccggttagccccaagccataccgacaatagccg

SEQ ID NO: 143316 - DNA, 453 bp, Homo sapiens
ccatcattacggattcaatgtccgtacccgtacatcgcagggactgggaataccgtgacggaacccgacttgctccctttgcagagcggtcgtcaactgaaccgcaacagcagccatcgccaggctatgttccgcaatatggcaggttcactggttcgtcatgaaatcatcaagacgactctgcctaaagcgaaagagctgcgccgcgtagttgagccgctgattactcttgccaagactgatagcgttgctaatcgtcgtctggcattcgcccgtactcgtgataacgagatcgtggcaaaactgtttaacgaactgggcccgcgtttcgcgagccgtgccggtggttacactcgtattctgaagtgtggcttccgtgcaggcgacaacgcgccgatggcttacatcgagctggttgatcgttcagagaaagcagaagctgctgcagagtaa

SEQ ID NO: 143317 - DNA, 525 bp, Homo sapiens
atgcagacaatgccaaatgctagcaaggatgcagaacaacaggaactgtcattaattgctgtgtttctggtaattaaactttctcagatactagaatgtggaagacctgaaaccagagctggtcttccaatccctgcatcccaggttgaagtgttgaaaaacccaaatgggaccaggctggcctcttcatcgccactaaacggcgggaaatcaaaatggcagtgggtgtcgataaaacggcaaatcaagccgctgattactcttgccaagactgatagcgttgctaatcgtcgtctggcattcgcccgctatgttggaggcctgtaccgagtaataatgctcatcttggggcactcattcaattgtgataactcacccagcttaaatcagctcggtacccgatttctaaggattcagcatggcaattttctacacgcggcgcgcaccatctctttaattttgaggtctaaaatgtcttcacaacaatggaaatcaatagaagttcctcagtcggctctactgtga

SEQ ID NO: 143318 - DNA, 915 bp, Homo sapiens
atgcaagcgctgtgggaagatatcgaccgcctcacattgccttatggggatttagaatccgacgaagacccagggagcaaagaagggaaaccagtcataaccgcggccgtgaagctgtgcgagcccaagctttggagggccgggaactgtttcagccggctggcggcctttaacgaaggaagaaagacccccagcctcagccccgggaccctcagtgattctctggaggacccgctggggggcagcctcagacaagggaccctcagtgattctctggaggaccctctgcgtggcagcctcagccccgggaccctcagtgattctctggaggaccctctgcgtggcagcctcagccccgggaccctcagtgattctctggaggaccctctggggggcagcctcagccccgggaccctcagtgattctctggaggaccctctgcatggcagcctcagccgcgggaccctcagtgattctctggaggaccctctgcgtggcagcctcagccccgggaccctcagtgattctctggaggaccctctgcgtggcagcctcagccccgggaccctcagtgattctctggaggaccctctgcgtggcagctttgcagctgcagcaccaggacccccgcaccactgccgccgggtgattctggttagccatggggactcctgccgcttcctagctaaccacaattacctctgctatctaaagagaacaaggggtcgtccccggcagggagacccaacagggattcgggatgggatgtttttcaggcgaatcgaatctgtcgccgaagtaaagggtaaattacgagtgttagatttgaaacggcaggatgtgcaggatgctgttgctaccgctgaaaatgcagaaacgttatttaggagcggacttgctgatgactatcagtaa

SEQ ID NO: 143319 - DNA, 2417 bp, Homo sapiens
atgcttgcgcagtcgttacaggcgttagaacaggatggttttcttaaccgtatcgcgtatccggtggtgccgccgcatgtggaatatagcctcactccgctgggcgagcaggtgagcgaaaaggttgctgcactggcggactggattgagttgaatttgcccgaggtgttggcggtgcgggatgaacgcacccgctatgacattgcggttcccaggaaacggtatggccatgccgtttcgaggaacacgtttgccttgcgttcccaggaacggtatggccatagcgtcctggaaacggttggcaatagcggatccagtaaacagttttccatggatatcctggacccgtgtgcacgcggtccgggacagatatcgttgattacggtgaatcataaactgcacgtacgctgtgaaagtatcgcttactccgtgcagactatggtggtgaagggcggttcagcctttgcggcttttttcattgcggttgtgttatggatgattggctatgtaccgaatgttgaacagtctacgcaagccctattaggtatgcagtttattatgattgctctaccaactctgtttttcatggtaacgctgattctctacttccgtttctatcgcctcaatggtgacacgctgcgcaggatccagatccatctgctggataaatatcgcaaagtaccgcccgagcctgttcatgctgatattccggtcggtgcaaggttgtcatttgcggagcgggtgatggaaggactgagtgatggagggcagtcccttcagagcccatcagctttattctcaaagcagacactgaaaaatatgtctatttataaaattcctcttccgctcaatattctggaagctgcacgagagcgtattacctggacactcaacaccctaccccgcgtttgtgtctcattttctggcggcaaagactctggtttaatgctgcatctgacagccgaacttgcccgacaaatgggcaaaaaaatctgcgttttgtttatcgactgggaagcgcaattctcttgcaccattaactatgttcagtccctgcgcgagttgtacaccgatgtcatcgaagagttttactgggatgcgctcccgcttacgacgcaaaattccctttcacaataccaacccgaatggcagtgctgggaacctgatgtcgaatgggtacgtcaacctccccaagatgcgataaccgaccctgactttttctgcttttaccagccaggcatgaccttcgaacaatttgtacgtgagtttgccgaatggttttcacaaaaacgtccggcggcgatgatgatcggcatccgtgcggatgagtcctacaaccgttttgtcgccatcgccagtttaaataaacaacgttttgccgacgataaaccctggactacggccgcaccaggcggtcatagctggtacatttaccccatttacgactggaaagtggctgatatctggacctggtatgcaaatcatcaaagtctctgcaacccactgtataacctaatgtatcaggcaggcgttcctctgcgtcatatgcgaatttgcgaaccttttggcccggagcaacgacaaggattatggctctatcacgttatcgaaccggatcgctgggctgctataggatcccctgcggatcgagaagaggatgcagaggaatatctggaagcaatcatggaggctcgtgttaccgttgctggcatggggctggtgatggaggtgcaggattacttcgatggcgaggcccgatagactggcgaaggcgtggctgccccgagtacacaccgcaaatcaagtcgttgaaagatgagcgtaaagaggcctatcgtcaaatcgtcgaaatgagtaccgaaccgcaggatgtggatctggtcaggccggcgaacaagtttgaaatgaccagggtgcgtgaaggtgaaaaggaagctgaccttccagtctggaaacaccatttgttgtgtgacgaaagcgggaactatccggctctgttgaaccattgggaaaccaaggtttttgagatcgaaaccaaacgtgaaggatttgctttctggtatcgtaatccacagtacacagggcagtcgtcactgggaatcgcttatgttgaagctgaacagtacaagattgttcgtcccgatttcctgttctttgccgaacaggatggcaaaatggttgtggacctggtagatccacatagcctacatctggctgatgctttgcccaaactggaaggacttgcgctatatgccgaacatcattctgatgcttacaggcgaatcgaatctgtcgccgaagtaaagggtaaattacgagtgttagatttgaaacggcaggatgtgcaggatgctgttgctaccgctgaaaatgcagaaacgttatttagtagcggacttgctgatgactatcagtaa

SEQ ID NO: 143320 - DNA, 2319 bp, Homo sapiens
ttatcgcgaaggagcaatgagtgagtcgcggcggatcagttttccgctgaaggttttcggcggtgagaaatccccgccatcgagcataaaaatcagccgtccaataatttcctgaatcatctcagtcaccggaatttttacgctggagagcgccggaacggtgtagggggcaatagcgatatcatcgaatccgataactgacacctgctctggcacccgtacgccgcgctcgtgtaacgctttcatcgcacctatcgccatatcgtcgttactggcaactaacgcgctaaatttagccccacgttcgagcaacatttctaccccttcggccccgctggcaggcgtccatttaccgttagcgataagtttttcattgagcgcaataccatgctgcgccagcgcgtctttatacccggcaagacgttcaatgctggtgggggaatccatcgagccggtaaggaaagcaatctcctgatgcccggcgtttatcaactctgccacggcgttaaaactggtctgtttatgatcgcaccagacgctatggctgctgtttttgcgcaggcggcgattaagcaccattatcggctgactgtgcgcgtcaatgatgtcatcgatctcatccacgcttaaaaaacgcgggtaaatcatgatcgcgtcgcagcgcagatccagcagatactgaatcgcctggcgctcttcttctgcgctgtgtttaccatctgccaatagcaactgccgccctttctcttccgccattcgcgcggcatgaaagagtaattcactaaaataaatgccgtggtaaagcgtgttggtcactaccagctccagcgtctgagtactcttcgccgacagattgcgcgccacaagtttggaccgtaacgctctctttgggaatcgcttatgttgaagctgaacagtacaagattgttcgtcccgatttcctgttctttgccgaacaggatggcaaaatggttgtggacctggtagatccacatagcctacatctggctgatgctttgcccaaactggaaggacttgcgctatatgccgaacatcattctgatgcttacaggcgaatcgaatctgtcgccgaagtaaagggtaaattacgagtgttagatttgaaacggcaggatgtgcaggatgctgttgtaccgagttcgatttgctacagccgaagttacggtctccttcaccaaacactttgctttcaactttggtcaggtagtcgggatcctctagccaggacatatccggcgcattgaggaagcagcctttatcgcctactgccagcaccgccagcgcgttagcctggcccatcgccgtcatgcgcgtgccttcaatcggatcaacagcaatatctaccgcgtcgccgcgaccagtaccgactttttcaccaatgtagagcatcggtgcttcgtcgatttcaccttcaccaatgacgatggtgccgtcaatgttgacctggttgagcataatacgcatggcgtttaccgccgcgccgtccgcggtgtttttatcgccgcgtcctaaccatttgtagccagccagcgccgctgattcggtgacgcgggaaaattcgatggcaagttctcgtctcatagcaaactgctcagtggtttcgatgcctggacggaactcgcgctcaatcaccgctttctcttgcagctcgtcgaggttctgccagaagccaaccgccaggcctgcgagataggccgcacccaatgcggtgacttcgcgcacttccgggcgctcaacgcgggtgccgagaatatcggactggaactgcatcaggaaattgtttgctactgcgccaccatccacgcgcagggcgtgcagacggataccagagtcggcctgcatcgcttccagcacgtcacgcgtctgataagcaatagactccagcgtcgcgcgtataatgtggttagcgttcaccccacgagtcagaccgaaaatcgccccgcgcgcatacgggtcccagtacggcgcacccagcccggtaaatgccggaaccacatacacaccattggtgttttgcactttggtggcgaaatattcggaatcgtaggcgtcgttaatcaacttcatttcatcgcgcagccactgaatggatgcgcctgccataaacaccgcaccttccaacgaatagttcacttcgccagtcgggccgcaggcgatggtggtcagcaggccgttttcaaacagcgcggcctgctggtcaccggcgatcccggagattggaataccggtgccgcctttgccgccaatgttagtctgaccgtatacttcggaagaacgacgcacttctctcatctgcat

SEQ ID NO: 143321 - DNA, 10161 bp, Homo sapiens
atgccgcatccgggctgcaaaaccaatgggctgacgacttaccccaactgcttacgcgcattgcggaaaatgcgcatccatgggccatcctcgccccagttttccggatgccaggagttgctgacagtacggaaaacacgttccgggtgcggcatcataatggtgactcgaccactttcagtcgtgactgccgtaataccgttcggtgaaccgttcgggttagccggtgactttgccgaagttatcgacatagcgcagtgccaccagccctttgctttccagtgccgccagatgcgccgcatcacgcacttccacgcgcccttcaccatgagagacagcaatcggcatttgcgagcccaacatcccctgcaacagcagagacgggctttgggttacttcaaccaggctgaaacgcgcttcaaagcgatcggaggtattgcgcacaaaacgtggccacaactcactacctgggatcagttcacgcagattagacatcatctggcaaccgttacatacccccagcgccagcgtttgcggacggtggaagaaggttgcaaactcatcgcgtacacgcacatcaccgtaggagaaaccaccgcacgcgaccagggcgtggaaatcttccaggcccgtgcgtccggtcagcaggtcactcatatgcacgtcgatagcatcaaagcctgcacggtggaaagctgccgccatttcaacatgcgagttcacgccctgctcacgcagtacggcaactttcggacgtgcgccagtggcaatatacggtgctgccacatcttcgttgatatcgaacgacagttttacattcaggcccggatcggcgtcgttagatttcgcctgatgctcctgatcggcacactccgggttgtcacgcaggcgctgcatctgccaggtagtttctgcccaccagacacgcaacgtggtgcggctttcgctgaatacagtctgcccgttggcggtaatcacaaaacggtcaccggaaaccgcctgccctacataatggacacaatcagcaagcccatgctgtgccagtacggactcgaccgcttcacggtcagcggcacgaacctgaatcaccgcacccagttcttcgttaaacaacgccgccaggcgatcgtcacccagagtggcgatatccgcgtcaatgccacaatgaccagcaaaggccatttccgccagcgttaccagcaggccgccatcagagcggtcgtgatacgccagcagcttacgctgtgcaaccagcgcctgaatcgcgtcatagaagcctttcagttgcgcgacatcgcgtacatctgccggtttgtcgccaagctgacgataaacctgcgccagcgccgttgcgcccagcgcgttattgcctttgcccaaatcaatcagcagcagtgcgtatcttcggtagaaagctgcggcgtgatggcgtcagcggagccggagcattacgaggcgttgtttgtttacgcgcaaaagcggctggataaatgtgtgttcggcgaagagaaaccagcctacgctcggtaccgagctgatctgaccggggagaagatacgccccaacacatcgtccacttccgccagcggctggcagagattttcccaggtgtacggtgccccttgcgctactacgcgctccacgttttcgcggcagtcgttcaatgccttagtcacggctggaacgacatgttccgggagaattttagaaaacggaggcaattcaaagggagtcagtaacggattcgtcattcgcgcagtcctggttaaagagagcctgatcatcgagtcgctgaaagagaaagataaaccgtttctctatctcgacacccacgcaggggccgggcgttatcagttaggcagcgaacatgccgagcgtaccggcgaatatctcgaaggcatcgcccgtatctggcagcaggacgatttgcccgcagaactggaggcgtacatcaatgtggtaaaacacttcaaccgtagcggtcagttgcgttactaccccggttcgccgttgattgctcgcctgctactgcgtgaacaggacagcctgcaactgaccgaactgcacccgagcgattacccgttgttgcgttctgaatttcagaaagatagccgtgcgcgtgtcgaaaaagccgacggtttccagcagcttaaggccaaactgccgccggtttcccgccgtggtttaatccttatcgacccgccgtatgacatgaaaactgactatcaagcggtggtcagcgggatagcagaaggttacaaacgtttcgccactggtatttacgcactgtggtatccggtggtgctgcgtcagcaaattaagcgcatgatccacgatctggaagcgaccggtattcgcaaaattctgcaaattgaactggcggtactgccagacagcgatcgccgtggcatgaccgcttccggcatgattgtgattaacccgccgtggaaactggaacaacagatgaataacgtgctgccgtggctgcacagcaaactggttccggcaggcaccgggcacgccaccctggatcgtgccggagtaattgcagccattgctggcacctattacgtctcgcgctacaatcgcggacactttgtcatgactaaacactatgattacatcgccatcggcggcggcagcggcggtatcgcctccatcaaccgcgcggctatgtacggccagaaatgtgcgctgattgaagccaaagagctgggcggcacctgcgtaaatgttggctgtgtgccgaaaaaagtgatgtggcacgcggcgcaaatccgtgaagcgatccatatgtacggcccggattatggttttgataccactatcaataaattcaactgggaaacgttgatcgccagccgtaccgcctatatcgaccgtattcatacttcctatgaaaacgtgctcggtaaaaataacgttgatgtaatcaaaggctttgcccgcttcgttgatgccaaaacgctggagtgcgatcccttttatatattttctgcattgttattctttattccattcgccttaatgatggctgaaatgggagctgcttatcgcaaagaagaaggcggtatctattcctggatgaataatagtgtcggaccacgttttgccttcattggtacgtttatgtggttttcctcttatatcatctggatggtgagtacctccgcgaaagtttgggtaccgttctcaacattcctctatggtagcgacatgacccagcactggcgtattgccggactggagcctacgcaggtggttggtctgctggctgtggcatggatgattctggtcaccgtcgttgcttctaaggggattaataaaattgcccgcattactgcggtgggcggtattgcagtaatgtgtctgaatttagtattgctgttagtaagcattactattttgttattaaatggtgggcatttcgcgcaggatattaatttccttgcatcaccgaacccgggttatcagtccggtctggcaatgctatcgtttgtggtatttgccatttttgcctatggcggaattgaagcggttggtggtctggtcgataaaacggaaaatccagaaaagaactttgccaaaggtattgtttttgccgctattgttatttcaatcggttattcgctggcaatatttttatggggcgtcagcacaaactggcagcaggtattaagtaatggttccgttaacctcggcaatattacctatgtgctgatgaagagccttgggatgacgctgggtaatgcactgcatttgtcacctgaagcgtcattgtcgctgggcgtatggtttgcgcgtattactggactttcgatgttcctcgcctataccggtgcgttctttacgctttgctattcaccgttgaaagccatcatccaggggacgccgaaagcattgtggccggaaccgatgacgcgcctgaatgcgatggggatgccgtctatcgccatgtggatgcagtgcgggttggttactgtcttcatcctgctggtttcgtttggtggcggtaccgcatcggcgttctttaacaagctgacgctgatggcgaacgtgtctatgacgcttccttacctgttcctcgcgctggctttcccgttctttaaagcacgtcaggatctcgacagaccgtttgtgattttcaaaacgcatttgtcggcaatgattgcgacagtggttgtcgtactggtggtgacatttgcgaacgtcttcaccatcattcaacctgtggttgaagccggagactgggatatggtatcagctcggtacctgcaacatatcgtcgtgcggcacttctcctttcaacgcgtgagagttgaaatcgcagtacgggcatttctgcacgcaccacgggatgtgaatgtagagactcagcggagcgtccagcagcagtttcaacgcctgaccacggtgggaaatggcgctcttttcttcgcgggtcagttcggcggcggttttcccttcggaaggtacgaagaagattggatcataaccaaagccaccagtgcccgctggttcacgagtaatcacgcccggccagctaccgtggcataccagcggagtgggatcttccgcgtgacgcagatataccagcacgcagtggaaacgcgcctgacgttggtcgtccggtacgtctttcattgtttccagcagtttttgcagattcttttgatcggtcgcgtcttcaccggaataacgcgcggagtaaatgcccggcgcgccgccaagcacatctaccgccagaccagagtcgtcggcaattgccggactggtgaaggcgtggacgtgctgcgtaaccatctcaaacagagcatgggctttgacaccaacatggaaggcggcttcctggcgcgtcgtcgccacctacaggcgctggaacaggcagcggaacatctacaacagggcaaagcgcaactgttgggagcctgggcaggtgaactgctggcggaagagttgcgtctggcacagcagaacttaagcgaaatcaccggggaatttacttcagacgacctgctggggcggattttctccagcttctgtattgaggcaattattaaatccggtatgaacccgttcctgctggatagcgaagatgtttttatcgatttactgaccgacagcggcaccggggcggtgacgcagagcatgcaggctgcgatgatgcgcggcgacgaagcctacagcggcagtcagacgaacaatgacaacgcggcgcatgagctggaaagtcaggccgctacttcagttactaatggcgcacatatttatcctttcaaaacttctcacataggcgagctggctaccgtgaatcctggaaccgatctcaccgtcgttgatgccagtggcaaacagccgatcgttctgttgcagggttatcaaatgcagggcagtgaaaacacgctctacctggcggcaggtcaacggctggcgctagccacattaagtgaagaaggtatcaaggcgctcactgtaaacggggaatggcaggctgacgaatacggcaatcaatggcgtcaggcgtctttacagggtgcgcttaccgatcccgcattagcggaccgtaaaccgctatggcaatacgctgaaaaacttgacgatacctattgcgctggttgtcatgcccctattgccgccgaccattacaccgtcaatgcgtggccgtccattgccaaaggaatgggggcacgaaccagcatgagcgaaaacgaactggacattttaacgcggtatttccagtacaacgccaaagatattaccgagaaacacggtattgccgctggagcgctggtggtgacatcggcagcaccgctccccgcatgggcagaagagaagggcggtaaaatcctcaccgcgggacgttggggagcgatgaacgtagaagtgaaggacggcaagattgtttcttcaacaggcgcgctggcgaaaaccataccgaattccttacagtctacggcggcggatcaggtacacaccacggcgcgtattcagcatccgatggtgagaaaaagctatctcgataatccactgcaaccggcgaaaggtcgtggcgaagatacctatgtacaggtgagctgggaacaggcattaaaactgattcatgagcaacatgatcgtattcgtaaagctaacggaccatcggccatttttgccggatcttacggctggcgctcttctggcgtgttgcataaagcgcaaaccttactgcaacgttatatgaacctggcgggcggttattccgggcatagcggcgattattcaaccggggcagcacaggtgatcatgccgcatgtggtcggttctgtagaggtgtatgaacagcagacctcctggccgctgattctggaaaacagccaggttgtggtgctgtggggaatgaacccgctgaataccttaaaaattgcctggagcagtaccgatgagcaagggctggaatacttccatcagctgaaaaaatctggcaaaccagtgattgccattgatcctatccgctccgaaaccatcgaattctttgacgataatgccacctggatcgcgccgaatatgggcaccgacgtggcactgatgttagggattgcgcataccctgatgacacaaggcaaacacgataaagtgttccttgaaaaatacactaccgggtatccgcagtttgaagagtatctgacaggtaagagcgataatacgccgaagagcgcggtctgggcggcggaaattactggcgtaccggaagcgcagatagtcaaactcgctgaactgatggcggcgaatcgcacaatgctgatggcaggctggggaattcagcgccagcaatatggtgaacagaaacacgcgggattcatacagcggccagccatccgtcatccatatcaccacgtcaaaggtgcgttcaccgaatacgtgcgcaacaaccgtcttccggagactgtcatacgcgtaaaacagccagcgctggcgcgatttagccccgacatagccccactgttcgtccatttccgcgcagacgatgacgtcactgcccggctgtatgcgcgagaagcgatcgaccgtctgcgtgacacctcttcttctcaccagcgtatttccgtggtggaagtgatgggccgttattgtggagatctgacgttggctgcggccattgccggtggctgtgaattcgttgtggttccggaagttgaattcagccgtgaagacctggtaaacgaaatcaaagcgggtatcgcgaaaggtaaaaaacacgcgatcgtggcgattaccgaacatatgtgtgatgttgacgaactggcgcatttcatcgagaaagaaaccggtcgtgaaacccgcgcaactgtgctgggccacatccagcgcggtggttctccggtgccttacgaccgtattctggcttcccgtatgggcgcttacgctatcgatctgctgctggcaggttacggcggtcgttgtgtaggtatccagaacgaacagctggttcaccacgacatcatcgacgctatcgaaaacatgaagcgtccgttcaaagaagtgataaaggaatccaaagttgaagagcccaggaaacgggaaactgtatccataatgctgaccaaatatgcagcctataacacctttcaccactgtgaacagtgccgccagtacatggacttcacctctgcctcccagaacgaactggcgctgcacagcaagaaagagatcgacgagtatttcgcgcatgtctggcaaaccatgcaggcatgtatcgatcgcgggatgaacaccgaaggtgtactgccaggcccgctgcgcgtgccacgtcgtgcgtctgccctgcgccggatgctggtttccagcgataaactgtctaacgatccgatgaatgtcattgactgggtaaacatgtttgcgctggcagttaacgaagaaaacgccgccggtggtcgtgtggtaactgcgccaaccaacggtgcctgcggtatcgttccggcagtgctggcttactatgaccactttattgaatcgaactgctgggcggtagcccggaacagggatgtgatgcgcgatggtcgcattgagcaagacggcacgccgcgtgaaatctacgaagagccgaaaaacctgtttgttgccggcttcattggcgaaatcaatatgtttaacgccactgtcatcgaacgtctagacgagcagcgcgtacgcgccaacgttgaaggccgcgaatgtaatatctacgttaacttcgccgttgaaccggggcaaaaactgcatgttctgctgcgcccggaagacttacgtgttgaagagattaacgacgacaaccacgctgaagggctgattggttacgttcgcgagcgtaactacaaaggcatgacgctggagtcggttgttgaactggaaaatggcaagatggtgatggtcagcgaattcttcaatgaagacgatcctgactttgaccactctctcgaccaaaaaatggccattaattgggtagaaagctgggaggtcgtactggctgatgaagaacacaaaatatgttggacttttatcagagctcctatgaattttcacgtttggtttcgatctcaaaaacctggtttcccaatggttcaacagagccggatagttcccgctttcgtcacacaacaaatggtgtttccagactggaaggtcagcttccttttcaccttcacgcaccctggtcatttcaaacttgttcgccggcctgaccagatccacatcctgcggttcggtactcatttcgacgatttgacgataggcctctttacgctcatctttcaacgacttgatttgcggtgtgtactcggccagccacgccttcgccagtctatcggcctcgccatcgaagtaatcctgcacctccatcaccagccccatgccagcaacggtaacacgagcctccatgattgcttccagatattcctctgcatcctcttctcgatccgcaaccttatcggccagatattcgacatagctgtccctcctgttcagctactgacggggtggtgcgtaacggcaaaagcactgccggacatcagcgctatctctgctctcactgccgtaaacatggcaactgcagttcactttacaccgcttctcaaccggaacacttggattcagtgtggttcactgggccggcccatgggtaccctcaaaaacccggcggtagaagaaaataaaaaggcacagcttgagcgtgataaacagcttagcgaacagcaaaaacaagcggcgttggcgaaagaatataaagctcaggtgaagcagcttattgaaatgaaccgaatcaccattgccaatggcgatattggttttaacttcactgacggcaatctgattaagaagatttttgtcgataagctcacacaggcgcagttgattaatggtcgtctggcgattgcccgcttgttggtcgataacaatagcgaaggtgaatacgccattattcccgccagcgttgccgataaaattgctcagcgcgatgccagcagtatagtgttgcacagcgcgctcagcgccgaagagcaggatgaagacgacccgtatgccgacttcaaagtgcctgatgatttgatgtggcctacggtttatgggcgaagtgtagaccggataaggcgttcacgccgcatccggcagtcgtgcgccatgcctgatgcgaagctttgcgcgtcttatcaggcctacggcttacgggcgaagttttattggcgtggtagcatatgttgccgagcagtgctcgagcgtaaccgcgaacagccgatgacccgcaccaaagaactggcggaagtcgtggctgctgcaacgccggtgaaagataagtttaaacatcccgcgacccgtaccttccaggcggtgcgcatttgggtaaacagtgaactggaggagatagagcaggcgctaaaaagctcgctcaacgtgctggccccgggtgggcggctttcgatcatcagcttccactcgctggaagaccgtattgtgaaacgttttatgcgtgaaaacagccgcggtccgcaagttccggcagggttaccgatgactgaagagcagctcaaaaaactgggtggccgtcagctgcgagcactaggcaagttaatgccgggcgaagaagaggtggctgagaaccctcgtgcccgtagttcagttctgcgtattgcagagaggacgaatgcatga

SEQ ID NO: 143322 - DNA, 1176 bp, Homo sapiens
atgcgtctgcagcgtctgagactaccactatgtgctgcttgtagacacatcggtgacgtgatcgtatatagtgcgtacgtctgtgagcatcggtgtatgcgactgctagctacgcgacgccactatgtggtcactctaacgactcatcttcgccgtcgactattcttgaccgaggtgaacgcaagatatgtctgcatctacgatgatgaggtcagtgtcatgcgattgacgaagagctgcacgacagatcacgtctctcagtcagcattcgcgctcatctaccatgagcgtaaagaggcctatcgtcaaatcgtcgaaatgagtaccgaaccgcaggatgtggatctggtcaggccggcgaacaagtttgaaatgaccagggtgcgtgaaggtgaaaaggaagctgaccttccagtctggaaacaccatttgttgtgtgacgaaagcgggaactatccggctctgttgaaccattgggaaaccaaggtttttgagatcgaaaccaaacgtgaaggatttgctttctggtatcgtaatccacagtacacagggcagtcgtcactgggaatcgcttatgttgaagctgaacagtacaagattgttcgtcccgatttcctgttctttgccgaacaggatggcaaaatggttgtggacctggtagatccacatagcctacatctggctgatgctttgcccaaactggaaggacttgcgctatatgccgaacatcattctgatgcttacaggcgaatcgaatctgtcgccgaagtaaagggtaaattacgagtgttagatttgaaacggcaggatgtgcaggatgctgttgctaccgctgaaaatgcagaaacgttatttagtagcggacttgctgatgactatcagtaatctatagaaaattgcgtaacgaaactgcattttagtaattttttgaaacaatacaaataaggccttctcactgagaaggccattaccgacttacagttcgatttggctacagccgaagttacggtctccttcaccaaacactttgctttcaactttggtcaggtagtccagtcgggttaacagcgcctggtagttctgctggaagtcagtactattggtgtctagcacataaatacagttttcaggaaaatggtccagaccagggcgatctccgggtacggagatcgaatt

SEQ ID NO: 143323 - DNA, 2487 bp, Homo sapiens; identical to SEQ ID NO: 132462

SEQ ID NO: 143324 - DNA, 1082 bp, Homo sapiens
ttagaaacgacctaactgctttaactcatcattggtcaggcgactggcgttgataacgctggtccctacaaagcctcctgctggctgtaagagctttcctttctcctttgaagcagtcacagacactagaattccttttcccctgaagacctcatgtgacaggtgtcctattgtgggactgcggttgaccacaggtacctgccagttctctccaaattctttccagtgcaggcttccattgttattaaattccctcgggaggcattcgtcctgcactaagtaagtagctcggtacactgtggcggcaatgcgtcgggacggctggctggtgtcgggcagcttataaatgtcagttacatcctttcccacaggggttaacatgggtcgtgcatgcaatgtcaacatgtgcgtaggtgcagtgttgcacaccaataaggcaccggtgcagccaatgccaatatacagcacgcataagggtggtatgcgtgtacccgaaatgcgggatcgggcaagggagttggtagcagtgtaggtaaagcgtgcgtaagaacgtagcctacggtgctggcgcactagaaggcgtaattctggggtactgggcggcacttttttggacctcttgacgagcctcaacgaaagcaacgcggaatttgacttcttcaccgtttcgatcatcagcacttcagcgaactcaacagtttcgccagttgcgatgtcagcagaacaggcacagatgatccgtaccgccatcgaacagggtaacggtcgccatcttctggaaccggttctggaagcaatgaacgcttgtggatctcttgaatggacgcgtcagcgtgccgaggaagaagcagacaaagccatcgcagcgttacaggtgctcccggacaccccttggcgagaagcactcatcggcctcgcgcacatcgctgttcaacgcgatcgttaatcccctcccctcatcccgcgcagcgcgcgggatggttccagtaagttccataaaaacacttattcagctctataacacctgaaaaatagggatgtgcatctttatatattctgaatattcacactctttacaggag

SEQ ID NO: 143325 - DNA, 352 bp, Homo sapiens
tacttattaccagtaggacctgcaggacactggctgctttatgctgatgaacactggcgagaaagcggtgaatcagaaaacggcctgctgaccaccatcgcctgcgcccgactggcgaatgaactatgcgttggaaggtgcggtgtttatggcaggcgcatccattcatggctgcgcgatgaaatgaagttgattaacgacgcctacgattccgaattttcgccaccaaagtgcaaaacaccaatggtgtgtatgtggttccggcattaccgggctggagtttgctatggacgagaacttgccatcgaattttcccgcgtcaccgaatcagcggcgctgctggctacaaatg

SEQ ID NO: 143326 - DNA, 1773 bp, Homo sapiens
ttaccgccgacttccagttccacttccacctggccgttgtcgtgcataactattaacaacttttgcccgcaatacgttacgaatgctggtttgctgcggcggttgtaaaaccagagaaacatcggaagcctgaatgcggatacgtagcgcagcttgcagcggttcgtccagcttattgacccacaaatgctgatcgcccagcgccagcgcggtcatcgcgtaatgcggatgatgctcaagcaccgtcactttcagaatgctactttgttgctctttcggcagccacggattcatcacgctactgccccacacttcctccagcgcgccaaaggctttcacctgaccggtttccagtaccatcactctgtctgccagatggaggatctcatccagcgaatggctgacatacaacatcggaatggtgatttcccgtgtcagccggtgcagataaggcaacagttcgcggttacgcggaatatccagcgacgcccagcggttcatccagcaacagcaatttccggtgcctgtcaagcaaggcccgaccaatcgccacgcgcttgtttttcgactccggacaggctgcctgctaaacgggtcaagcaaccggttcaatggcctaaaggcgtccccagcgttaaggtttaatagtgcaccgccggagttaccgcggttaatggaagcatctgtctggataaagttttccagaccttcaagattcaacccgctgcggccgacgcgcaatttatcggagtcggcaatagcgatttgcgttaatttgctcgggttttgaatttgtaacagggcgatatcgctctggtcatcgctaccaatcagttttgcatcaaactcgcgcccatcattgagctgaatactgattttctgtgcctgattaatcacatggttgttggtcagcacatagcctttactggcgttgatgatgacaccggagcctaaaccttcgaagggttgtgcaggttgatccggtaaatcatcaccaaaaaactgtttgaattcttccgggattttctggccctgactggccgttcctttcacccggacgctcaccactggcggaagcactttttccagcactggagccagaatcgctgcgcgataaatcttcacaatttcttcgtgagttgcctggatcgggttagtaaagccacaggcatctttcagggcattagtcgccaataccgcgaaatcttcttctttcacgttcaggtcgcgtaggcctgccgggatatccactttcttcgccagttcacggatggcgttaatgcaggcttcagcaccttccgcgtcgtttttacctgtcacgttcacgcccattgcagcggcacagtcacgcagacgtgcagcggcgactttgctgttgaatacctgaacgtgcggcagcaaaacggcgttacatacaccgtgtggcaggttgtagaaaccgcccagctggtgcgccatcgcatgaacataacccagagaagcattattgaacgccataccgggcgaggaactgggcataagccattgcttcacgcgctttcgcattactgccatcttcaacggctgatagttgcattgccattcatgatgatcctctggcattcgtgcattcagccattcaccattcacccattcaactggaattttggttgaatgccggaattgtgtccacaaattgtggatggatagttggttggctggctggatggctggctggatggctggctggatggatggtgaatggctggcggcggttcggttgctttgaagcat

SEQ ID NO: 143327 - DNA, 978 bp, Homo sapiens; identical to SEQ ID NO: 143082

SEQ ID NO: 143328 - DNA, 2424 bp, Homo sapiens
atggcaaagaaccgtagccgtcgtctgcgtaaaaaaatgcacatcgacgaattccaggaattaggattttcggtggcatggcgattcccggaaggtacatcggaagaacagattgataaaaccgttgatgattttattaacgaggttatcgaaccgaacaaactggcctttgacggcagcggttatctggcctgggaaggtctgatctgcatgcaggaaatcggcaaatgcaccgaagaacatcaggcgattgtgcgtaagtggctggaagagcgcaaactggatgagtacacaatcatcatcatcatcatcatccacatcatcatcaatcatcatcattataatcaactcatcatcatcattacaatgtcagccctgtgcgtcaaaatatttagctcattatttcacggtcagcagcatcgcggcgtattcaaccccagtggtatccacccaagagccatgggctaccagacaccacccgcaccaccaacaaacagacaggcgacgcccagcgacaagaaaatcgccacgccaataccacaacgaaaccaacagacaataaccaacacggataaccacgaaaccaccgcgcacgtaccacacggacgcgccaccacccgcgccaacccgcgtcacgaatcagcggcgctggctggctacaaatggttaggacgcggcgataaaaacaccgcggacggcgcggcggtaaacgccatgcgtattatgctcaaccaggtcaacattgacggcaccatcgtcattggtgaaggtgaaatcgacgaagcaccgatgctctacattggtgaaaaagtcggtactggtcgcggcgacgcggtagatattgctgttgatccgattgaaggcacgcgcatgacggcgatgggccaggctaacgcgctggcggtgctggcagtaggcgataaaggctgcttcctcaatgcgccggatatgtatatggagaagctgattgtcgggccgggagccaaaggcaccattgatctgaacctgccgctggcggataacctgcgcaatgtagcggcggcgctcggcaaaccgttgagcgaactgacggtaacgattctggctaaaccacgccacgatgccgttatcgctgaaatgcagcaactcggcgtacgcgtatttgctattccggacggcgacgttgcggcctcaattctcacctgtatgccagacagcgaagttgacgtgctgtacggtattggtggcgcgccggaaggcgtagtttctgcggcggagctggcacgctgcaaagcgatgggcatcgaagccggtaaagtattgcgcctgggcgatatggcgcgcagcgataacgtcatcttctctgccaccggtattaccaaaggcgatctgctggaaggcattagccgcaaaggcaatatcgcgactaccgaaacgctgctgatccgcggcaagtcacgcaccattcgccgcattcagtccatccactatctggatcgcaaagacccggaaatgcagtccggcattgatgccgtgcttcatgtactggattgggtgccggttcgtcttgcgggtgtggtatatgccttgatcggtcatggtggagacgccgaaggcagcggtttcaatggcgaagaaaacctcgttcgtggtcgtggtggtgattgcactactgacgatttacggggcgttggtgtaaagattattgccctcaccctgtacgggtataccgaaatcgccattcctggggtcatcagcataatcaccagtaccgccgccataaaaagtaggcagactcagataccagcggataagcagagcaggcttcaccggtcatccagaaagcagctggacgatatacgcacggtcacattgtgctatctggcagtgtggatataccactatatcgtatatgtactacgaaacaccccggagcacgacccacgacatgacgtataccgtctgactatccgcgatctactgactcactacctgggcccacaacacgggctacgccgacctactacagctgacgacttacccgtccacatacccacagtgcaaacagatccaggcaaaataccggcccgaaataatcacgggcaacccgaaatcacaaagcaacaagaaagaccccccaaaccaagcaacaactcccccaaagcacctggcacgcacggccccgcactgcacacatccaacatgggccacaataccataaaaagagcgctactgcgccagagccccaggcccacgcgccggccccgcgcagaaccaaagctccaccccacaacacaacgacacccaacaccaagacgaacacaaaacaaccaccaaaagggccaccacaagaccacagaccactacaccgcgccacacaccgtgaacaacccccccacagaacaactcccccccaagacgcagagaaaaacaacccaggactaa

SEQ ID NO: 143329 - DNA, 3587 bp, Homo sapiens
aatcgcgcccgccgccagccgattaacaaccagctttttcatatacatatcgggcgcatgtaacaggctatctcgaggggcgaaagccatgaccgccagcgcattgctctgccccatcgccaccatccgcgtgccttcaatgggatcaaccgcgatatcgacttctggcccatcgcctttgcccacctcttcgccaatccacagcatcggcgcatggtcaatttctccttcgccgataaccactcgtccacgaaaagcgacgtcgtttaatgcctggcgcatcgcggtgaccgccaggccatcaattttatttttgtcgccacatccggtttgcggccaggcagccaacgctgcctgttccgtaacgcgaaataatggccacgccagggacatcattgcgcggcctccccgatatcaacgccaaattgtgccagcagatatttctcggcctgttcattccagatgccgtgcgtttcctcaaccagccgcgcccactctttaaacagcggatcgcttttgcctttttcggcgaaatcggcaatggcagtgagcggcatggtcacgccgttataaatgagttttttaccgccagggatatccggcagattgagcacggtttctggcaccgcatccaggccaccgatatgggtcaccataaacgacggctgtaactgcccagtggcgctaagggcaatcgcctctttcatgtcgtccgttgaaccgccagatgtaccgacgacgtgcgtgctgttgtaatggacgttgtagaaattaaacggcactttgaagtttttatccgtcggcccggcaaagaagttcagacagccatcttccgccagtaattcatcagccatctcaacgacagcaggcaccgccgcataaacaaaaatgtcatcgaacccggcatctcctgtcagcgcccgcagcatctggacaggatcgctcatccctttggtattcacatacaccagctcaatgcctttactggccgccagttccaccggcagcagcttctgtacctgcgccagacgtttgtcgtcgatatcgaccaccaccacccgcgacggttgtatgccgccgttaatggcgtaatcgatagcgccaatgcccatcggacctgcacaagccagcagtgcaatattgccgccagttaacgccagtggtccagtaaggtttgtcgtgtcttcttgctgctgtttgtgttctgctgttttttgtgctgtgcctcttctcgtctcttcttcctgctgtctcgttgtgttttctcttgttgcgtgttgtgttcgtgtctgcgttccgtgtcctcgtttcctcttgcggggcacgtcgatagctattttgcggtgctggtgcgcgttggcctggcggcactcgtttttctgccgtttctgcgtacccgtggcaatagcctgaaaacggtcggcctgtatatgctggtgggcgcgatgcagcttggcgtgatgtatatgctgagtttccgcgcttatctctacctgacggtttccgagctgctgctgttcaccgtgctgacgccgctctacatcacgctgatttatgacatcatgagtaagcgccgtctgcgctggggctatgcctttagcgccttgctggcggtgattggtgccgggattattcgctatgatcaggtcaccgaccatttctggactggcttgctgctggtgcaactctccaatatcacttttgccattggcatggtgggttacaaacgcctgatggaaactcgcccgatgccacagcataacgcctttgcgtggttctatcttggcgcgtttctggtggcagtgattgcatggttcttgctgggaaatgcgcagaaaatgccgcaaaccacgctgcaatggggcattctggtgtttcttggcgtggtggcttccgggattggctactttatgtggaactgtaaggcatacccccatagcgacactgtttccatccagcgtcacgttattatcactgccgtaaacgttgatacccacggatggatcgaagaaatattccgccgcagtgtctgcggttttatccttatcaaccagaacgttaccagtgatattcactgtattcgcatcgccagaaacgtttatgcccgtcgctttctgcccgaccacttttagatcttttgccgccagcgtcacgctgttattgttgccattaagatctaccccggtcgagaaatcgccaacctgcatactgcctgccagcgaaaccttcccactgttggttgtgatgctgaaccctgtcgcttcattgctaacgttaacatcacccgtattggatactgttgccccctcaccgttgatgagcacgccaatcgatccagtatcggaaacaacaatatctcctttgttgttaaccgtgccgttgtcaccaatgttctcaacaccatgcgcaccgcctgtaacagtcaggctaccatccagatttacaatgccgatattgcccgcgattttggtacccgtggaatcttttccatcaacagtggtttttccactgttattcgcggtggcgtcgttaccgttgatctgagtgccggtgccgccattggtgatagtgctctcgccttcgttattgacgatggcctggtcgccgtcaatcgatgactccggatcggtgacgctcatggtgcccttgttatccaccgttgcgctgtcgccggtgatatctataccgtgaccgccgccgctgacatccagatcgccgtcctgaataacttttccgttattaccgttgatttccgtaccggtggaatccttgccgtcaacggtggttttgccgttgttgtttgccgtggcgtcatcaccattaatctgggtgccggtgccaccgttggtgatggtgctctcgccttcgttattgacgatggccttgtcaccgtcgatctggatacccatggactccggatcggtgacggtcatggtgcccttgttatccaccgtcgcgctgtcaccggtgatatcaataccgtgaccgccgccgctgacatccagatcgccgtcctgaatcactttcccgttattaccgttgatttccgtaccggtggaatctttaccgtcaacggtggttttgccattgttgtttactgtggcattatcacccgtaataacaagctcaccgttgtgattatattgccacttcgttgcgccatctgcgctcaccccttcaagggcaacagtgttattcgcttcatcaatctgccaaagattaatcgttgccttacgaccattgctatcttgcagagatatagtcccgtcagcattctcggtataagtaaaaactgaatcgcgaatagttaacgttttttccgtgttgtaggacagttcggctccgttctggtttggttcaggatcaggtatcggttctggcgtaggctctgggtccggcgttggctcaggcgtcggctccgggtttggtgttggatcaggtttcacttccggcaaagaccctgttccagaatctacaggcggcgtatcggaggaagatccggaaccaccgccatcacaaccggctaacagggttgcgctcaaaatagccgctaaaagcgatttcttatatttaaatttcttattcat

SEQ ID NO: 143330 - DNA, 3252 bp, Homo sapiens
atgactcgaattgatgactatgggtcggtgttattactaatctacgctgataatgaaaagcagaattttggccagctcttcattgcttttaacaaggtgttctgcatgttttatcgcagccatttgcgggataaccttgccggatttctcagcgtcaaccatcagcttcagacccgttgcgccgatatccgccgggttctgggcaaccgtcgcggtcatttgtccggcttccaccattttgcgggcttccggaatgccatctgtaccgacgaccagcacttttcccgtttttccggcctgcaaaataagccacatcccaaggtcattgaatatcctcgtctcgggggcacagaggtatctggggaaagccttgcctgggtggacattcatgacttcaagcccatgaggaaagcctgtgataaaagagaccagggggtggccaactattatcccttacttggcttcgtccatgctacgatgtcgcctatcacagcgagtaaaggctatgtgctgaccaacaaccatgtgattaatcaggcacagaaaatcagtattcagctcaatgatgggcgcgagtttgatgcaaaactgattggtagcgatgaccagagcgatatcgccctgttacaaattcaaaacccgagcaaattaacgcaaatcgctattgccgactccgataaattgcgcgtcggtgattttgccgtagcggtcggtaacccatttggccttgggcaaaccgccacctctggcattgtttccgcattaggccgcagcgggttgaatcttgaaggtctggaaaactttatccagacagatgcttccattaaccgcggtaactccggcggtgcactattaaaccttaacgggcgtattggacgccgtgatttctggatttggataggcctgtggttcgcaggcatgctggtgcttttctcactggcggaccctggtcagttgtgcgtgaaagaagggatggcgaagaacacctatggcactggctgctttatgctgatgaacactggcgagaaagcggtgaaatcagaaaacggcctgctgaccaccatcgcctgcggcccgactggcgaagtgaactatgcgttggaaggtgcggtgtttatggcaggcgcatccattcagtggctgcgcgatgaaatgaagttgattaacgacgcctacgattccgaatatttcgccaccaaagtgcaaaacaccaatggtgtgtatgtggttccggcatttaccgggctgggtgcgccgtactgggacccgtatgcgcgcggggcgattttcggtctgactcgtggggtgaacgctaaccacattatacgcgcgacgctggagtctattgcttatcagacgcgtgacgtgctggaagcgatgcaggccgactctggtatccgtctgcacgccctgcgcgtggatggtggcgcagtagcaaacaatttcctgatgcagttccagtccgatattctcggcacccgcgttgagcgcccgggaatgcgcgaagtcaccgcattgggtgcggcctatctcgcaggccttgggggtggcttctggcagaacctcgacgagctgcaagagaaagcggtgattgagcgcgagttccgtccaggcatcgaaaccactgagcagtttgctatgagacgagaacttgccatcgaattttcccgcgtcaccgaatcagcggcgctggctggctacaaatggttaggacgcggcgataaaaacaccgcggacggcgcggcggtaaacgccatgcgtattatgctcaaccaggtcaacattgacggcaccatcgtcattggtgaaggtgaaatcgacgaagcaccgatgctctacattggtgaaaaagtcggtactggtcgcggcgacgcggtagatattgctgttgatccgattgaaggcacgcgcatgacggcgatgggccaggctaacgcgctggcggtgctggcagtaggcgataaaggctgcttcctcaatgcgccggatatgtatatggagaagctgattgtcgggccgggagccaaaggcaccattgatctgaacctgccgctggcggataacctgcgcaatgtagcggcggcgctcggcaaaccgttgagcgaactgactgttcatgagaagcagccctctaggtaccgagctgatgatggaaaagttgaaggccctaagctttcggggttgaacctttggctcaacgcatcgctgcgcttacacacccggcctatcaacgtcgtcgtttcactgatcttacggaggtgcccgctctgtggggactcccgtttggacttttctgcggcgctttgtcgtcctctgtggttgctggttggtggcatcggcccggctgtagcccacaatagaaacaggaaatatggagagatcttggtactgggaggagcaagaagacaggagaaggacttcctgcgacaggctggattggaggtacttgtgcggaccctactgcccaaggcgttggagtcactgtggatccagttacaccttccagatccagttactcctggtgccaggcagagtcacatatgtgatcggtaccgagctgatttggtggtgttcgtgtttggatctggtggtgcaggggcgcgctgtgtctgccgtgccctgcgccatggccagtacaccgtcgtttatggtgacccatatcggtgcctggattcggtgccagaaaccgtgctcaatctgccggatatccctggcggtaaaaaactcatttataacggcgtgaccatgccgctcactgccattgccgattttgccgaaaaaggcaaaaccgatccgctgtttaaagagttggcgcggctggcagcgttggctgcctggccgcaaaccggatgtggcgacaaaaataaaattgatggcctggcggtcaccgcgatgcgccaggcattaaacgacgtcgcttttcgtggacgagtggttatcggcgaaggagaaattgaccatgcgccgatgctgtggattggcgaagaggtgggcaaaggcgatgggccagaagtcgatatcgcggttgatcccattgaaggcacgcggatggtggcgatggggcagagcaatgcgctggcggtcatggctttcgcccctcgagatagcctgttacatgcgcccgatatgtatatgaaaaagctggttgttaatcggctggcggcgggcgcgattgatctgtctttgcctctgacggacaacctgcgcaacgtggcgaaagcgttaggcaaaccgctggataagctgcgcatg

SEQ ID NO: 143331 - DNA, 2760 bp, Homo sapiens; identical to SEQ ID NO: 139112

SEQ ID NO: 143332 - DNA, 966 bp, Homo sapiens
atgctgctgatttttccaaaaaaaacccacaaggcattggaagcaaagaatttccgagctgcaatagaatatgggaagcaagattttgaagttgaggacgtaagacttgatttcaagaagcacatgtcaatgagttataagggctctgtgtatcggacccaagaccctggtggtgtgggttcaggaggagatctcctcatccattggtttcaaagatctgtgggagaagtgtggtttcccaggcaaggatcactctcaggtcgacctgcaggacagcaagtcgacgatgggcgtcaatgcttgttcgctggcaaatcatttctcacaaatgcgcaggttcaagggtttgaaatcacgggtaataccggaagcctgacggctaacccggattgcgtgattaacaggaacttatcatggctacagtacaacagaggactgcggtttatcgccgctaacgtgaacgagcgtggcggcgagatcgatctgataatgcgtgaaggccggaccaccatttttgtcgaggtacgctatcgccgctctgcgctttatggcggcgcggcagccagtgtgacccgcagcaaacaacacaaattattacagactgcccgcttgtggctcgcgcgtcataatgggagttttgatactgtggattgccggttcgatgtggtagccttcaccgggaatgaggttgagtggattaaggatgcctttaatgaccactcataattaaggtttaaggattagcgtgcaagaaagaattaaagcttgcttcactgaaagcattcaaactcaaattgcggcggcagaggcgcttccggatgccatctcccgtgcagccatgacgctggttcagtctctgctcaatggcaacaaaatcctctgttgtggtaatggaacttccgctgccaatgcacagcattttgctgccagcatgatcatccgtttcgcaacccagcggcccagctt

SEQ ID NO: 143333 - DNA, 338 bp, Homo sapiens
ttttacgggammttttatgtcgatgtacacaaccgcccaactgctggcggcaaatgagcagaaatttaagtttgatccgctgtttctgcgtctctttttccgtgagagctatcccttcaccacggagaaagtctatctctcacaaattccgggactggtaaacatggcgctgtacgtttcgccgattgtttccggtgaggttatccgttcccgtggcggctccacctctgaatttacgccgggatatgtcaagccgaagcatgaagtgaatccgcagatgaccctgcgtcgcctgccggatgaagatccgcagaatctggcggaccccgcttaccgcc

SEQ ID NO: 143334 - DNA, 1208 bp, Homo sapiens; identical to SEQ ID NO: 127284

SEQ ID NO: 143335 - DNA, 1866 bp, Homo sapiens
atggaggtggacattactcacaagtttgtttatattgtgttaatctttaaccacgagaattcaagtgccagtagttcatcaccttcgatgaaagccattctcggcgcggcgaaaaagcccgtccaggtatggtcggcggcggatattggttttaacgcagaggcagcctggtcagaacaacaggttgccgcgccgaaacagcgcgaacgtcagcgcatcgtgattgaaggcgacggcgaagaacagatcgccgcatttgctgaaaatcttcgcaaagctttagctaatcaaatcaacacctttgtcctcaatgatgccgacggcgcacaggcaatccagctcggcgctaatcatgtctggaaattaaacggcaaaccggacgatcggatgatcgaagattacgccggtgtcatggctgacactattcgccaacacggcgcatacggcttggtgctgctgccaaacaccccggcggtgtctaacgatgccagcaccgtcagcgtacaggcgggtaaagcgacagtgaaacacatggtttacggtggtctggcgattggcgaagaacgcattgccacgcggtatgcggtactgaccatcagcagcggcacgttcgatgcggctcagccagacgcgtcacgcactggcgaaacgcacaccgtggagtggcaggctccggctgtggcgattacccgcacggcaacccaggcgcgccagagcaacagcgtcgatctcgacaaagcccgtatggtggtcagcgtcggtcgcggtattggcagcaaagagaacattgcgctggcagaacagctttgcaaggcgatagactttttcacattaatctttgccagaaaaccaggcgcaggcccaccaatccgccggaggttcttgaagccgctgatgggcgggtacatgatggggcgtctgatgggcggcggcgccggatttgcacagcagcccctgttcttctttaaaaaaccagccagtccggcttacgggaaatataccgacgcgacgggtaaaaactatggcgcagcccagccaggccgcaccatgaccgtaccgaagaccggaatgggaccaaaaccggcgaccaccactaccgttacccgtggcggagtcagtattaccgagcgcccggactggcgtgagaaagcccacgaatacggtttcaattttcacaccatgtacggcgagccgtactggtgtgaagatgcttactacaagttgaccctcgcccaggttgaaaagctggaagaagtcaccgccgaactgcaccagatgtgcctgaaagtggtggaaaaagtgatcgccagcgatgagctgatgaccaaattccgcattccaaaacacacctggagttttgtgcgccagtcatggctgacgcaccagccatcgctttattcgcgtcttgatctggcgtgggatggcactggtgaacctaaacttctggaaaataacgccgatacgccaacgtcactatacgaggcggcgttctttcagtggatctggctggaagatcagcttaacgccggtaacttgccggagggcagcgaccagtttaacagtctgcaagaaaaactgatcgatcgcttcgttgagctgcgtgaacagtatggcttccagttgctgcatctcacctgctgtcgcgacacggtggaagatcgcggaaccattcagtatttgcaggactgcgcaacggaagctgaattccagaccatgcaaaggagaggccaagtagagcaagaaaggcaccagtgggagtcatgctggggcaacgggcagagagtccatcaggaggctgggcctccactgcctctgctggctcatgggaagctggaattcatgctctctatagcccctgccatatga

SEQ ID NO: 143336 - DNA, 2836 bp, Homo sapiens
ctagtacacagcatcactgaccgccatcataagaaatctgatataaaaaactgtggcgtgtatggtacggattagaggggaaaatgtcagcacatttgcgaaatgaatcaaaaagcccgcaggaagggtgctgggcgttagtgtcagcagcacaaccagcacggagcactctgcgtgacgcactacagctgcggcgttggaaccgagcagataagtggtgatatccggtcgatgggaagcaatgatgatcatatgagcggggatcttcttcgccaattccagaatgcggtctttgggcgagccttcctcaacatggacatgcactctgtcggttggcagtttaaattttttaatgatctcttccagttgcgatttggcttccgctttcaggtcatccattgccggtaattctgcggaatacgctaaacccagagaggcatagtagggcagtgaaggtattaccgtcaggaaatgaacctctgcatcatcaatctttgcctcttcctcaacgtggctaatcacgcgttgagttaattctgaatcggaaatatcgatagggacaagaatcgttctgttcataaaacctcctgtttcagtatccgcataaagtgtaacgccagatgacactttccgtgtaatgacggagttcacattttcaatgtttcgccgattgtttccggtgaggttatccgttcccgtggcggctccacctctgaatttacgccgggatatgtcaagccgaagcatgaagtgaatccgcagatgaccctgcgagcaaatagaaaatgcctgcaacggcagcggccgagccaacgttgatctttatccggatgcgcttccgggctttggcaaatagccgcgtgtgattgccgcaataccgacggaataaacgccgaaaggggaaaaaaccagtgccagcaatccagtaaatacaattaatgggcgaaacaggagccgaatatccagctgctttcattgctgcgatacccggtgcgtttttgcgattgccattggtcaccagaaaaaggggggagtgcaacgcttcaggctggggaccgggttgtgacgtgacgtggcgttggtggttacctggggaccgggacgggacgttgacgtgactgactggttggttaccatcccacgccagatcatagacgcgaataaacgcgatggctggtgcgtcagccatgactggcgcacaaaactccagggtgtgttttggaatgcggaatttggtcatcagctcatcgctggcgatcactttttccaccactttcaggcacatctggtgcagttcggcggtgacttcttccagcttttcaacctgggcgagggtcaacttgtagtaagcatcttcacaccagtacggctcgccgtacatggtgtgaaaattgaaaccgtattcgtgggctttctcacgccagtccgggcgctcggtaatactgacggttgcactacgctgcatagtgctttgtttggcaacagattcaccaaaaccgccacgggtaacggtagtggtggtcgccggttttggtgccattgccgtcttcggtacggtcatggtgcggcctggctgggctgcgccatagtttttacccgtcgcgtcggtatatttaccgtaagccggactggctgggtttttcgaggagaacagcggctgctgtgcaaatcccgcgccgccgcccatcagacgccccatcatgtaaccggccatcagcggcatccagaaactcccgctggattgctgggcctgcgcctggttttctggtgccatgccagcctgggctggtgcctgctggcactgaccttcaccaaattcagcaacacagtcttgccggacattatgggagaaattgcctctgcgtcggaagaacaacagcgggggattgagcaggttgcacaggctgtcagccagatggatcaggtgactcagcagaacgcctcgctggtagaagaagcggcggtggcaacggaacaactggcgaatcaggccgaccatctttcgtcgcgtgtggcggtatttacccataaacgcgacatggtttacaaccgactggttcgtcgtttgcgttcgctgggactgacggatttcggtcattatctgaacttgctggaatctaatcagcacagcggtgagtggcaggcgtttatcaattcgctgaccacgaatctgacggcatttttccgtgaggcacatcatttccctctgctcgcggatcacgcacgtcgccgttctggcgagtatcgcgtatggagcgcggcggcttcgaccggcgaagagccgtacagcattgcgatgacgctggctgacacattgggcaccgcgcccggacgctggaaagtgtttgccagtgatatcgacaccgaagtgctggaaaaagccagaagcggtatctatcgccatgaagagttgaaaaacctgacgccgcagcaactgcaacggtatttcatgcgagggacggggccgcatgaagggctggtacgcgtgcgtcaggagctggcgaactatgttgattttgccccgctgaatctactggcgaaacagtacaccgtgccggggccgtttgatgcgatcttctgtcgtaacgtcatgatctacttcgatcaaactacccagcaggagattttgcgccgctttgttccgctccttaaacccgacggattgctgtttgcgggtcactctgaaaactttagccaccttgagcgccgcttcacgctgcgtggtcagacggtgtatgcgctaagtaaggattaacgatgagcaaaatcagggtgttatctgtcgataattcggcaccaatgcgccagatctccgggtcggacgattgaattgtag

SEQ ID NO: 143337 - DNA, 1271 bp, Homo sapiens
atgaaatcggtacgttaccttatcggcctcttcgcgtttattgcctgctattacctgttaccgatcagcacgcgtctgctctggcaacccgatgaaacgcgttatgcggaaatcagtcgagaaatgctggcatccggcgactggattgtgccccatctgttagggctacgttatttcgaaaaacccattgccggatactggattaacagcattgggcaatggctatttggcgcgaataactttggtgtgcgggcaggcgttatctttgcgaccctgttaactgccgcgctggtgacctggtttactctgcgcttatggcgcgataaacgtctggctctactcgccacagtaatttatctctcattgtttattgtctatgccatcggcacttatgccgtgctcgatccgtttattgcattctggctggtggcgggaatgtgcagcttctggctggcaatgcaggcacagacgtggaaaggcaaaagcgcaggatttttactgctgggaatcacctgcggcatgggggtgatgaccaaaggttttctcgcccttgccgtgccggtattaagcgtgctgccatgggtagcgacgcaaaaacgctggaaagatctctttatttacggctggctggcggttatcaagtgcgtactgacggttctcccttggggactggcgatacgcaggggatattcacgccggagcacgtttgccgctgttaagtgcgggctggcgcagttatatggcgatccacccgcctggccaacgccaacgcgcggcgtcagtgaaatccgcctggcgctacgttttaaatcgaatgattcgctgctgcgccactttaaggatacctccacgctgtatctggaaattgtggattatcccggcgaatggttgctcgacctgccgatgctggcgcaggactatttaagctggtcgcgccagatgacgggcttactcaatggtcagcgcggagaatggtcggcgaaatggcgaatgatgagcgaagggctggacccgctagcgcctgccgacgaaaaccggctggcggacattgccgccgcgtggaccgattatctccaccactgtaaagagcaggggctgcactttattcagcctgggcgctttgtcttgccgggagatatggcaggtgcgcccgcgctgcaattcttcccgtggccggatgtcgatacctggggcgagtccaaactggcgcaggccgataagcataccaatgccggaatgctgcgcgacgctttaattattactgcgagaag

SEQ ID NO: 143338 - DNA, 807 bp, Homo sapiens
ggctggcgcagttatatggcgatccacccgcctggccaacgccaacgcgcggcgtcagtgaaatccgcctggcgctacgttttaaatcgaatgattcgctgctgcgccactttaaggatacctccacgctgtatctggaaattgtggattatcccggcgaatggttgctcgacctgccgatgctggcgcaggactatttaagctggtcgcgccagatgacgggcttactcaatggtcagcgcggagaatggtcggcgaaatggcgaatgatgagcgaagggctggacccgctagcgcctgccgacgaaaaccggctggcggacattgccgccgcgtggaccgattatctccaccactgtaaagagcaggggctgcactttattcagcctgggcgctttgtcttgccgggagatatggcaggtgcgcccgcgctgcaattcttcccgtggccggatgtcgatacctggggcgagtccaaactggcgcaggccgataagcataccaatgccggaatgctgcgcgacgctttaattattactgcgagaagattgtgctggtggattgctgcaactctcaacagtgggcacagcatttatgatatgcgctggcctgacgcactgatcaaattttcatacgggcacgtactgtccagcgttgttttattacgccgcgcgcgcaatctgcataaagcggcacaacaagtggcgaccttacacggcggtaaattcccggaaacctttgaggaagttgcagcactgccgggcgtcgggcgttccaccgcaggcgcgattctctcgctttctctgg

SEQ ID NO: 143339 - DNA, 1866 bp, Homo sapiens
atggatgatttggcgctccgacgtttccctgggagtaagatttgtggcaccgacacaccgaaaaatatcacgaaccatatgccatttttgatgattactattgtggtgcgatatggtcagccaccgtattacaggagcaaggtgttgcagccctggccccgaatttcagctccctatgaccagcacagtgaaactactgctgccgatgtgttgcgtcatatcaatcatccgttcgcattgacactgcttatacgtgtagccgggcaaactaaacgctgtcacgatcggatgacgaaagccattgctgcgttcccacatgcagcaatggcggcactgacggaacttcttgggcaaaaagaagagaacagttggcgcattatgctaatgacaatgcttatctcacaaccagcactggcagaacagagcacttcgacgacacaaatcctggctctatcttggacaagacagacaatccagtacatcaaccttttggcgaaatatatctggtattcaaaacacatcacggttagccatgaagaaagtactaccaacctgttggcaaggatgggttttcaacgacggatcgctgggttacctgggttagtaaactcacttgcacgctatccacaagaagccttgcccatcacgaattacttcgcagcgagtgagctggctcctgccgtcgcccgtgccttcaacaaactgaaaacgctacgcgaaaacgcccgtagctggctgttgaaatacccggaacatgcccttaccggcctgctgcctgcggcgctcggcaaagccggtgaagcacaggataacgcccgcgctgccttgcgtatgcttaccgaaaacggtcatcagccattactgcaagaaatcgcccgacgttataaccagccggaagtaaccgatgcggactatttaagctggtcgcgccagatgacccgcttactcaatggtcagcgcggagaatggtcggcgaaatggcgaatgatgagcgaagggctggacccgctagcgcctgccgacgaaaaccggctggcggacattgccgccgcgtggaccgattatctccaccactgtaaagagcaggggctgcactttattcagcctgggcgctttgtcttgccgggagatatggcaggtgcgcccgcgctgcaattcttcccgtggccggatgtcgatacctggggcgagtccaaactggcgcaggccgataagcataccaatgccggaatgctgcgcgagcgctttaattattactgcgagaaggtggtgaaggggttctataagaatcattttctgcgctttgaccgccagattgtgctggtggattgcctgcaacctctcaacagtgggccacaggcatttaatgatatgcgtctggcactgacgcagctgatgcaaagttttcactacgggcagcgtaccctgttccggcgtttgttttcgccggttatcgataagctattgtttgctgccactaaagcggaccatgtgaccatcgatcagcacgctaatatggtttcattactgcaacaactgattcaggatgcctggcaaaatgcggcgttcgaagggatcagcatggactgcctggggctggcgtcagttcaggcgaccaccagcggcattattgatgttaacggtgagaaaatcccggcgctgcgtggtaatcgacttagcgatggcgcaccgctcactgtttatcctggcgaagttcccgcacgtttgcctggtcaggcgttctgggataagcaaggcttccagtttgaggcatttcgtccgcaggtgatggatgtcgacaaaccactaccgcatattcgtcttgatgctgcgctggaatttttaataggagataaattgcgatga

SEQ ID NO: 143340 - DNA, 813 bp, Homo sapiens
atgaagccacactgggaaatctctcagcaagggctgacgcttgcctcgccgctaccgaatggtgcccggcgatccacgaaacttccgtggcggcggttactcttcccgcttccttaccgaaggcggcgtccgttcaccatgactcgtgtcaacatcatcaaaggcctgggaccggtacgcaaatcgcggaaggctggagcgtggaattgccgaaggatgtgcatgactcctcaacaaacgcaccaactcaacctggccaaccacctggtttgcacccgcctcaccggtaaagggccgtttacggatgtgtactcggtaatggcgactggggcgctaaccatgggtgaaatccgcctggcctacgttttaaatcgaatgattcgctgctacgccactttaaggatacctcacgctgtatctggaaattgtggattatcccggcgaatggttgctcgactgccgatgctggcgcaggactatttaagctggtcgcgccagatgacgggttactcaatggtcagcgcggagaatggtgatggtgtcgacaaaccactaccgcatattcgtcttgatgctgcgctggaggtatcgaggaagccggaacgaccgcccagatacggcaaacccgccatctcccccgacgccgttggccggattcattcaatcgccagactggccacgaccaggcttgggcagttaatagagcctagagcgaaagggctcgcggcgaccccggagttcggcgcgcttttccctaatccacgtttagcggccatgcctcgtgacaagttggctgaacttgagccgcgctag

SEQ ID NO: 143341 - DNA, 549 bp, Homo sapiens
tccatccaaaacaaatgctgtttagcgcagtatcaatggtcttcagagcagcacaggacagcaatgaagcgacttaaaaatgaactcaatgcgctggtgaatcggggtgtcgacagacatctgcgcctcgctgtaaccggacttagccgcagcggcaaaacagcgtttatcaccgcgatggttaatcagttgcttaatattcacgccggagcacgtttgccgctgttaagtgcgccaacgcgcggcgtcagtgaaatccgcctggcgctacgttttaaatcgaatgattcgctgctacgccactttaaggatacctccacgctgtatctggaaattgtggattatcccggcgaatggttgctcgaactgccgatgctggcgcaggactatttaagctggtcgcgccagatgacgggcttactcaatggtcagcgcggagaatggtcggcgaaatggcgaatgatgagcgaaggtctggacccgctagcgcctgccgacgattatccggtctggcggacagttgccgcacggcgtgggatcctgagttaa

SEQ ID NO: 143342 - DNA, 2691 bp, Homo sapiens; identical to SEQ ID NO: 138482

SEQ ID NO: 143343 - DNA, 1215 bp, Homo sapiens
atggttaatcagttgcttaatattcacgccggagcacgtatgccgttgttaagtgcgcgtgactttggcattccgcgcttcacctatgacgaagggctggcgcagttatatggcgatccacccgcctggccaacgccaacgcgcggcgtcagtgaaatccgcctggcgctacgttttaaatcgaatgattcgctgctacgccactttaaggatacctccacgctgtatctggaaattgtggattatcccggcgaatggttgctcgacctgccgatgctggcgcaggactatttaagctggtcgcgccagatgacgggcttactcaatggtcagcgcggagaatggtcggcgaaatggcgaatgatgagcgaagggctggacccgctagcgcctgccgacgaaaaccggctggcggacattgccgccgcgtggaccgattatctccaccactgtaaagagcaggggctgcactttattcagcctgggcgctttgtcttgccgggagatatggcaggtgcgcccgcgctgcaattcttcccgtggccggatgtcgatacctggggcgagtccaaactggcgcaggccgataagcataccaatgccggaatgctgcgcgagcgctttaattattactgcgagaaggtggtgaaggggttctataagaatcattttctgcgctttgaccgccagattgtgctggtggattgcctgcaacctctcaacagtgggccacaggcatttaatgatatgcgtctggcactgacgcagctgatgcaaagttttcactacgggcagcgtaccctgttccggcgtttgttttcgccggttatcgataagctattgtttgctgccactaaagcggaccatgtgaccatcgatcagcacgctaatatggtttcattactgcaacaactgattcaggatgcctggcaaaatgcggcgttcgaagggatcagcatggactgcctggggctggctgaagccctgaagcttgctgaacgcatcggtgttactgccgcagcccgtgaactcagcctgtatgaatcacaactctacaactggcgcagtaaacagcaaaatcagcagacgtcttctgaacgtgaactggagatgtctaccgagattgcacgtctcaaacgccagctggcagaacgggatgaagagctggctatcctccaaaaggccgcgacatacttcgcgaagcgcctgaaatga

SEQ ID NO: 143344 - DNA, 2331 bp, Homo sapiens
atgcggatgaatatgtctgactttgccactttctttgccgtggcccgtaatcaaagctttcgtgcagcgggcgatgagttaggcttatcctcgtccgccattagccatagtattaatacactggaacaacgtcttaaaattcgcttattcaatcggacaacccgaagcgtatcgttaacggaagcgggttctaatctctatgaacgattgcgcccagctttcgacgaaattcagatcatgttagatgagatgaatgattttcgtctgacaccgacaggaacgctcaaaatcaatgccgcccgggtagctgcacagcagcacaggacagcaatgaagcgacttaaaaatgaactcaatgcgctggtgaatcggggtgtcgacagacatctgcgcctcgctgtaaccggacttagccgcagcggcaaaacagcgtttatcaccgcgatggttaatcagttgcttaatattcacgccggagcacgtttgccgctgttaagtgcggtgcgtgaagagcgcctgctgggcgtgaaacgcattccccagcgtgactttggcattccgcgcttcacctatgacgaagggctggcgcagttatatggcgatccacccgcctggccaacgccaacgcgcggcgtcagtgaaatccgcctggcgctacgttttaaatcgaatgattcgctgctacgccactttaaggatacctccacgctgtatctggaaattgtggattatcccggcgaatggttgctcgacctgccgatgctggcgcaggactatttaagctggtcgcgccagatgacgggcttactcaatggtcagcgcggagaatggtcggcgaaatggcgaatgatgagcgaagggctggacccgctagcgcctgccgacgaaaaccggctggcggacattgccgccgcgtggaccgattatctccaccactgtaaagagcaggggctgcactttattcagcctgggcgctttgtcttgccgggagatatggcaggtgcgcccgcgctgcaattcttcccgtggccggatgtcgatacctggggcgagtccaaactggcgcaggccgataagcataccaatgccggaatgctgcgcgagcgctttaattattactgcgagaaggtggtgaaggggttctataagaatcattttctgcgctttgaccgccagattgtgctggtggattgcctgcaacctctcaacatcataaattgtgggttgttgttggtgattgtcagcttacttcttcgaggtgaccccaattcatcagtagtatttgctaaagcctcatccaacgcaacatctgctcgacacttacgcgacacagttaccatgccaaccaaccacgcagttacagtcttcccactgacagggccagataacattgtattcgtgtccggtacggttgggccccctctttgttgctgcgtcttcccgagcgcggcttccgcgctccccctcgccctcgggtcccgctccgctgccctgtcctattgtgccactctgcggcttttgcccggtctgggttgcccgactgttcccgccgtgccgccgctccgcgttcggggcggcccggctcgtcccgccctgtggtcgtgtgccttcacttttctccgtttcgtccacctcctcgctagttcaccttccatgctgtccacgccccgtcggtctctggtggtgtggaccttcgctgtcgcgcttctgggtgcctccttggctgaaaggggaaaagcaaaaagcaaaacttataaaaaaatgaaagggtgtcttcagatgtttgttgaagtatggttcggtgcaaccctggtgcagggggagagacagagacaatcgggcacgggggagaaaaactatagtcgtaaacctaaaatcagagaggtgtcacctggccatcaccagttcgttgacagccctacaccctattggctgctgacctttgttgtggagccctgctcagtcacgatagaagatgatccaaggccagaagaaatccaaaaagaaagagaagagtacacggagagaagagaaggggagaaaccaagaaggaaaagcgaaaaagcagaacgagagaagaaggaaacgaagaacagagacgaacaaacgaggaaagagaggcaaaaagagacagaggaaaggagaaagaagaaacacgaggaacgacgaaaagaaaaagaggaaagaaagacaaaaaacgaagagagacaagggagggagagaagaaagaaagaacaaaggaagaaagaacgacagaagaaaagaaaacaacaacaaaatgtacaaaaccaagaaagagaagagaagaaaagcaagagagagagaaaatga

SEQ ID NO: 143345 - DNA, 534 bp, Homo sapiens
atgaagcataaacagaactatgccggaaggcaaaagcgcgacacaatagaggattacccaacaaaggatgactttatgacaatttgggtggatgccgacgcgtgtcccaatgtaattaaagagattttgtatcgcgcggcggaacgtatgcagatgccgctggtactggtagcaaaccagagtttacgcgtgccgccatcgcgatttattcgtacgctgcgcgtcgcggcaggtttcgacgttgccgataacgaaattgtccggcagtgtgaagcgggcgatttggtgatcaccgcagatatacctttggctgctgaagccatcgagaaaggcgctgcggcgcttaatccgcgcggcgaacgttacacgccagcgaccattcgtgagcgcctgacgatgcgcgattttatggataccttacgtgccagtgggatccagaccggcggaccagatagcctttcacaacgtgaccgccaggcctttgccgcggagctggagaagtggtggctggaagtgcaacgtagtcgtggctaa

SEQ ID NO: 143346 - DNA, 358 bp, Homo sapiens
agagtaggcactacctcatcttcttggaaccaggaagaattgttgtaactgatcattttccctagcagttcacagtagtaccagagggagatttgtagcctagtagtcagaaccacccagaaatgttacctgccaaagcccaggaggactgcagaccttggagaaaggagaggggccatggctttaggggaacttgcgtttgcctctcttggtgtccaggaatgtgaagctcgggtgcacgctgtggtccaaatcctgggggacagtccttgcaactgggtctcctgggattatgcaccgtcagccagtggggaagacgtttcaacaggagccctgggggggctggtccactggtgtt

SEQ ID NO: 143347 - DNA, 3997 bp, Homo sapiens
ctattcattaagtggaggtggaacatcacaaaggtcttcagcgtcactgtcttcacgttgagcaggccgaggaggaagaagaggaggggtcggtcttgtcatctcaggggtggcagaggcaggagagaatccgtggataagtggatctgtgcagttcagaacctgctgttcaagggtcaacgtagctggcttaatagtaaacttttcattggctgctttctctttcatacacaatttccccaatttcctactgattactttcacgtgaagcattgttttacgctctgcttttgtgatgatggctgcagaaaggtggccctgcgctgctgagctctccttctggccctctctgccagaaagggactgtctggagccaggagtgcctgaaacacctcctttgacctcagggaaactgcctttttctctgccagcatagtccttatgcaagagctgcttgacaaccttggcgtctacatcaaccagagcatgtgcaagagattcaatgttttctcggtcaagatttgttgttggctcatccaaggcaatgatgccacagttgaggcagaacgtttcagccagggccaggcgaatgatgagtgaggctaatacctgtagaaaatccaagtaactggaactgttaggcattttcgtggttactagaaacctaatactaaaaccctcagacccactgaaaccatctgccttttgtccagcactgcatcgtcctcgcatatccaaggctgtgtctcccttcagcatcaccactcggtagttataattccgccttttatcagaagctgatacattttcatcggcatcagaccgtatttctatgtattcaatatcttgtccacgataggtacttcgccacaggtcacgtataattttattgatttcttccattttcatactgtgaaatttcattattgcttggtcaagagtcttataataaatatccagatccttgttcacaagttctgttgtcctcataacaatcatcatttctctatacttttcctcagcatcccgaaattgtggttctcgaagttctttcttaaaatgaataatttcttcttcataacctttctgtcgccctaatgccaaattatgatttctttttatattgtctatgttctcttccaacttctgatgttcacttttcatttgcaaaacctgcatttgacccatttccttcaaatgttgttttctttcttcttcaacttcttttagttcctcatttctttttcttaaagtaaggttatcttgtagccacctttcttgtatcttctgtgtatcaatatcttgtctcatgagtctcatatcttcatttatcttttctttgtgtttctcgcattcacttagttgagctattactttattaagttcagtttctttttgcttcttatagtcgtctttcccatcttgaatataattctcaatgtctttcatatagccatgaatatttttaaccttctctttaatatcattcagtttatcctgtgctattttgttgcttgtattttttttgttgattaattcttctttttcttgctggaacttttccaatgttgtttccaaagggcttacctgctctttagcatccattttcatttgatcctcataatagctggttttcaaagggaatgcttccagtttttgcccattcagtatgatattggctgtgggtctgtcataaatagctcgtattattttgaaatacattccatcgatacctagtttattgagagcttttagcatgaagcggtgttgaattttatcgaaggccttttctccatctattgggataatcatgtggtttttgtctttggttctgttcatgtgatggattacatttattgatttgcatatgttgaaccagcccttgcatcccaggaataaagccgacttgatcgtggtggataagctttttgacgtgctgctggattcggtttgccagtattttattgaggatttttgcatcgatgttcatcagggatattggcctgaaattttctttttttgttgtgtctctgctaggttttggtatcaggatgatgctggccttataaaatgagttagggaggattccctctttttctattgttaggaatagtttcagaaggaatggtaccagctcctctttgtacctctggtagaattcggctgtgaatctgtctggtcctggacttcttttggttggcaggctattaattactgcctcaatttcagaacttgttgttggtccatttggggatttgacttcttcctttatctctctgtacaaagactgaacttcagtggataattccacagtctgctcctccagttgctgacgacgttgcaaattagtggatatctgaagtttctcagattttagctcatttgttgtactttttagatgttgaatctgttcctgctggtcctgtataagcttacgattcaattcaatcttactagaaactgtgtctaacttgtgctgtttctcttgtttctcctggttgacttgttggacagttcgatctaagtctattccttgtagcttagctgcttgttgtgcaatttttctttcaacatctttaagttccatctggaacctctccataattgtaacatctgtcaggcatactttggcactttcttcttcaggcattattgtacccaagagtgtttcttgttcttctatgtcgttctttaggcgctgtatgtctctattgacattctgcagtttgtttcttaattctggtatttccttctccttcaaatcaattatgctttgcctcatgggcacaagtcccagcatttcatcacgccgcttttcctttttttttagctctgattctgttgacttgagtttatctggagcaagtcgcagtttagactgcaaatcactgatgacttcttgtaactcagcctctgtctgaaaaactctctgacaaacggggcaacatgactggttttcgtctgttagctgagtaatgaactgggagtaaactgctgtggctccagccagcatggctcgctgttttgatgatttttcaatttcctctttaagcctgtctaaatcactttcaaaatcctggctaccacaaacatcaaacagcttgtcttcgtaactggacaactgctcttcctttctttttagttcattatttatatgatttttattctgctcagatgaagctagttccttgttcaatttggcaagtctgtccctggtctgattaatttcttttgatttactatgtagccagtcttcaagctgttttttgttgggaaaatatcccaacagtgaggttaattcatcactgtgcctagattttatttttctgatttgttcatctttgtcagcagcttttatgagctcctggtccagttcaagaatcctgtctgaagatccttccaactgctgtaattcatacttcacatttttcagctcattctgcttcttacttaggatttctgattttaactcaattattcttcccagtccagttttcttatctcttatctcatctatctgtttttgtttcagagtctctttttctgcaaagtcattaagtttgtgaaaatttttaatctgtctttcactgaatggtccacgctcaaagccatccaattctagctgtgttgccaaagactgaattaatgaatctctagctcggatatgttcttgatggcgatctgcttgcagctgtagacgaccctgttcaacaagcagttctgatttttcctgattgagaagcctagattctttatttagtttttccagttcacgatgacagtctaccaatttcctttctttctcccttactgttctctggtgattgtgatataagtcatttagttgctcatcagtcccttgaaaaaccttttccattttctcttccagttcactattatctttctccatttgcttctttcggctatccaaggctttaatttcattgtcaagtttcattattttagagagattatgttcaatttcttttagacgatt

SEQ ID NO: 143348 - DNA, 2049 bp, Homo sapiens
ggtccctgtgttcatgatgaggactctggcctatcgctcattggaaaacctgcccttcaggctcttttatatcactgccatttttatgaacatttgaatcagatggtaaagcattgttacctaggacggtgtatgtttgatttgaatttttctgcttttgatagaaattcagaaagcaatgatttaaatgccaattcctcctccttcacctgggatggggcagctgaagttagtctagctgaagttcccgcggggacacagggggatcagggagaaagaagcaagcctctcctcgcaaacaaggccagccagctttctcaagagggaatcgacactttggaacaaatatccaattttagagcttggacgaggaaagaacaagatgaacctggaacatcttgctgtgccagaaacattgcagatgctaccctcatacagacatgtgtccaggaactcagagccctgctgccttcatcacctccagctgaacacactcaggctcaggtttcctttctcctggaatacctatcctctttgtccaggcttctgcagtcatgtttattggtggagcctgaccttgtgattcaggatgagcttgtgaaacctcttatcaccaatatcattggaattctcaccatatgtaccaaagatgtattagataaagagttaatatcagctttttatcacacatggacacatttatttaatcttctggccatgctcctgaggaaagctggtgccatcacactcccgtttgttaccgtggccctggccaagcactggacagcggcgattggcttgtctgccacgtgtcctgccctgtatactgccagcttgcaattcctttctgttctcttgaccgaagaagcaaaagggcatctccaggctaagagcaaaacacatttatgctgtagtccaacagtggcttcacttcttgatgactctcaggaaaatcagaaatctctagaacaacttagtgatgtaatccttcagtgctatgaagggaaatcctccaaagatatcctgaaaagagtagctgcaaatgcattgatgtcactgctggctgtcagtagaagagcacagaaacatgctttgaaagcattgccaaaaggaggaaataaacatctaagtaatctgactattctttggttgaagttactcctgaatatatcatctggagaagatgggcaacaaatgattctgaggcttgatggctgtctagacttactaacagagatgagcaaatacaagcacaagagcagccctttattgcctcttcttatctttcataatgtttgcttcagtcctgcaaataaacccaagatcctggctaatgccttgcatcccagggatgaaacggacttgatcttggtgaataagctttttgacgtgctgctggattcagtttgccagtattttattgaggatttttgcatcgatgttcatcggggatattggcctgaaatttcctttttttgtctttgggagttggctggaggtccactcctgcccctgtttgcctgggtatcaccagcagaggctacagaagagcaaagattgctgcctgctccttcctctggaagcttcatcccagagggcaccccccagatgccagctagagctctcctgtatgatgtgtctgtcaacacctgttgggagctcgagcatcccaggtcgacttcagactgctgtgcaggcagtgagaattttaagccagtggatcttagtttgctgggctccatgggtatgggatctgttgagctaggccacttggcaccctggcttcagccccctttccaggggactgaacaactctgtctcactggcattccaggcactactgagcccaggaggactgcagaccttggagaaaggagaggggccatggctttaggggaacttgcgtttgcctctcttggtgtccaggaatgtgaagctcgggtgcacgctgtggtccagatcctgggggacagtccttgcaactgggtctcctgggattatgcaccgtcagccagtggggaagacgtctcagcaggagccttgaggtga

SEQ ID NO: 143349 - DNA, 769 bp, Homo sapiens
acgcgtccgcggacgcgtgggtggcttcccagatgccactggagaacaccacggttcagcagatggtttttatgcttctttcaaacctggccttgtcgcatgactgtaaaggagtaattcagaagagtaacttcttacagaacttcctctctctagcattgccaaaaggaggaaataaacatctaagtaatctgactattctttggttgaagttactcctgaatatatcatctggagaagatgggcaacaaatgattctgaggcttgatggctgtctagacttactaacagagatgagcaaatacaagcacaagagcagccctttattgcctcttcttatctttcataatgtttgcttcagtcctgcaaataaacccaagatcctggctaatgaaaaagtcattactgtgcttgctgcctgtctggaaagtgagaatcaaaatgctcagaggattggagcagctgccctttgggctctgatttacaattatcagaaggcaaaaacagctttgaaaagcccatcagtaaaaagaagagtggatgaagcatactccttagcaaagaaaactttcccaaactcagaagcaaaccctctaaatgcctattatttgaaatgtcttgaaaacctcgtgcagctccttaattcttcctgagtgccatgggatgctacaccttgaagctgacagtcatcaacaggggagctaaagttgaagccagctgtgtgtagcagctgttacctgaagacgtgctacctctctacaaagtgttg

SEQ ID NO: 143350 - DNA, 448 bp, Homo sapiens
acttttaaaaaatatatgttcatttttagaaaaagtcattactgtgcttgctgcctgtctggaaagtgagaatcaaaatgctcagaggattggagcagctgccctttgggctctgatttacaattatcagaaggtcagttttaaaaatcattgttacacctggggagcaaacaacaaggtataacccagggtataaactcttagggatacatccaaaggtgttcaagagttacaggcaaaagaaaaaaggacaaaatttaaagatccctgttccctttggctggtttcatacaattaggtaaaccatcagttggaaatcttttttatttaatcatttcaacagaatgtcttcagtttaggaagaggatctctggaactcgactttttcctcttaatttaaattgatttactttattattgcaattttagtatagattgtttcttctaa

SEQ ID NO: 143351 - DNA, 1218 bp, Homo sapiens
atgggaaacttgcaagaaagtgacaacctcgatagaagtgacacatctgatttaggatggaaaaagtgctatgaagggaaatcctccaaagatatcctgaaaagagtagctgcaaatgcattgatgtcactgctggctgtcagtagaagagcacagaaacatgctttgaaagcattgccaaaaggaggaaataaacatctaagtaatctgactattctttggttgaagttactcctgaatatatcatctggagaagatgggcaacaaatgattctgaggcttgatggctgtctagacttactaacagagatgagcaaatacaagcacaagagcagccctttattgcctcttcttatctttcataatgtttgcttcagtcctgcaaataaacccaagatcctggctaatgccttgcatcccagggatgaaacggacttgatcttggtgaataagctttttgacgtgctgctggattcagtttgccagtattttattgaggatttttgcatcgatgttcatcggggatattggcctgaaatttcctttttttgtctttgggagttggctggaggtccactcctgcccctgtttgcctgggtatcaccagcagaggctacagaagagcaaagattgctgcctgctccttcctctggaagcttcatcccagagggcaccccccagatgccagctagagctctcctgtatgatgtgtctgtcaacacctgttgggaggtgtctcccaaaaaagtcattactgtgcttgctgcctgtctggaaagtgagaatcaaaatgctcagaggattggagcagctgccctttgggctctgatttacaattatcagaagcccaggaggactgcagaccttggagaaaggagaggggccatggctttaggggaacttgcgtttgcctctcttggtgtccaggaatgtgaagctcgggtgcacgctgtggtccagatcctgggggacagtccttgcaactgggtctcctgggattatgcaccgtcagccagtggggaagacgtctcagcaggagccttgagtctttggggctgcaccttgtgtattccccatttcttgaggttgccagagccccaggtctgcttcttgacccgtgatgttcctcggatttgccagagtgatgggaagttacctcatggacatcaggaaggagaaaggctggaaaaggacttcctcagctgtgtttccctttaa

SEQ ID NO: 143352 - DNA, 266 bp, Homo sapiens
  misc_feature (1)...(266): n = a,t,c or g
gatgttgatgctattgnnnnnnnnnnnnnnnnnnnnnnnnnnnnnnnnnnnnnnnnnnnnnnnnnnnnnnnnnnnnnnnnnnnnnnnnnnnnnnnnnnnnnnnnnnnnnnnnnnnnnnnnnnnnnnnnnnnnnnnnnnncaaagattgctgcctgttccttcccctggaagcttcatcccagaggggcacccaccaaatgccagccagagctctcctgtatgaggtgtctgttgacccctgctggggggtgtctccccgtcaggag

SEQ ID NO: 143353 - DNA, 3081 bp, Homo sapiens
  misc_feature (1)...(3081): n = a,t,c or g
atgaaggcgcgtatgcacgctttcctggctttaatggtggtgtccatgggggctggccttttttctggtatgccgctcgataaaatcgcagcgacgatggaaaaagggatgggaggcaccctcggcttcctggcggtggttgtcgccctgggagctatgtttggcaagatcttacatgaaaccggcgcagtcgatcagattgccgtcaaaatgctcaaatccttcggtcacagccgcgcgcattatgccatcggccttgcggggctggtctgtgcgctaccgctgttctttgaagtggcgatagttctgctgattagcgttgctttctcaatggcgcgccacaccgcggcggcatttctggtgcctggaccagcgccgatgctgctggcatcgcagatgaatgccgactttggctggatgatcctgattggcctgtgtgcggcaattccgggaatgattattgccgggccgctgtggggtaacttcatcagccgttacgttgagctgcatattcctgacgacatcagcgaaccgcatctcggcgaaggcaaaatgccatctttcggattcagcctgtcgctgatcctgctgccgctggtgctggtagggctgaaaaccattgccgcgcgttttgcgccggaaggatcaactgcttacgaatggtttgagtttatcggtcatccgtttaccgcgattctggttgcttgtctggtggcgatttacggtctggcaatgcgtcagggcatgccaaaagacaaagtgatggagatttgcggtcacgcgctgcaaccggcggggatcattctgctggtgattggtgcgggcggcgtgttcaaacaagtgctggttgactctggcggaaggcccgcccttggccgaaccgttaaccggcatgggcctgccgattgctatcacctgcttcgtcggaatttgctacatggactagccggacgtgaaacgggcggctcggtggatctgctctgggtgaacggcgaaaacttccgcaccttaaaagaggccaatttattacaaacgggctgggcggagactctgcccaactggcgctatgtcgacacacagctgccggtgcgggaagatttttctgtgccgacacaaggtgcggaatcgccctggggcggcgcacaactgacgtttatcgcccgccgcgatgttacgccacagccaccacaaacgccgcaagccttactggagtttgctaaagccaatcccggcacggttacctatccgcgcccaccggactttaccggcacggcgtttcttgaacagttgctgattatgctgacgcccgatcccgccgcattaaaagaagcgccggacgatgcgactttcgcccgtgtcactgctcccttgtggcaatatcttgatgtgctgcatccgtatttgtggcgcgaaggaaaggatttcccgccttcacccgcgcggatggatgctctgctgaaagccggcacattgcgcctgtcgctgacctttaaccccgcgcatgcgcagcaaaaaatcgccagcggcgatttgcctgcaagcagttacagttttggctttcgcgaggggatgattggcaacgtgcatttcgtcaccattcctgccaacgcgaatgccagtgctgcggcgaaggtagttgccaatnttctgctctcacccgatgcgcaactgcgtaaagcagatcccgctgtctgcaaatgctttgacgggacaaccgttctggaaaactactttcattactgcgctctgaaaatgagctgtgtagagctggcccggacgtttgtctttctggctaatcaggggaaagctattcatattgatgaaccagtggtgacgccaatgcaggcgcggcaaattaacgcgctgatggcgaccagtggtatgtaccagaacgcgggggagtttgcctggcgggtggggctaccggcgaaatctggcgttggtggcggtattgtggcgattgttccgcatgaaatggccatcgctgtctggagtccggaactggatgatgcagttagggcgttcggtttattaatgcagtctctcgatccactcttcgcgcgtttatcccgttcaaaatttcgctctcgctttcgtctgggcatgaaagagcgtcagtattgcctggagaaaggcgcgccagtcatcgaacaacatgcggcggattttgtcgctaaacgtcttgctccggcattaccggctaatgacgatgatagtgaacgaattctgcaaagtattagcttggcgaagttcacctctagagtcatcttatctcgaaccgataaatccggcgacaaaacggtctttcggatagtggtacagctccagcggtttcccaacctgcgccacgcgaccggcgtccagcaccacgattttgtcggccagcgtcatcgcttcgacctgatcgtgggtgacgtaaatcattgtgcggcccaggcgtttatgcagacgggagatttcgataccatttgcacacgcatcagcatcgaggttggagagcggttcatcgagcaaaaatacgcttggctcggcaccagcgtggggatagagcgcgtaagactgaaacaccataccaacgccgcgttctgctggcggagtgtcattcatccgtttctcaccgatgaacagggtgcctgtattgtgcatgatgaatttaagactcaggcgttaacccgcttgcaagaagaatacccggatgctgccatactggtgcatccagaatcaccacaagctattgtcgatatggcggatgcggtcggttccaccagtcaactgatcgctgctgcgaaaacattgccacatcagaggcttattgtggcaaccgatcggggtattttctacaaaatgcagcaggcggtgccagataaagagttactggaagcaccaaccgcaggtgagggtgcaacctgccgcagctgcgcgcattgtccgtggatggccatgaatggccttcaggccatcgcagaggcattagaacaggaaggaagcaatcacgaggttcatgttgatgaaaggctgcgagagagggcgctggtgccgctcaatcgtatgctggattttgcggctacactacgtggataa

SEQ ID NO: 143354 - DNA, 2785 bp, Homo sapiens
tcatgctcccacgatggcgatatagggtaagtttttgataatccgtgacgtgcgttcttcaaacaccgaaagcccgctggcatcgatgtcattttcatcacgatgacgcaggtcgtgagttatcgcgatccccagcagcatcaccatgccaataaagatttcgatggattcagggttaagatgtgggaaatagcgcacgactaccacacgggtcatcagtaccaccacggcggcgatcagactttgcttccagccaaactggtagaaaatcgccaccagcgggaacagtgcaaaagctgaaaccaccggcgagcttaattcccccaggctacctaatacatccaccggcagcgcggtcagcagctggtttactggcaacaggcaagtaaggatcaacacgccccagatagcgccaagacccatccgcgccgaggtggatacccaggttgcggagttgcagcgactggagcgtgtgctgcagcgccagctaaccgccacgcaaccgaaattcaagaatatctccccgcatttacagcgcattaaagcgttcaaaaccctcgggtaaattggatccacgcagcactgcagcgaacgggccgaggccgacggcgaccacgaacagcatggcgaagaccatttcgttaatggcgcggcaggcgtccatcaggcggcgaacgggctggtaaacccaccacggcaccaggttttcggcgctcatcaggccaaaggggatggagagaaccaccgccagcgcggtgccccagacggcgatttgcagcgtgacggccatttcggtgaggtaatcctgccactggctgaaatcgggcgggaagaagtcggcggcgaacgtcgccatgttgccgccgtctttgatcagcgtaagcggggccatttccgcgccctgccacgagacgaccaacacggcgagtacaacggcccagctcagaagcgagaaccagctgcgcttgggtggggcgatggtgatggtttgcatgtttggctccggtctgtaggccggataaggtgcttgcaccgcatccggcatcaacgccgaactcatcgcgcttagcgcgttgttcaggcggtccaggtcatccagctgcgcctgaatctcggtggtttttgccagcttgtcctgctcattcagtcctttattgcttttcacgccctgcatctctttaaacagcgcgagctggcgaatcggcaccagttgcaggtcgctggaagcgcggaatggcgcccagcccaggcgttccagcaccgctttttcttccggcgttttgccgtagttcataaagaagtcgtagatcttgtctttggtggtttcggaaagattcttgcgccagacgatcggatcgcctgggatcagcggcgacttccagatcaccttcagttctttcagcttctctggcgcggaggttttcagcttgtcgaggttttcggtgttgttggtggcaacatccacctgcttgcctgaccgtcctttgattaaatcacatgtcattacacactgcccataatgcaactccgaatacacgaagataacggcatgtacatctgcccggaatgtgcctacgaatggaacgacgcagaacctgcacaggaaagcgacgagctgatcgttaaagatgctaacggcaatctgctggctgacggcgacagcgttaccatcattaaagatctgaaggtgaaaggtagctcttcgatgctggtgttcgccggtatttaacgtcgcattcagacccgcagaaaccagaatgagatttttcagttcgcgatgataatagccaatatgcggatgccattcgttataatgctcgaacgcctctgcaaggttctttgctgccgttaacccgtctggtttgggcatgatactgatgtagtcacgctttatcgttttcacgaagctctctgctattccgttactctccggactccgcaccgccgtgttcttcggttcaagtcccaacatccgggcgaactggcgtgtttcattagcccggtagcatgaaccattatccgtcagccactccactggagacgacggaagatcgttgccgaagcggcgttccaccgctcccagcatgacgtcctgtactgtttcactgttgaagccgccggtagtgaccgcccagtgcagtgcctcacgatcacagcagtccagcgcgaacgtgacacgcagtctctctccgttatcacagcagaactcgaacccgtcagagcaccatcgctgattgctttctttcacggccactctgcctgtatgtgcccgtttcgatggcggtacagcaggttttcgctcaagcaacagcgcattctggcgcatgatccggtaaacacgtttggcattgatcgcaggcataccatcaagttctgcctgtctgcgaagcagcgcccatacccgacgataaccatacgttggcagctctccgataacatggtgtatacgagaagcacatggatcaggattgctgggcgtctttcttgccggaggaacggttgttctggcggccgatcccagcgccacgctcggatcgcgtggagtgtgtggattcacttccgctgacggcggtcgggaaagtcgataaaaaacaattacgtcagtggctggcgtcacgcgcatcagccagggctcaaaggaggagtccacttgcagaagccaggaagccacaatatgtgcaccaaggtatggacaacgcaaggacagctcttcagaaaccagagcaagcacgggcacacacagaggttcattggacttaacttccagtgtctgggcagcctccat

SEQ ID NO: 143355 - DNA, 1144 bp, Homo sapiens
ataatttttgcagcgtttcgttgctgatctcccgtgtggcgcgcaggtggtaaagttcagcacgttcagaacgcaatgccgccagacggaagcgacgctcaaggttctcttcctgcacggaactttcaacgtcgttacgtccatcggcgcgacgacgcaggttaccaatgacgcgagaactgacctccgtaagcagctggttatcgatattctcttcggtatccgccgccagacgctcctccattttctggatcgccacaatcgccacttctgccgttgccgctcgcgcaatacgttcctctttcaattgttgcgaatgatccgcgacttcaatgatttcgagctcgttacccgctatctcttgatagcgttttgggtatgcaaccgttgagagaggaaatccagcaggctgaccgtgacgatgataagcaccatcagggcgcaggtttgttggaactggaaaccgcgaatcgcttcccacagggtgacgccgatcccgcctgcgccgaccatgccgacgacggtcgccgagcggacgttggattcgaagcgatagagggagtaggagatcagcagtggcatcacctgtggcagcacgccgtagaggatctcttcgagcttgttggcaccggtggcgcgaatgccgggccgggctcaatcgcttccaccgcttcggaaagcagcttggagagcacgccggtggtgtggataaacagcgccagcacgccagcacgccagcgaacgggccgaggccgacggcgaccacgaacagcatggcgaagaccatttcgttaatggcgcggcaggcgtccatcaggcggcgaacgggctggtaaacccaccacggcaccaggttttcggcgctcatcaggccaaaggggatggagagaaccaccgccagcgcggtgccccagacggcgatttgcagcgtgacggccatttcggtgaggtaatcctgccactggctgaaatcgggcgggaagaagtcggcggcgaacgtcgccatgttgccgccgtctttgatcagcgtaagcggggccatttccgcgccctgccacgagacgaccaacacggcgagtacaacggcccagctcagaagcgagaaccagctgcgcttgggtggggcgatggtgatggtttgcat

SEQ ID NO: 143356 - DNA, 2460 bp, Homo sapiens
atggatgctctgctgaaagccggcacattgcgcctgtcgctgacctttaaccccgcgcatgcgcagcaaaaaatcgccagcggcgatttgcctgcaagcagttacagttttggctttcgcgaggggatgattggcaacgtgcatttcgtcaccattcctgccaacgcgaatgccagtgctgcggcgaaggtagttgccaatttcctgctctcacccgatgcgcaactgcgtaaagcagatcccgctgtctggggcgatccttctgttctcgatccgcaaaaactgcctgacgggcagcgcgaatcattgcaatcaagaatgccgcaggatctgccgccggtactggctgaaccgcacgcaggttgggtaaatgcgctggaacaagaatggctacaccgttacgctctcacgctgatatcgcctgctttgtcgttgacacactggcaggcgttatttgccgatccacagttaccgcaggcattactggcaacgctggtgtcgacaaacatcgcggcggtcggggccttgttgattgccctgctggtgattgttggcgctgtgggccgtggccgaattggggccgttttttggccccggttgcccgggtttgtccccattccccctttggaagacgcgattgaacagattgtctcttatctgaaacacgcggctcaggcgctggaagagaagaaacaaatcctgtatctgctggggcctgtgggtgggggtaaatcatcgcttgctgagcgactgaaatcattaatgcagctcgtaccgatttatgtattgagcgcgaacggtgagcgtagcccggtcaacgatcatccgttctgtcttttcaatccgcaggaagatgcgcagattctggaaaaagagtatggcattcctcgccgttatctcggcaccatcatgtcgccgtgggcggcaaaacgcctgcatgaatttggtggcgatatcactaagttccgggtagtgaaggtctggccgtcaattctgcaacaaattgctatcgccaaaacggaacccggcgatgagaacaaccaggacatctccgcgctggttgggaaagtcgatattcgtaaactcgaacactacgcgcagaatgacccggacgcctacggctattccggtgcgctgtgccgcgccaatcaggggatcatggaattcgttgagatgtttaaagcaccgattaaagtgctgcatcccttgttaaccgccactcaggaaggtaactacaacgggacggaaggtatctccgccctgccgttcaacgggattattctcgcacactcgaacgagtccgaatgggtcactttccgtaataacaaaaacaacgaaaccttcctcgatcgtgtttacatcgtgaagccgactctagaggatcccccctgtaaagcgtgttcgacccagtgccccatcaaaattgatgtgccggagtttcgctctcgttttctgcagctctatcacacccgttatttacgcccgctgcgcgaccacctcgtcgctacggtcgagagctacgcgccgctgatggcacgcgcgccgaaaacctttaacttcttcattaaccagccgctggtgcgcaaactctcggaaaaacatatcggcatggttgatttgccgctgctgtcggtcccctcgctacaacaacaaatggtggggcatcgctcggcaaacatgacgctggaacagcttgaatctctcaatgcagagcagaaagcgcgcacagtgttggtggtgcaggacccctttaccagctattacgatgcgcaagtggtggcggattttgtccgtctggtcgaaaaattaggtttccagcctgtgttactgccattttcgccaaatggcaaagcccagcatattaaaggttttcttaatcgttttgcgaagacggcgaaaaagacggcggatttcctcaaccgtatggcgaagctgggtatgccaatggtgggcgtcgatcagatatcaatgcctcgcttatcagataaagtgcttacgcaaccgttgagagaggaaatccagcaggctgaccgtgacgatgataagcaccatcagggcgcaggtttgttggaactggaaaccgcgaatcgcttcccacagggtgacgccgatcccgcctgcgccgaccatgccgacgacggtcgccgagcggacgttggattcgaagcgatagagggagtaggagatcagcagtggcatcacctgtggcagcacgccgtagaggatctcttcgagcttgttggcaccggtggcgcgaatgccttccaccgggccgggctcaatcgcttccaccgcttcggaaagcagcttggagagcacgccggtggtgtggataaacagcgccagcacgccagcacgccagcgaacgggccgaggccgacggcgaccacgaacagcatggcgaagaccatttcgttaatggcgcggcaggcgtccatcaggcggcgaacgggctggtaa

SEQ ID NO: 143357 - DNA, 292 bp, Homo sapiens
gcacgccatctggtgcgtttaatgccggtgctgcgcttgcgtgatgcccgttttatgcgccgtattcgtaacggcacggtgccaaatgtccctaatgtggaagtcaccgcgcgccactcgatttcctcgcccattcgtcagggactttccgcaatggtacagctgcttgagcattatttctctgagcagggggccggacaggcgcgatatcgtttaatgcggcggcgagccagcaatgagcaacgaagctggcgctatctggatatcatcaaccggatgattgaccgacctg

SEQ ID NO: 143358 - DNA, 440 bp, Homo sapiens
attcgtcagggactttccgcaatggtacagctgcttgagcattatttctctgagcagggggccggacaggcgcgatatcgtttaatgcggcggcgagccagcaatgagcaacgaagctggcgctatctggatatcatcaaccggatgattgaccgacctgttgcctggcatctgttgaatcttctgccattgcagcgcattgccaccaccaactcgggtgagttgctttcgttaacgccggtagagcatgtttgccgactggtacgtgagtcctcgcgcgttgccgcctggcgtctggggccgagtggcttgagtaccgaagatagccgacgcatatcctttcacattcgttttaaccgtccgtcatcgctgtttgcacgctgctggttgctggtggaaggggaaacggaaacctgggttatcaatgaactggcgcgtca

SEQ ID NO: 143359 - DNA, 864 bp, Homo sapiens
tcaatggaccctgacttccatctcaacataatgcagcccagacagggcctgacagaaataacctgtcggagctcggtacccattcgagcagttggtgataagcgtcggcagaccataggtccgcagccaggcgcgcaccagatggtcgctgctggcttttgacgcggaataagggctgctcggcgcatacggcgtggtttcggtgaagaaatcatccgtcgagtgcaggtcaccatatacttcgtcagtggagatatgatgaaaacggaacgctgattttttatcttccgtcagcgcattccagtaagcccgcgccgcttcaagcaatgtataagtcccgacaatgttggtttcaataaacgctgccgggccgtcaatagaacggtcaacatggctttcggctgccagatgcatgacacagtctggctgatgctcagtgaatacgcgtgccagttctgcccgatcgcagatatcaactttctcaaaggcaaagcgctcgctttgcgcgaccggtgccagcgacatcaggtttccggcgtaggtcagcttatcgaccactaccaccgcgtcgctcgtttcgttgatgatataacgcaccagcgccgagccaataaacccggcaccacctgttatcagaatttttctcatcagcgccagactctgctgatggacattgtcgccattgataactttgaactgactatgatcgaccagcatcaccagcacgtctgccgttgccagcgcctcgtcaagctgcgccagagtacaaagcccggtcagttttttcggcaactggtggatgttaggctcaacaaccagagtttcgccgctatgccactgggcgatcagttcagccgatttcat

SEQ ID NO: 143360 - DNA, 696 bp, Homo sapiens
cgtccccgccggaagatacaccgggcgagaccttcatctgcatattatttgcctttccgcgaatcgctgccagcccgacatcgggttcgccgttatcgcccgctggaagcgtgctgaacgccatgcaccgatggctatcaccgtattttttatcgtctgaaaggggagagtgcgaaagacggcagcgtgatgacactgcgcagttttctcgataaagacggacatccgattgatgtcgaggatattaacgatcaggcacgccatctggtgcgtttaatgccggtgctgcgcttgcgtgatgcccgttttatgcgccgtattcgtaacggcacggtgccaaatgtccctaatgtggaagtcaccgcgcgccagctcgatttcctcgcccgtgagttatcctcacatccgcaaaatctctctgatgggcagattcgtcagggactttccgcaatggtacagctgcttgagcattatttctctgagcagggggccggacaggcgcgatatcgtttaatgcggcggcgagccagcaatgagcaacgaagctggcgctatctggatatcatcaaccggatgattgaccgacctggtgggcgctcgtatcgggttattttgctcggcctatttgctactttgttgcaggcaaaaggcacattgcgactggataaagacgcccgtccattgttgctgatcgaa

SEQ ID NO: 143361 - DNA, 1406 bp, Homo sapiens
gagcatcgctcatgcagtggcaaactaaactcccgctgatcgccattttgcgcggtattacgcccgacgaggcgctggcgcatgttggcgcggtgattgacgccgggttcgacgcggttgaaatcccgctgaattccccacaatgggagcaaagcattcccgccatcgttgatgcgtacggcgacaaggcgttgattggcgcaggtacggtactgaaacctgaacaggtcgatgcgctcgccaggatgggctgtcagctcatcgttacgcccaatatccatagtgaagtgatccgccgtgcggtgggctacggcatgaccgtctgccccggctgcgcgacggcgaccgaagcctttaccgcgctcgaagcgggcgcgcaggcgctgaaaatatttccgtcatcggcttttggtccgcaatacatcaaagcgttaaaagcggtattgccatcggacatcgcagtctttgccgttggcggcgtgacgccagaaaacctggcgcagtggatagacgcagtccctaatgtggaagtcaccgcgcgccagctcgatttcctcgcccgtgagttatcctcacatccgcaaaatctctctgatgggcagattcgtcagggactttccgcaatggtacagctgcttgagcattatttctctgagcagggggccggacaggcgcgatatcgtttaatgcggcggcgagccagcaatgagcaacgaagctggcgctatctggatatcatcaaccggatgattgaccgacctggtgggcgctcgtatcgggttattttgctcggcctatttgctactttgttgcaggcaaaaggcacattgcgactggataaagacgcccgtccattgttgctgatcgaagatccagaaacccgtttacaccccattatgctttcagttgcctggcatctgttgaatcttctgccattgcagcgcattgccaccaccaactcgggtgagttgctttcgttaacgccggtagagcatgtttgccgactggtacgtgagtcctcgcgcgttgccgcctggcgtctggggccgagtggcttgagtaccgaagatagccgacgcatatcctttcacattcgttttaaccgtccgtcatcgctgtttgcacgctgctggttgctggtggaaggggaaacggaaacctgggttatcaatgaactggcgcgtcagtgcggacatcattttgatgccgaagggatcaaggtcattgagtttgcccagtccgggctaaagccactggttaaatttgcccgccgaatgttacatcctgcatatggaaggaagaagtacaaagtcttaccagcagtcttgagaattctggtcagttttaaacacattggtgcacagtccctttcttttaactttttagggcagccagagggttcttag

SEQ ID NO: 143362 - DNA, 2161 bp, Homo sapiens
ggggggcaacggggccagagctttcatgcctgcaggtccgggtcgtcgtgaacatacaaagcatatgctgcgtctgcggcgggaagggcagatcaccggtaaacaggtgccggaaattattctactcaactctcacgatggaaccagttcgtatcagatgttgccgggactatttcgtgcggtttgtcagaacgggctcgtctgcggtgagtcgtttggcgaggtgcgggtgccacacaagggggacgtggtgagtcaggtgattgaaggcgcgtatgaggtgctggggatttttgaccgggtggaggagaaacgggatgccatgcagtcgttgctgttgccacccccggcacagcaggcactggcaaaagccgccctcacataccgctttggtgaagaccaccagccgcgtattcaggagaacctgattaagggcgggctcagtggccgtaatgccaaaggaggacggtcacatacccgtgccgttcgccgtatcgacggggacgtgaaacttaaccgggcactgtgggcagaacgccgccatgaccggctggctgtcaggctgtcactgataatcagccgtctggtggcaggggaaacgctgagtgtgcgtaacgttgccgctgagtttggtgtgtcggtgcgcacgctgcggcgtgagttttctccggatattgccattatcgccattgttgtcatcgtcatcattctgaacaaaaccggggtgtccgacagtctcgcggccctgacccttgccactgttgccgcactgctgacgggaggtggcgcacggttgcttccagatgtcgcgctgacaaccttcggtgggcggtcctgtccgtctacgtatcgctttgatactctccccacgccgctgcaggatgagagcaatgacctttggaccacctatcagcggattcaagaaaacctgattaagggcggactcagtgggcgtaatgctaaaggcggacgaactcatactcgtgccgtgcgtggcattgacggggatgtgaagcttaaccgtgcgctcgcaccggatcgcacaaccaccttcctgtacgcgctgggctggacgcagcacactgtgggtgcgcagaacatccgtactatggcgatgatccagttgctgctcggtaacatgggtatggccggtggcggcgtgaacgcattgcgtggtcactccaacattcagggcttgactgacttaggcctgctctctaccagcctgccaggttatctgacgctgccgtcagaaaaacaggttgatttgcagtcgtatctggaagcgaacacgccgaaagcgacgctggctgatcaggtgaactactggagcaactatccgaagttcttcgttagcctgatgaaatctttctatggcgatgccgcgcagaaagagaacaactggggctatgactggctgccgaagtgggaccagacctacgacgtcatcaagtatttcaacatgatggatgaaggcaaagtcaccggttatttctgccagggctttaacccggttgcgtccttcccggacaaaaacaaagtggtgagctgcctgagcaagctgaagtacatggtggttatcgatccgctggtgactgaaacctctaccttctggcagaaccacggcaggaaatgcctgaactgggaggaggacttcattaggcttgcatgcctgcaggtccgttttcatcatatctccactgacgaatcatatggtgacctgcactcgacggatgatttcttcaccgaaaccacgccgtatgcgccgagcagcccttattccgcgtcaaaagccagcagcgaccatctggtgcgcgcctggctgcggacctatggtctgccgacgcttatcaccaactgctcgaataactacggcccttaccactttccggaaaaactgatcccgctgatgatcctcaacgcgctggcgcgtaaatcgctgccggtatatggcaacgggcagcaaatccgtgactggctgtatgtggaagatcacgcccgcgcgctgtattgcgtggcgaccaccgggaaagtcggtgaaacctataatattggtggtcacaacgagcgtaagaatctcgatgttgtggaaaccatttgcgagctgctggaagaactggctccgaacaagccgcacgggtggcgcactatcgtgacctga

SEQ ID NO: 143363 - DNA, 683 bp, Homo sapiens
tcgggatccggttttccggaaagtggtaagggccgtatttattcgagcagttggtgataagcgtcggcagaccataggtccgcagccaggcgcgcaccagatggtcgctgctggcttttgacgcggaataagggctgctcggcgcatacggcgtggtttcggtgaagaaatcatccgtcgagtgcaggtcaccatatacttcgtcagtggagatatgatgaaaacggaacgctgattttttatcttccgtcagcgcattccagtaagcccgcgccgcttcaagcaatgtataagtcccgacaatgttggtttcaataaacgctgccgggccgtcaatagaacggtcaacatggctttcggctgccagatgcatgacacagtctggctgatgctcagtgaatacgcgtgccagttctgcccgatcgcagatatcaactttctcaaaggcaaagcgctcgctttgcgcgaccggtgccagcgacatcaggtttccggcgtaggtcagcttatcgaccactaccaccgcgtcgctcgtttcgttgatgatataacgcaccagcgccgagccaataaacccggcaccacctgttatcagaatttttctcatcagcgccagactcctttggcatcgacgacatactgctgatggacattgtcgccattgataactttgaactgactat

SEQ ID NO: 143364 - DNA, 2160 bp, Homo sapiens
atggagcttgctgcgctgcggtctgaaaatccgcagccggatgaaaagccgctcggcgaaacgctgaaagatcttttttctcgcccggtattgccggaaatgaccgacgtgcatttgccgcttaacctgaacattgaagagtttatgggcgagcagctgcacgtgactggcgacacggacatataccgtgagcaccatgctgctgaaatgagcaacattgacggcaatactaaactggacgccctggatatcgattccagtcaagggatcgtcgacgccagcggcacggcgcacctgtcagacaactggccggtggacatcactctcaacagtacactgatcgtggagccgttgaaaggtgacaaagtgaagctgaaaatgggcggcgcgctgcgcgaacagctggagattggcgttaatctttccggtccagtggatatggatttacgcgcccatacacgactggcggaagccggattgtcgctcaacgtggaagtgaacagcaaacagctttactgtccgctcactgtatgtcgtcgatgccaaaggagtctggcgctgatgagaaaaattctgataacaggtggtgccgggtttattggctcggcgctggtgcgttatatcatcaacgaaacgagcgacgcggtggtagtggtcgataagctgacctacgccggaaacctgatgtcgctggcaccggtcgcgcaaagcgagcgctttgcctttgagaaagttgatatctgcgatcgggcagaactggcacgcgtattcactgagcatcagccagactgtgtcatgcatctggcagccgaaagccatgttgaccgttctattgacggcccggcagcgtttattgaaaccaacattgtcgggacttatacattgcttgaagcggcgcgggcttactggaatgcgctgacggaagataaaaaatcagcgttccgttttcatcatatctccactgacgaattgcttcaggatacgattaactttatcaaaagtttcctgatattccgcttcttcctggctatcggcgacaattccaccgcccgcagagcagaaaatttgtccgttaatggcagtcagcgtgcggatagtaatactggtatccatgttgccgcaaaagctcaaatagccaatgctgccgcaccaggcattgcgtcgctgcggttccagttcgtcgataatttccatagcccgtactttcggagccccgtgggtgaagtcttcaacagcatctgggactgcaaacaactgattgaagagcaactcatcgattatatccgcaccacgctgacccatgcaggcggaattaccggtatgcgccggattgccgattttgcttcgctgtatcaggtacgtactggctcacacggtccttccgatttgtcaccagtctgcatggctgcggcgctgcactttgatctgtgggtccccaatttcggtgtccaggaatacatgggttattccgaacaaatgctcgaagtcttcccgcacaactggactttcgataacggctatatgcatccgggagacaaaccgggtcttggtatcgaattcgatgaaaagctggcggcgaaatatccctatgaacctgcttatctaccagtcgcacgtctggaagatggcacgctgtggaactggcggttgatcaggcccagtatatacaactcaagtcaaatgcagctagttttacactttggcccagttcagcagttggaagtttttgcagaagtattgaaaagtggatcaaccacccaggcgtcggtgatgctggcgttgtcgcaatcaacagtgagcgcagccttgaccgacctggaagggcatcttggcgtgcaactgtttgatcgcgtggggaaaagactggttgttaatgaacacaggcggctgctctatccggcaaactctatctgccaagtctcatcctgccattgtcaccacacccaggaccaagtggacatcacttctcacccggacaaccacaacagcctgctaactggtttctctgtctcctcccctgcatccctctgccctggatttcacacaccagcccacatgacaaacatgatctcatatcagggacttgttcgcaccttccataacgctgtagccaccagaacagatattgcggaacgacaaagagaaacagaaccagattga

SEQ ID NO: 143365 - DNA, 2265 bp, Homo sapiens; identical to SEQ ID NO: 131807

SEQ ID NO: 143366 - DNA, 1626 bp, Homo sapiens
tcaaggtgagtgtgttaccgacttcgttgtgcacttaatggtcacgcccattttttcaatacgggcgatctctgcatccagcactgattgcggtaaccggaattgcggaataccgttacgcaaccagccaccggggtgcgcttctttctcataaatcgtgacgtcataaccctggtttgtcagtgtcacactggcctgcaatccggcaggacctgcgccaataatcgcgactttgccgagcgttttagtaccgggctgataaattcccattccggtttgttgttcaaaatcagtaacaaaacgctgtaagcggccgatatcaatgggagcatcaacaccggcacgggtacaaccgctttggcataatttctccgtcgggcacactctggcacaaacggcaccgagggcattattttcgcgaattgtcgtcgcagcgccttccttaggcagccaaccggtgggaataaataacgcagtaataaaaccccaggcaataaaagcaccaatattggggatgaccattgcagtcaaaaagcccccaaaagcctggacctttgcacgagcagacttgttttccataatattatccactttccggaaaaactgatcccgctgatgatcctcaacgcgctggcgggtaaatcgctgccggtatatggcaacgggcagcaaatccgtgactggctgtatgtggaagatcacgcccgcgcgctgtattgcgtggcgaccaccgggaaagtcggtgaaacctataatattggtggtcacaacgagcgtaagaatctcgatgttgtggaaaccatttgcgagctgctggaagaactggctccgaacaagccgcacggcgtggcgcactatcgtgacctgatcacctttgtcgctgaccgtccggggcatgatctgcgttatgccattgatgcttcgaaaattgcccgtgaacttggctgctgccgcaggaaacgcggcgtatcgaagcaactgttgccgatttacgataagactgcccgcgttatgggtgcgcgcaatgacgtcttccaccggctgttgaccccacagcgcgtcttcgtcgtccagcgtcaggaaggcgatatccgtgcattccagcatttgttggtacacctgctgtgtctcttctttgctggcccacaggcgcggacgatagttattgtcgaaaatcacttttccgccgttggcgcggcattcgcgcagcagggaaagcagcttttcgcggctggtcgggcttaagatcgccaggctaatcccgctcaggtagagataatcgaaattcgccagctcttcgcaaatcgccgcagactgctcactctccagccagaatttggcggcggcttcgttccgccagtagtagaacgtacgctcgccggtgctgtcggtttcaatgtagtaaaggcccggcagacggttttccatccgttgggtcagggaagtatcaacgttctcgccgtgccaggcgtccagcatctgctggctaaaactgtccgttcccagcgccgttacgtaatgaacggttaatgccgcaggatcgagggcgatatagacggaagtgttcagggtatcgccgccgaaaccgcgcttaacgtccgcgcctttctcggaaagctcaatcat

SEQ ID NO: 143367 - DNA, 1247 bp, Homo sapiens
ttctgtacaagcatgctgtgaagacgcaggcacagctgtaactcccctacagatgaaggtgcttcccacacatggacacagacactcagcctctcagacaagtgtcggcaggggaccgtctctggcagattaagccttcggaaatcagattgtacaccaattagccacgcgagttgttcctcatcctcgctgcatgggcactgagtgagtgtcgccgttcggctcagaatgacggactttagtaggacagtggggaaagatgtgcagaggtttgatgctggcctgggttggactcttgagcgtctgctgtctgcacatgcggcattccgtgtcgcattgaaagccggcgacatggcgatactggccagtagaccacccaccgttacaccgaattccatgcgtcttctgggacgtttatatcgctctggcgtgtatgggcgatgatattcgagccgtatctgatcgataacccagaacggtttgtgatcgttcacttcgcgcgcggtacggataagccgcgcctgctgggggttctgtgccacgataaaccacggatcaacagcaatgcagtgaccgcccacgccagggccaggctgaagaatattaacgcgagggtgacgattcgccaggcgaatcagttcccagacgttaatcccctgatcggcacaaatcagcgacaattcattagcaaaagcgatattcacatcgcggaagctgttttcggtgaggtaagtggtacgtgcttctgcatccggatggcccggttcacctttcagcagtacgaactgaatctgaccgtctttgttcagatcccaaccctgattcgccgcccagtgtttagcaatcaaatcgccttgaataatgccggactctttggagtcagtgccaacgtagtaggctttgtcgtagctatccagcgccttacgagacgggtctttgttgaagaaaaccaccggcacgttttgcccacgcgctttctcaatcaccgtacccgcagctgccgggtcaaccaggttgattgccagtgccttcacccctttcgccagcaatacgtcgatctgatcggtctgcttggactggtcattctgagaatcattcatcagcagctgaacatctggcgcggctttcgcatcttgctcaatagccttgcgcactacagacataaagttatcgtcgtacttatagattgttacaccaatgcgagtatcagcagcgtgtgcagcggcaccgaataacatgctggccat

SEQ ID NO: 143368 - DNA, 2104 bp, Homo sapiens
gtctaccctcgcacaacaatggcaggctggcgacagcatctggtcacgcccggctattcgtgtcttcgcaacctacgccaagtgggatgagaaatggggttacgactacaccggtaacgctgataacaacgcgaacttcggcaaagccgttcctgctgatttcaacggcggcagcttcggtcgtggcgacagcgacgagtggaccttcggtgcccagatggaaatctggtgctcgtatctcctcgcgctcagacagtgtcaggccgacatccatagcgctggctgcatctgccacggtgtagttctggtcaacgaccagtgtttgccgccagtaaagtgctggggccgctgtggagcaaagtctccattttgcgctatcacatttcgggtccgctggacgatccgcaaatcaacgaagtgttgcgccaaccgcgcctacaaacggaacataaccgtaggtcggataaggcgtttacgccgcatccggcagccgttgcctgatgcgacgctgtgcgtcttatcaggcctacaaacggaacataaccgtaggtggccaaattcagtgtgccacttcagccctgattcgactttttacaatgacttatctggacgcatgaagaacgtcaggctaatgttcaacggtatacacagggacaatggattctccaaacgacccacagacttgaactacacgcgtaaaccactcgtcctggctttccagacggcatggtttatcaccgtccgcgttgaaattgtgggttttcgcggtatcaaccgtttgtcgttgatgctggaacaaaacaacgtcctgattggggagaacgcgtggggtaaatccagcttgctggacgccttaactctgctgctatcgccagaatcagatctctaccattttgagcgcgacgatttctggttcccgccgggagatatcaacgggcgagaacatcatctgcatattattttgaccttccgcgaatcgctgccaggccgacatcgggttcgccgttatcggccgctggaagcgtgctggacgccatgcaccgatggctatcaccgtattttttatcgtctggaaggggagagtgcggaagacggcagcgtgatgacactgcgcagttttctcgataaagacggacatccgattgaatgtcgaggaatataaccgatcaaggcacgccatctggtgccgtttaatgcccggtgctgccgcttgcgtgaatgccccgttttaatgcgccgtattcggtaacggcacggtgccaaatgtccctaatgtggaagtcaccgcgcgccagctcgatttcctcgcccggggcggacaggcgcgatatcgtttaatgcggcggcgagccagcaatgagcaacgaagctggcgctatctggatatcatcaaccggatgattgaacgacctgaaacccgttacacgcgtgagattggttttacctccaccaacatcgacctgatttacggcctgccgaaacagacgccggagagtttcgcctttaccctgaaacgtgtggcggagctgaaccccgatcgtctgagtgtctttaactacgcgcatctgccgaccatttttgctgctcagcgcaaaatcaaagatgctgacctgccgagtccgcagcaaaaactcgatatcctgcaggaaaccatcgccttcctgacgcaatcgggctatcagtttatcggtatggatcactttgcccgtccggatgacgagctggcggtggcccagcgtgaaggcgtgctgcatcgtaacttccagggctacaccactcagggcgataccgatctgctggggatgggcgtttccgccatcagcatgattggcgactgctacgcgcagaaccagaaagagttgaagcagtactatcagcaagtggatgaacaaggcaatgcgctgtggcgtggtattgcgctaacgcgtgatgactgtattcgccgcgatgtgattaagtcgctcatctgcaacttccgtctggattacgcccctattaagaaacagggggatttgcacttcgctgattactttgcggaagatctcaagctgctcgccccgttagcaaaagatgggctgggggatgtggatgagaaggaatacag

SEQ ID NO: 143369 - DNA, 2239 bp, Homo sapiens
atgctcaccgggtaccgtgcagttagtcgacataaaagtcagcgttataccgccgatgacgccgaagagatgattggcaaattgaccggaatgccaattccgctcaacagcttgcgccagtggattttaggtttaccgggtgatgcaaccgactacaaactggacgaccagtaccgcctgagcgaaattacctacagccagaatggcaaaaactggaaggttgtttatggtggttatgacaccaaaacgcaacctgcgatgccagccaatatggaactcaccgacggtggtcaacgcatcaagttaaaaatggataactggatacgtgcggatggttaccacacgctgcaaacgctgtttcagtttcttgattacggcgacaccatcagcattgagcttcgtgacgatggggatattcgtctgttaacgcccgttgaaggcgtggaacatgaagataacctgatcgttcgcgcagcgcgattgttgatgaaaactgcggcagacagcgggcgtcttccgacgggaagcggcctcgtcaagttgcgccagagtacaaagcccggtcagttttttcggcaactggtggatgttaggtcaaacaaccagagtttcgccgctatgccactgggcgatcagttcagcgatttcgcatcgccgggctttcgcgcaggtcatcaatattcggtttaaacgccagaccaaagcaggcgattttcagttcactggcgcgtttatcggtagccgccaggcaatcagccaccgccgctttcacctgatcgataacccagaacggtttgtgatcgttcacttcgcgcgcggtacggataagccgcgcctgctgggggttctgtgccacgataaaccacggatcaacagcaatgcagtgaccgcccacgccagggccaggctgaagaatattaacgcgagggtgacgattcgccaggcgaatcagttcccagacgttaatcccctgatcggcacaaatcagcgacatttcattagcaaaagcgatattcacatcgcggaagctgttttcgagccgtcgattatcgccgctgaccggcttaacccgctggtcaacgaattgatcatcatgccagatatcgaaaaacgtctggacgcgtttgtccgtatcgctcacgaagagttgctctatttgctgggaattttaatgaacccggccaacaaagatcatgttttaccattgatcctcaccggcccgaaagagagcgccgactacttccgcgtactggacgagtttgtcgtgcatacgctgggtgaaaacgcgcgccgccattaccgcatcatcattgatgacgccgctgaagtcgctcgtcagatgaaaaaatcgatgccgctggtgaaagaaaatcgccgtgatacaggcgatgcctacagctttaactggtcaatgcgcattgcgccagatttgcaaatgccgtttgagccgtctcacgagaatatggctaatctgaagctttacccggatcaacctgttgaagtgctggctgccgacctgcgccgtgcgttctccggtattgtggcgggtaacgtaaaagaagtcggtattcgcgccattgaagagtttggtccttacaaaatcaacggcgataaagagattatgcgtcgtatggacgacctgctacagggttttgttgcccagcatcccggctcttataacgacctcctgttgatggagctactgccgcacctgctggtggaaggtatgctcatctccgcggtgtccgctgaaagcttaccgtggctacatctctcctgcgtggcgaatatatcgaagcggcagttaatctgcgccgtgccattgccgaagccaccgaaagcgggtctgcttggcaaaaacattatgggaacaggtttcgatttcgaactgttcgtccataccggggcagggcgctacatctgcggggaagaaacagcgttaatcaactccctggaaggacgtcgtgctaacccacgctcgaagccacctttcccggcaacctccggcgcatggggtaaaccgacctgtgtcaacaacgtcgaaaccctgtgtaacgttccggcgatcctcgctaacggcgtggagtggtatcagaacatctcgaaaagtaaagatgctggcaccaagctgatgggcttctccggtcgggtgaaaaatccgggactgtgggaactccgttcggcaacaccgcacgcgagatcctcgaagattacgccggtggtatgcgtgatggtctga

SEQ ID NO: 143370 - DNA, 2895 bp, Homo sapiens
atggaggacagaaagtgtgagtcacttgcagggatgtatgaaaattacttggcagaaacaagaaaacgccagacaggcgcttcgggaatgtatgtgggagagtttgaaaattcatggtgtttctttcaggctctctcagcacttactgcggctacctctgctctcccgccacctgcacgtctgcagagggatccccgccgaaaagttgagcttaaggcagctatgaagaattatctggtccaaaatgtcagtagtgctgaggttgagaaaccctacctcgagcaaacaccagactgttgccttcaaaccaccatggagttctggacttcttttactgaatcctcactctgttgcacagggctgatagacaacttgtctgagctctccctcacagaagtgacattgcttgaagcggcgcgggctttttgtaatgcgctgacggaagataaaaaatcagcgttccgttttcatcatatctccactgacgaagtatatggtgacctgcactcgacggatgatttcttcaccgaaaccacgccgtatgcgccgagcagcccttattccgcgtcaaaagccagcagcgaccatctggtgcgcgcctggctgcggacatatggtctgccgacgcttatcaccaactgctcgaataactacggcccttaccactttccggaaaaactgatcccgctgatgatcctcaacgcgctggcgggtaaatcgctgccggtatatggcaacgggcagcaaatccgtgactggctgtatgtggaagatcacgcccgcgcgctgtattgcgtggcgaccaccgggaaagtcggtgaaacctataatattggtggtcacaacgagcgtaagaatctcgatgttgtggaaaccatttgcgagctgctggaagaactggctccgaacaagccgcacggcgtggcgcactatcgtgacctgatcaccttcgtcgctgaccgtccggggcatgatccgtcgtcatgccatataatgcctgggagcaacgatttcggggacggcacacgcctgtgtgaccgcttcccactccacttgggttccgtgagcgcgcggagccggaggagtcagggacgtgaggatgccctacttcccgcagcatccggatggcagggtctgcgtcggaaggcccgggagggcgacgccctccactgctgccgcggggtggaatcagatctctaccattttgagcgcgacgatttctggttcccgccgggagatatcaacgggcgagaacatcatctgcatattattttgaccttccgcgaatcgctgccaggccgacatcgggttcgccgttatcggccgctggaagcgtgctggacgccatgcaccgatggctatcaccgtattttttatcgtctggaaggggagagtgcggaagacggcagcgtgatgacactgcgcagttttctcgataaagacggacatccgattgatgtcgaggatattaacgatcaggcacgccatctggtgcgtttaatgccggtgctgcgcttgcgtgatgcccgttttatgcgccgtattcgtaacggcacggtgccaaatgtccctaatgtggaagtcaccgcgcgccagctcgatttcctcgcccgtgagttatcctcacatccgcaaaatctctctgatgggcagattcgtcagggactttccgcaatggtacagctgcttgagcattatttctctgagcagggggccggacaggcgcgatatcgtttaatgcggcggcgagccagcaatgagcaacgaagcgggcgtcaaaggtaccgagctaggcgccacgtcgcgggaaccttcggtcaggctgacgtagttttgcaggaagatggacataccgattgcagagatgagtgcaatcaggcgcttagagttacgccccgggcggcgctggcaatgacgattgcgccgacgaatcccgcagctaccagcagccagccggtatcaatgcccatcatcatcagcgcggcgatgatcataaatgagacagacggtgaacagcagatgctggcgattggtcgtgcgctgatgagcaacccgcgtttgatattgcttgatgagccatcgctcggtcttgcgccgattatcatccagcaaattttcgacaccatcgagcagctgcgcgagcaggggatgactatctttctcgtcgagcagaacgccaaccaggcgctaaagctggcggatcgcggctacgtgctggaaaacggccatgtagtgctttccgatactggtgatgcgctgctggcgaatgaagcggtgagaacgccagactcctttggcatcgacgacatactgctgatggacattgtcgccattgataactttgaactgactatgatcgaccagcatcaccagcacgtctgccgttgccagcgcctagtcaagctgcgccagagtacaaagcccggtcagttttttcgacaattggtgaatgttaggctcaacaaccagagtttcgccgctatgccactgggcgatcagttcagcgatttccatcgccgggctttcgcgcaggtcatcaatattcggtttaaacgccagaccaaagcaggcgattttcagttcactggcgcgtttatcggtagccgccaggcaatcagccaccgccgctttcacctgatcgataacccagaacggtttgtgatcgttcacttcgcgcgcggtacggataagccgcgcctgctgggggttctgtgccacgataaaccacggatcaacagcaatgcagtgaccgcccacgccagggccaggctgaagaatattaacgcgagggtgacgattcgccaggcgaatcagttcccagacgttaatcccctgatcggcccgaatcagcggcgattcctagcaaggggctcctctaatgcgactgcaggatga

SEQ ID NO: 143371 - DNA, 1111 bp, Homo sapiens
cgaactcatcgcgcttagcgcgttgttcaggcggtccaggtcatccagctgcgcttgaatctcggtggtttttgccagcttgtcctgctcattcagtcctttattgcttttcacgccctgcatctctttaaacagcgcgagctggcgaatcggcaccagttgcaggtcgctggaagcgcggaatggcgcccagcccaggcgttccagcaccgctttttcttccggcgttttgccgtagttcataaagaagtcgtagatcttgtctttggtggtttcggaaagattcttgcgccagacgatcggatcgcctgggatcagcggcgacttccagatcaccttcagttctttcagcttctctggcgcggaggttttcagcttgtcgaggttttcggtgttgttggtggcaacatccacctgcttgttggcgacggccagcgcgttggtttcatgcccggcgttgacggtgcgcttgaagtcgctggggatcctgccgcgctgggcgataacgtcatcggcaaaatgctgcacgtcacccatgtcacctttcaacacggcgatttccagacagtcgtcgtggttgatgtgcacatgcagcgtggcgacggagaggtcgtggtgatgatgctgggtggagacaatgcggctggctaagtcgcgtttttcgtgttcatacacatacgacagcaccgcgaaaccttgcgtgccgtgctgctgggtggcctcttgcgccagggcgctacgcagaatgtcgcggatagcttcggaacggttgttataaccacgacgctggctcaggctgtccagcgtctccagtaaatcgtcatcaagcgtgatggtgactcgttgcatttgcgttaaaccttttctgtggtgcgacggcgcacggggaatgcgggtaataccgcgttttgtagcacacgtccggcgtcagaggaaaaggttaatttctctcccaccacctgggtttcgacgatttgtccgttgtccataaccattacccgctggcaaaagcgttctaccaagcgtaagtcgtgggtgatgaacaggcaggcggtgccaaactgttgttgtagctttttcagcaggcgaatgacacccgcctgtaacacga

SEQ ID NO: 143372 - DNA, 3039 bp, Homo sapiens; identical to SEQ ID NO: 139660

SEQ ID NO: 143373 - DNA, 1479 bp, Homo sapiens
atgaaaggcaccgttgaacgggccgatatgcactacatcatccgtgatttcgaccgtaaacagtttgaagcgcgtaaacgtaaaatgatggagatcgccaaaaaagcgggtgtcattcgcctgctgaaaaagctacaacaacagtttggcaccgcctgcctgttcatcacccacgacttacgcctggtagaacgcttttgccagcgggtaatggttatggacaacggacaaatcgtcgaaacccaggtggtgggagagaaattaaccttttcctctgacgccggacgtttaacgcaaatgcaacgagtcaccatcacgcttgatgacgatttactggagacgctggacagcctgagccagcgtcgtggttataacaaccgttccgaagctatccgcgacattctgcgtagcgccctggcgcaagaggccacccagcagcacggcacgcaaggtttcgcggtgctgtcgtatgtgtatgaacacgaaaaacgcgacttagccagccgcattgtctccacccagcatcatcaccacgaccttatttgtgcgaaaaccgatggttgtaacgaggctcgctggttctcgctgacgacgcgcaatgttaaaagaaggaaagcggctggcggacatcgccaaaaaacagccgctgaccctgctctactcagcaaaaaacaccacgcagaaccatgcgctggtgctggccgactggctaccgcggcaatggaagacggcgatgcactgattttcatgaacttccgtgctgaccgcgcgcgtgaaatcactcgtgctttcgtgaacgctgatttcgatggcttcgcgcgtaagaaagtggttaatgaagatctcggtaccgtaccgtgctctatttcgaaaacgaccacgagaagacgttccgtgcaccgaaagcgtatccggagcgacgggcgctcgcatatcctttctgtgacggcccagcgtatgccggacggcatgatcctgctggagatggctccgatggataaccagcgccgcttaagtcaggaacagctacagcacgcccagcaggttgctgcccgtgatttagtgcgcggcctggcacatgagattaaaaatccgcttggcggtttacgtggcgcggcgcagctgctcagcaaagcgttacctgacccatcactactcgaatataccaaagtgattatcgaacaggcggaccggctgcgaaatctggtcgaccgtctgttggggccgcagctgcccggtacgcgcgttaccgaaagtattcacaaagtggctgaacgcgtggtaacgctggtgtcgatggaactgccggacaacgtgcggttgattcgtgattacgatcccagcctaccggaactggcgcacgacccggatcaaattgaacaggtcttgctgaatattgtgcgcaatgcgctacaggcgctggggccggaaggcggtgaaatcaccaggttgcgtttggtgtttctttcacgcgcttag

SEQ ID NO: 143374 - DNA, 1833 bp, Homo sapiens
ttaagcccccacgtaattccctgagagataccactcttcacctgatgcagcccgcttactgcttttccgtaaacaccgttcacgacgcgccagaaaattgtttcgttctggctgggagtggctttcacggaatgccgccatccacaccgttgcagcacgacggtataagcccctggactccagttcttccgcctggcggtgcaggcacaaaatcacccgcgggtcgttagtgccgacatagaaattgcgcacaggtcccctgaatcctgccgggatctggctgtattccacattgtcgtaactggctttgaagtacgggtcttcgcgtttttctgtgtacgtgctgacggacggcgataaccgcagggaaagctcatcccatttttcccgcaccttcgacgggctgagcacgttacggcaccaaaacggatcgcggctgacgcggctgtacatctcgcacatttgtttgtgagtacgaccatcctgcacacacatcacgcgaatttcgtttgcccaggctgtccagttcggttctttgggacgaaccacctcgccgtcacattcggcggcctgctcgtacagggcgatgatttttttccagagccactgtgcgcaggtcaaatcatcctgcgttccccactggcgctttttagggctgaatacaaccgcatcaggatggcgagttaaaaaatcctgttcatccgtctgcgtgtccggttgcgaagcgtccggacgagaaggttttttatggatgtactcatccatctcggttttcaggttatcggatttagtaccgaaaatcgcttgaacaccagaaccagcaaccactacgcccgctgcgcccagttttttcaggccggcctgatccactttagacacatcagcaacgctgacgcgcagacgggtaatacatgcgtcgaggttagtaatgttttctttaccaccaaatgcagcaaccagagccggtgccatttcgctggtacctgtcgcttttgcatcttcagtcgcgtcttcacgacccggcgttttcagatccagtgctttaatcagcacgcggaagatggtgtagtaaacaatcgcataaccgataccgacgatcgggaacagccacagtttgctgctgttaccagacagaacgatgaagtcgatcagaccgtgcgagaacgacgtaccgtcacgcatccccagaagaatacagattgggaatgccaggcctgccagaatcgcgtggatgatgtacaggatcggcgcaacgaacatgaaggagaactcgatcggctcggtgataccggtcaggaacgaggtcagcgccgcaaagatcataataccgcccactttcgcgcggttttctggtttagcagagtgccagatagcaattgcggcacgtggcagaccgtacattttgaacaggaagccaccagacagtttacccgcagtccggtcacccgccatataacgcggaatgtcgccgtggaaaacctgacctgctgcgttggtgtattcaccaatctgcatctggaaaggtacgttccagatgtggttcagccaaacggtaccaggcaacgttcgatgaaaccgtaaattggcaacgccactaccgggtttcttgtagcagcccactgagagcaagtcaccatcctggatgatgatctctccaacatgccagcctctctcttggacctcaactccagcagctttcacctcctccctactcaagatacaccatgacgacactctgaccttgacattgttgttggattgttggatttttgcacaataatagactgaggtcaggagtttgagaccagcctggccaacatggcgaaaccccat

SEQ ID NO: 143375 - DNA, 1656 bp, Homo sapiens; identical to SEQ ID NO: 139656

SEQ ID NO: 143376 - DNA, 614 bp, Homo sapiens
atgctgatagtgttcagtttacccagcgacactttagttttgtcgcctttataaccaaacttcaggaccaggccattcagaccttccagcgttcccagatagtgaccgaagaaagatttgaagatagccacgagtgcgatgatggaagccgcatattccagtgtaatcgcgaacgttgttttggtaccggtcatggacgcaaagtggttagccagataagaaagcactggaatattctgcgctttggcttccgccatgttggccggagacagagtaaacaggcagctaaaggcaaagaacatcaccactgcaaccatcagcatgctggcacgagaaatgatttgggaacatttacgttcggtgaagtcgcgaccgaagtctttctcatactcttcacgcttagaaaccacgaaggaagagacgattggcgagaagttaaaggagaaaaccatgatggaaatccccagccagacagtgatcaggataccgtcatgaccggttaacgacagcgaaccgaggtcaacctggtcgataactgcagagttccagtaagggatcagcgacaaagaaatcagcaccaggctggcgataaacggccataccaggtagctcat

SEQ ID NO: 143377 - DNA, 648 bp, Homo sapiens
caccgggtcgcacaggatgccgctccagctgcggctcccgtcatccaggacaacatggtggcagccaggcgaaagtaaacccgttttcagaacgcgatatcgatgtggcgcggcaaaattatctggcgcaggaagtactcggtaccacgagacggcaaatctccgggatgtacattttctggctgttacgggcaaacataatatgctgcaggcgcgcttcgacatccacttggtcaggtaggttgattccatatcagtgaccatttccagcatctccagaagctgtcggaccagactttccagtgactgttctttggcaagggattgcgagacgcgggcgataatctgatctgacacggaacaactccaggatacggcgggtaaatgctgattatttaatctttgcaggcatgataaaacatcatcaacaaagatgaaacaagacgtaatatgttttgagtgaatgtaataaaaatagtgcggcgctttaactttagcagcggtttccagtacggcgttgatggagtcagtaccgacgcagtttactgctggcagtgcgaagttgttttcttttgctacctggaaaactttctgtacgtcatcaccagtgattacgccaggttttacgaaatcaaaaatcttagacat

SEQ ID NO: 143378 - DNA, 1548 bp, Homo sapiens; identical to SEQ ID NO: 122992

SEQ ID NO: 143379 - DNA, 1120 bp, Homo sapiens
atgccaatggtggtgtgcgccgcgaaaagctatctcacacaatacggcataccggaaaaacccgccgatttgagtagtcattcatggcttgaatacagcgtgcggcccgacaatgaatttgaactgatcgcaccggaagggatctcgactcgcctgatcccacaaggaagatttgtgactaatgatccgatgacgctggtgcgctggctgacggcgggtgccgggatcgcctacgtgccgctgatgtgggtgatcaacgagatcaatcgtggggagctggagatcctgctgccgcgttaccagtcagatccacgcccggtttatgcgttatataccgaaaaagataagctgccgctgaaggtacaggtcgtgatcaactcgctgacggattattttgttgaggtcggggcgaggggaccgttcgtgcacgtagaaagattaattatcctctctgaaaatagtgaaattattacgcagtaccgccaacagtcaggttatcgactttcaacgttggctgggccacgacaagcgggcaactttgttattatggaagctggaggcggccggctcccctctaagaccactgagtgttcaggtgacaacccctcaggaggtggcagaaacggataatcatgccgataactcatataacgcagggctgtttatcgtgaattcactctataccgctgaaggtgtaatggataaacactcgctgtggcagcgttatgtcccgctggtgcgtcacgaagcattgcgcctgcaggttcgactgcccgcgagcgtggaacttgacgatctgctacaggcgggcggcattgggttacttaatgccgtcgaacgctatgacgccctacaaggaacggcatttacaacttacgcagtgcagcgtatccgtggcgctatgctggatgaacttcgcagccgtgactgggtgccgcgcagcgtgcgacgcaacgcgcgtgaagtggcacaggcaatagggcaactggagcaggaacttggccgcaaagccacggaaactgaggtagcggaacgtttagggatcgatattgccgattatcgccaatgttgctcgacaccattacgccagtcttctctacatgaacctcagaggcttcag

SEQ ID NO: 143380 - DNA, 2352 bp, Homo sapiens
atggtactggatttaatgttacctggtgaagatggcttgtcgatttgccgacgtcttcgtagtcagagcaacccgatgccgatcattatggtgacggcgaaaggggaagaagtggaccgtatcgtaggcctggagattggcgctgacgactacattccaaaaccgtttaacccgcgtgaactgctggcccgtatccgtgcggtgctgcgtcgtcaggcgaacgaactgccatgcgcaccgtcacaggaagaggcggtaattgctttcggtaagttcaaacttaacctcggtacgcgcgaaatgttccgcgaagacgagccgatgccgctcaccagcggtgagtttgcggtactgaaggcactggtcagccatccgcgtgagccgctctcccgcgataagctgatgaaccttgcccgtggtcgtgaatattccgcaatggaacgctccatcgacgtgcagatttctttgtcgctgatcccttactggaactctgcagttatcgaccaggttgacctcggttcgctgtcgttaaccggtcatgacggtatcctgatcactgtctggctggggatttccatcatggttttctcctttaacttctcgccaatcgtctcttccttcgtggtttctaagcgtgaagagtatgagaaagacttcggtcgcgacttcaccgaacgggcgaggggaccgttcgtgcacgtagaaagattaattatccttctgaaaatagtgaaattattacgcagtaccgccaacagtcaggttatcgactttcaacgttggctggcccacgccaaccggcaaactttgcccttctttaccgcagacacccacgccgttatccagtttcaggtcgttgccaaccatcgaaatctgctgcatggtttcgataccggaaccaatcaacttcggtgcatagataccgtactcaacggattcaataatttcctgcggggtcgatttacccggcagcatataggtgttggtcatacgcggcatgggcagatgggcgtaggattcacggcgaccgttgccagtcggcgtcatccccatcaaacgcgcgttgagtttatcctgcatgtagcctttcagaaatgccgttctcaatcagcacgttgtactggcctggcgtaccttcgtaatcattcgcaaccgaccttcgggattgaacattgtgcattattaaacaccggacacaattttaaggcccaagtttccgactgtgcacttaaactgaagtgcacagcggtgaaatggctttcaaaacggaccaacggttatgtaaaaacaccgggcaactggccaaatatatcggcttgtgcccctgtggacacaccgcaaagaattacaacgcctatccctgtgtttttgcatgataccacggttttccgggtgactggtgtggtgattgaagtgacggataagaaaaatacgctgattaaaaaaggtgaggtgctatttcgactggacccgacgcgttatcaggcgcgggtggatcggctgatggcggatatcgttaccgcagaacataaacagcgggcgttgggcgcagagttagatgagatggcggcgaatactcagcaggcaaaggccacgcgggataaattcgctaaagagtatcagcgttacgcacgtggcagccaggcgaaagtaaacccgttttcagaacgcgatatcgatgtggcgcggcaaaattatctggcgcaggaagccttcgtgaagtcatcggcggcggaacaaaaacagatccagagccagctggatagcctggtgttgggtgaacattctcaaaatcgcagcctgaaagcacaggtcgtggaagcaaaatataacctttatcagacgatagtgcgtgcgcccagcaatggttatgtgacccaggtactgattcgtccgggtacctatgccgcgtcgctgccgctacgtccggtgatggtgtttatacccgatcagaaacgacaaatcgtggcgcagttccgtcagaactccttgctgcgactggctcctggcgacgatgcggaagtggtgtttaatgctctgccagttcttcagctggcctacgcagtcatccatccacgccccgccgcgcttgttttcacgggcatacagatcgaggtagaagctaccgcgcagttcgttattttcgtcatacagttcgaccgcatcccacggcacaccgctgataccggaaacaccagcggtttcgatgcgggtcagcatatggtgcaggccgtgaccgaactcgtggaagagggtgatcacttcgtcgtgagtgaacagcgccggtttaccatttaccgggcggttgaattgcggatcgtcctgtggcatatgagcgaaggcttggattaa

SEQ ID NO: 143381 - DNA, 747 bp, Homo sapiens
atgaacgaggacaaaggttttcgaagccttttgcaccgtgccgtccaatttgatatcgccaaacggattcttgggcttaacagcagcgcacgaagcgcgagagatgttgctgctcttgatccattacgttttgagatcgttaagcacagcggacatctggtcgaggatctctgcagacgtgtcatacgatcagttactctgcaagtcttgctgcgcttcgttgacagcgcatcggcaattttgccggtgtccatttttagttcaccgttacgatcgccagttttaacgcttcgacaccgcagggacgtaatgaatgataatgccctttgcgcgtcggtgactaccggcacggtgatttccggttttttgctctctttttcggcacgcgaccaaaggtgtccgccgccatttttgccaactccggcacggtttattactgtaaataaccgccttcatcaaattggcggaatagtactctcgtggaaatctttcagcgcctgctgcaccggattaccaggtttgtccttaaagtttcgaggttaccaccagaaaactttgaaccggggtgtgccggttcatggtttctgcgctgacctgtgccatgcgcatcccgtcacgcgtagcgccatggttaattcagcgttcaccggattacgctcacgttcggcatattcttgtcgagcaacggtccggcattgcatcggccagggggctaccgacaggcaagcggtgtctcaattccgatga

SEQ ID NO: 143382 - DNA, 1229 bp, Homo sapiens
aatgaggaataacccatgagtattgatcgcacttcgcctctgaagcctgtaagcaccgttcaaccgcgcgaaaccactgacgcgccggtaacgaacagccgggcggcaaaaacaaccgcctccaccagcaccagtgtgacgttaagcgacgcgcaagcaaaactgatgcaacccggcagcagtgatatcaatcttgaacgtgtcgaagcgttaaaactggcgattcgtaacggtgaactaaaaatggaccccggcaaaattgccgatgcgttgatcaacgaagcgcagcaagactcgccgcccaactgatcgtatgacacgtcttgcaaagaacctcgaccagatgtccgctgtgcttaacgatctcaaaacggtaatggatcaagagcagcaacatctctctatggggcagatcaacggcagccagttgcaatggattacagaacaaaaaagctcactgctggcgacgctggattacctcgaacagttacgcaggaaagaacccaatacagcaaatagcgttgatattagtcaacgctggcaggaaattactgtgaaaacgcagcaactacgccaaatgaatcaacataacggctggttactggaaggacagattgagcgcaatcaacaggcgctggaaatgttgaaaccgcatcaggaaccgacgctatatggggcgaacggtcagacctcaacaacccatcgcggcggtcaaaagatttcgatctgaagattatctccggcctgcactgcagcccggaatgcattgttacaccgtccggcgggcaaattctgtaactttgaagcccagtaccgccagtgcagcgaagtacgcggcaatccccgccagcacgaccgccattaaacgcagtaaacgccagggcatggtacccaatgaccactccggcatgatatgtaacatacctaaaagcacgccagacatcaccagtaccgccaccaccagacgcaacagaaacgccatccagccgggttgcgggcgcatcaaacgcggtaaatttaccgtactggaacagcgaaacggtcaacggaccggaaagaatgcccaacgcaaccgcactcggcagcgccaacaggaaacaaagacgcaacccccagtccatcaaacggttgtattcatcatgattgccactggcaaaacttttcgacagcgacggggatcctctagatcgacctacaagcagcacctccagagatttagctatatctag

SEQ ID NO: 143383 - DNA, 2469 bp, Homo sapiens; identical to SEQ ID NO: 122987

SEQ ID NO: 143384 - DNA, 1698 bp, Homo sapiens
  misc_feature (1)...(1698): n = a,t,c or g
atgagagcaacacagatcgagagagagccggcgtacggcaacgcagcacggtacagccgggatattcgtaaattaaggaagcaaggcctgattacgcgccatcacggtggcgcgggtcgggtttcaagcgtcgttaatacggcgttcgagcagtgtgaggtttcgcaaaccgaggaaaaaaaagcgatagcagaagcggtggcagactatattcctgatggttcaacaatatttatcaccattggtacgactgttgagcatgttgcccgggcgttacttaaccataatcatttgcggataatcaccaacagcctgcgtgtggcgcatattctttaccacaacccgcgctttgaagtgatggtgcccggcgcgactggcgagcgggaatccgcgcagacacaagaaggcagacacagtgtagctacagcagagcagaaagcaacagttacaacaacgacagagcactgctctaccaccaacctacagaagcggattaaagcggacaccgacggacgaagcgagagctgtaacgacatgcgtcggtaccttgcacacacggcgaacgaacaagaacacgagcagccaaacggccatagtgccgtaggacaaaccgtcgccaatgaaacgacaggatccccaatttcaacggggagtgagcaagaactgcgacgtaaactcgcggcaccgattatgggcaaaaatggcccagaagagattgatgctacggcagaagattacgagcgcgatattgcctggtgccatgaacatggctatctcgatgacagccgatttgttgcgcgctttatcgccagccgtagccgcaaagggcgcatcgcgtgtgaaggtatttcggtattcggcgaggtgttatggcaaggcaatgatgccgatgccgctcagctcgagcagcttgtcgggcagcccgtgcgggtttccgcgctggcgcggttttcatttgctgaacgtcatgcngttgtcgaacgctttgccgcactgctggaagcaataaagccgattaaccgcgattattgccagagaaacggcacaagttgtagcacctcggcggcacacagaccaccaggccagtcagaggacacgagggacacgccaggacgacggaaagcgacaacggcgcagcagagggaggagcacagacgcgagcagagcacgcacacgcagcgacaggtcgatcgggcggcgagcgcggcccatggcgcagaggatacccccataatagaagtggcgctggtggcgttggcgaatctggcggcggtgcggttgtacggcgaaatcgagttctggttcgcgatgatcaaagtcaccacgattatcgtgatgattgtcatcggcctgggcgtgattttctttggctttggcaatggcgggcagtcgattggagcgaacgagcgagtaaggcacatccattacccaaagttagcgcgagaaaggcgtgtacttgtaactgtcactgctcgttgctttcacgactggcttcattggaagtccgcggctcgtcgccagacagacgacaagatgaggcgaggacgacgagcccacaacgaagcgcgagatactcacaccacacgagactggacagcagcactcgagtccccaaacccactacgagagagcgccggacgtgtaaaagaaacaggctctggctcgcgggctcgacagaatgacaagcgtcacagataa

SEQ ID NO: 143385 - DNA, 1447 bp, Homo sapiens
accagataatgttgcgatgacagtgtcaaactggttattcctttaaggggtgagttgttcttaaggaaagcataaaaaaaacatgcatacaacaatcagaacggttctgtctgcttgcttttaatgccataccaaacgtaccattgagacacttgtttgcacagaggatggcccatgttcacgggaagtattgtcgcgattgttactccgatggatgaccaaggtaatgtctgtcgggctagcttgaaaaaactgattgattatcatgtcgccagcggtacttcggcgatcgtttctgttggcaccactggcgagtccgctaccttaaatcatgacgaacatgctgatgtggtgatgatgacgctggatctggctgatgggcgcattccggtaattgccgggaccggcgctaacgctactgcggaagccattagcctgacgcagcgcttcaatgacagtggtatcgtcggctgcctgacggtaaccccttactacaatcgtccgtcgcaagaaggtttgtatcagcatttcaaagccatcgctgagcatactgacctgccgcaaattctgtataatgtgccgtcccgtactggctgcgatctgctcccggaaacggtgggccgtctggcgaaagtaaaaaatattatcggaatcaaagaggcaacagggaacttaacgcgtgtaaaccagatcaaagagctggtttcagatgattttgttctgctgagcggcgatgatgcgagcgcgctggacttcatgcaattgggcggtcatggggttatttccgttacggctaacgtcgcagcgcgtgatatgctccagatgagcaaacgtgggtccgctgataaatctgccgggatcatatctcccgccgccagttttataatatcgccgggcaccagctggtcgatcgatggttcccctcccgttttagtggccccaaccgagtatgtggtaaccagtcatccgccttgtttaaaagagttgatgctacggcagaaggattacgagcgcgttattgcctggtgccatgaacatggctatctcgatgacagccgatttgttgcgcgctttatcgccagccgtagccgcaaaggttatggacctgcgcgtattcgccaggaactgaatcagaaagggatttccccgcgaagcgacagaaaaagcgaagccggaatgtgacatcgactgtaagggacatcaggtagttgccagcagctccctggtaccccataacgacccaactttgttgtttaccaacgccgggatgaaccagttcaaggatgtgttccttgggctcgacaagcgtaattattcccgcgctaccacttcccaacgctgcgtgcgtgcgggtggtaaacacaacgacctggaaacgtcagtacgccggtaccgagctgattcactcgctttgttcaccgtcttgtgctcttggaggcctttttga

SEQ ID NO: 143386 - DNA, 170 bp, Homo sapiens
cttcctccggcaagtacacccggcatggtggagggaatgccagccggcctgctgagtccatgcatgagggagtctgttctttcctgagctttctatgcaccaagacctcagccagggacatgaggtccagctgccccctgtcaaccgcagcctcaagcctaaccagaagg

SEQ ID NO: 143387 - DNA, 3249 bp, Homo sapiens
atgaagattagcaatgaggaaactcttcagagttttaaggcctggaggaaacgctggtttatcctgcggaggggccagactagcagtgacccagatgttctggaatactacaagaatgatggctccaagaagcccctgcgcaccatcaacctgaacctctgtgagcagctggatgttgatgtgactctgaacttcaacaagaaggagattcagaagggctatatgtttgacatcaagaccagtgagcgtaccttttacctggtggctgagaccagggaggacatgaatgagtgggtccagagcatctgtcagatctgtggcttcaggcaggaggaaagcacagcagctgtgttcatccttggtgccgtggctgcttggccccctagcatagacccttgctcctccactggtagagcattcatcttgcaggtcttttggagctacaaggccattgattctgttagcagacatcccactcaccaggagacctgcatgggagctcatcttggagtgcacatagctctgagcccagctgctcccatcagcacctcccccaagaacaagaacccacatctgagcccccggtgtctcactgtgtgccgcccacctggcccatccctgcacctccggggtgtctccgctcgcaccagcacgccagccagagagcagaacatgcaagaatggaaacgactaactcaaaggctgatgggtacacagtgcttcgtgttggtgcccttcatactttcacatgcacgtggaacacctggggagcttgctgagatgcttgttttcatcagcgaacctaggtcagacccctctgctgcagctctactggagtttgctggaggtccactccagactctgtatcaccggcagatatcaccagtggagtatcaccagtggagactacagaacagcaaagatggatgcctgttccttgctctggaagcttcatcccagagcagcacctgccagatgccagctggagctctcctgtatgaggtgtctgtcgatgcctgctgggagatccttccgggctcactcagatggaaggctttgcataaggctttcctggcactcttgaccaccaccagggagggctcatccagatctgtctgcagccgtgtgctcatcccacctgattgtggtggagcaaatccaggtggcatatccaccagagagctgaaaactccaaaagaccaagtgaaaggcaccaaagacaaatacaaacacgaggatcctgcatcttcccctgctctcctgtctgctggtgaagcacagcatgctctagagacgtgttcagttatggaggcccatgctgttggcttggtcttgtgtgtggagaggaatagaaagggagaaggaatgcagaggcccaggaaggaaggctgtgaagctcggtggcccatgttggcagaggagagcgcccacacagaacgtagaacccagttccaaaaccactctcataaagccgaaggctgtagagttgcagagcaagatggacccttggaaatcactgtgacgctgggtcgtgtctggggtgatcaggaaggcacacagagcttatcggtggcagcgctggaaactgccacagctccctcctcattcattgattctctttttactacttgccttatctcccaaaacttacgttttaataattcaaaactttttctttttccgaggagtgccagcttctcccagggttctgaggccccattcatcatgaggagaaacacagccatgcaaaatcttgcccagcacagtggatacagtgttgatggggtcagcggtcacatccatggcttccatagcctttccaagcccagccagcacaatgcagaattcagaggcagcacccacagaatcccctggagcctggcctcccatggccacaccagaggcagcctcacaggctctgaggcggataatgagggtgtgtaccccttcaaggcacccagaagcaccctgttccaggagtttgggggccacctggtgaacaatagtggtgttccggccaccccactctcagtgcaccagattcctaggacagtcacgttagacaagaacctctatgccatggtggtggccactcctgggcccatagcctcccttcccctgcccaaggcaagtcaggcagaagcatgtcagtggggcagccctcagcagagacctttagtcagtgaaagtagcaggtggtctgttgctgctgccatccccaggcggaatacccttcctgcagtagacaacagccgatgtcaccaagcttcctccggcaagtacacccagcatggtggagggaatgccagccggcctgctgagtccatgcatgagggagtctgttctttcctgccaggaagaacgcttgtgggcctgtcagacagcattgcttctgagggcagctgtgtgcccatgaacccaggctcccctaccctgccggctgtgaagcaagcaggcgatgattcccagggtgtctgcatccctgtgggctcatgtcttgttcgctttgacctgcttggctccccactcacagagctttctatgcaccaagacctcagccagggacatgaggtccagctgccccctgtcaaccgcagcctcaagcctaaccagaaggaccaggaagaagagctagagctcaggttccaggctgccatgacctcaccctgtggccttggcccagcacggggttcaaggaaggagtgggataactgggtggggatcagtcctgtgggtctggccacagggaaccagacccagcgagtggcgctggagcctcagcacctcatggtgtctacctgcttccatgccaacccaacaccgcccaacctgagaaacaacagggtcatcaatgagctctccttcaagccacctgtcacagagccctggtctgggaccagccacacctttgactccagctcctcccaacaccccatctccacgcagagcatcaccaacacagactcagaagacagtggagagaggtatcttttcccgcagaacccggcatctgcatttcctgtttccggtggcaccagcagttcagccccgccgaggagcactggtaacatccactacgcggccctggacttccagccgagcaagccatccataggctctgtcacgtccggcaagaaggtggactatgtccaggtggatctggagaagacccaggccctgcagaagaccatgcatgaacagatgtgcctgcggcagtcctcagagcctcccaggggcgccaagctgtga

SEQ ID NO: 143388 - DNA, 983 bp, Homo sapiens; identical to SEQ ID NO: 139422

SEQ ID NO: 143389 - DNA, 1713 bp, Homo sapiens; identical to SEQ ID NO: 120519

SEQ ID NO: 143390 - DNA, 1860 bp, Homo sapiens
atgccggaaacggcagagaatgtagctgaactgttaaaaatctcacgagaagatcaagatagttttgcgctacgcagtcagcaacgtacggcaaaagcgcaatcctcaggcattctggctgaggagattgttccggttgtgttgaaaaacaagaaaggtgttgtaacagaaatacaacatgatgagcatctgcgcccggaaacgacgctggaacagttacgtgggttaaaagcaccatttcgtgccaatggggtgattaccgcaggcaatgcttccggggtgaatgacggagccgctgcgttgattattgccagtgaacagatggcagcagcgcaaggactgacaccgcgggcgcgtatcgtagccatggcaaccgccggggtggaaccgcgcctgatggggcttggtccggtgcctgcaactcgccgggtgctggaacgcgcagggctgagtattcacgatatggacgtgattgaactgaacgaagcgttcgcggcccaggcgttgggtgtactacgcgaattggggctgcctgatgatgccccacatgttaaccccaacggaggcgctatcgccttaggccatccgttgggaatgagtggtgcccgcctggcactggctgccagccatgagctgcatcggcgtaacggtcgttacgcattgtgcaccatgtgcatcggtgtcgctatttgtttagctgacatgttacctgaccttacgatgttagagcgaatgatcgcagcggcaaacgcgggtgcacaggtctgtcttatttgcaatttggttgacgttgcacaagtatgctaccaacggctaaaggagctaaataacacgcaagtagatatagatttgtttcatgcgcgctttacgctgaacgatcgtcgtgaaaaagagaatcgagttattagcaatttcggcaaaaatgggaagcgaaatgttggacggatacttgtcgcaacccaggtcgtggaacaatcactcgacgttgattttgattggttaattactcagcattgtcctgcagatttgcttttccaacgattgggccgtttacatcgccatcatcgcaaatatcgtcccgctggttttgagattcctgttgccaccattttgctgcctgatggcgagggttacggacgacatgagcatatttatgcaacagtcatgtggcggacgcagcaacatattgaggagcttaatggagcatccttatttttccctgatgcttaccggcaatggctggatagcatttacgatgatgcggaaatggatgagccagaatgggtcggcaatggcatggataaatttgaaagcgccgagtgtgaaaaaaggttcaaggctcgcaaggtcctgcagtgggctgaagaatatagcttgcaggataacgatgaaaccattctttgcgtagcgcaggaaattggacgccactggcagcgtcgggcgctccagcctgtaccacctgatgagccactgtttatggcactacttttttccatgttgcgggttcccgatccattgcgggatgcgcatcagcgggacagacaattgcgtcagtctatcaaacgtctggtaaaccattttcgtgagctgggaaatgttcgtttttatgatgaacaggggttatgtgatcagctttatacccacctcgcccaggcgttaaatcgcagtttgtttgccatcggtatgataataccctgccggaagagttcgccagactgtaccccacgcctggtgcgcaccacccgcgcggcgctggccggatttgaaagtgaatacggcgtccatctttctgatgaggaaagtggtctggtcgcggtgattttcggagcccggcctaatgcaggaaaacgatctgcatga

SEQ ID NO: 143391 - DNA, 3192 bp, Homo sapiens
atgctgatccctaccggaaccagcgtcggtctgaccagcgtcagccttggcgtgatccgtgcaatggaacgcaaaggcgttcgtctgagcgttttcaaacctatcgctcagccgcgtaccggtggcgatgcgcccgatcagactacgactatcgtgcgtgcgaactcttccaccacgacggccgctgaaccgctgaaaatgagctacgttgaaggtctgctttccagcaatcagaaagatgtgctgatggaagagatcgtcgcaaactaccacgctaacaccaaagacgctgaagtcgttctggttgaaggtctggtcccgacacgtaagcaccagtttgcccagtctctgaactacgaaatcgctaaaacgctgaatgcggaaatcgtcttcgttatgtctcagggcactgacaccccggaacagctgaaagagcgtatcgaactgacccgcaacagcttcggcggtgccaaaaacaccaacatcaccggcgttatcgttaacaaactgaacgcaccggttgatgaacagggtcgtactcgcccatcgcgcctgtcactggaccgtggtgatttgcttcttcctggtggcgctatgggacgcattttgcacccgttcttcggcattgcgattttcgtcgcactgatgtttatgtttgtgcgttttgtgcatcacaacatcccggataagaaagatattccgtggctgttgaacattgtcgaagtattgaaaggcaatgagcataaagtggcggatgtcggtaagtacaacgccgggcaaaagatgatgttctggtcgatcatgagcatgattttcgtgctgctggtgaccggggtgattatctggcgtccgtactttgcgcagtacttcccgatgcaggttgttcgctacagcctgctgatccacgcggctgcgggtatcatcctgatccacgccatcctgatccatatgtatatggcattttgggtgaaaggatcgattaaagggatgatcgaagggaagcattgtcctgcagatttgcttttccaacgattgggccgtttacatcgccatcatcgcaaatatcgtcccgctggttttgagattcctgttgccaccattttgctgcctgatggcgagggttacggacgacatgagcatatttatagcaacgttagagtcatgtggcggacgcagcaacatattgaggagcttaatggagcatccttatttttccctgatgcttaccggcaatggctggatagcatttacgatgatgcggaaatggatgagccagaatgggtcggcaatggcatggataaatttgaaagcgccgagtgtgaaaaaaggttcaaggctcgcaaggtcctgcagtgggctgaagaatatagcttgcaggataacgatgaaaccattcttgcggtaagtaatctggaaggtggtatttgcttcgaaattacccagatctggcgcatcagctgcgccgaccagccaggctttaaagttcagagtctgcttcgctttgcctttattagtggcagtatctttcacgattttctggtcaatacccatgccgcttttgtaagagttatcgagccgtacaacggtctgggcgatctgcaaaatcgtctgttgcgccatgtttcccccgcttttggcgaagatccgttacgcgtattgcgcgtggcgcgttttgctgcgcgttatgcccacctcggttttcgtattgccgatgaaactctggcgttgatgcgcgagatgacccatgcgggtgaactggaacacctgacgcctgaacgggtatggaaagagacggaaagcgccctcaccatccgcaatccacaggtgttcttccaggtactgcgcgattgcggcgcactgcgcgttttattcccggaaattgacgcactgtttggcgttccggcccctgccaagtggcatccggaaatcgatacgggtattcataccttaatgacgctctcaatggcggcgatgctgagtccgcaggtcgatgtccgtttcgcaactttatgccacgatctcggtaaagggctgacgccgccagaactctggccgcgtcatcatggtcatggcccggcgggtgttcaagcggatgccaaattccgtatgctgccagaagatgtcgataaactttatgtccgcagcgccaacggcgaaatggtgccattctcggcctttaccacttcacattgggtgtatggctctccgcgactggaacgctacaacggtctgccgtcaatggagattcagggggaagccgcgccaggaaccagttccggcgatgccatggcgttgatggaaaaccttgcgtcaaaattacctgcgggcattggttatgactggacgggtatgtcgtatcaggaacgcttatcgggaaaccaggctcccgctctggtagcaatttcctttgtggttgttttcctgtgccttgctgcactctatgaaagctggtcaattcctgtctcggttatgttggtagtgccgttagggattgtcggcgtgctgctggcggcgacactctttaatcaaaaaaatgacgtctactttatggtgggcttgctaacgacaattggcttgtcggccaaaaacgctattttgatcgttgagttcgctaaagatctcatggagaaagaggatgcgcagaaatatctcgccattgcagatgaactgttcggtgctgactgggcagatgcgcgtcactaccgctttggcgcttccagcctgctggcaagcctgctgaaagcgctgggtcacggcgacgaaattattcgtaaaaaacgtgatggtcatgcgctgagcgatgaagaaattcgtttctttatcaacggtattcgcgacaacactatctccgaagggcagattgccgccctcgcgatgaccattttcttccacgatatgacaatgcctgagcgtgtctcgctgaccatggcgatgcgagattcaggaaccgttctcgactggaaaagcctgcatctgaatggcccgattgttgataaacactccaccggtggcgtcggcgatgtgacttcgctgatgttggggccgatggtcgcagcctgcggcggctatattccgatgatctctggtcgcggcctcggtcatactggcggtacgctcgacaaactggaatccatccctggcttcgacattttcccggatgacaaccgtttccgcgaacttaaaccatcgtga

SEQ ID NO: 143392 - DNA, 1347 bp, Homo sapiens
atggggcatttccggctcttttcttatccttacgctcggtaccagtcagcttttaaggaagaggcaccgggcagtgacgtcatcgtctgcgcggaaatggacgaacagtggggctatgtcggggctaaatcgcgccagcgctggctgttttacgcgtatgacagtctccggaagacggttgttgcgcacgtattcggtgaacgcactatggcgacgctggggcgtcttatgagcctgctgtcaccctttgacgtggtgatatggatgacggatggctggccgctgtatgaatcccgcctgaagggaaagctgcacgaccttgcgagccttgaaccttttttcacactcggcgctttcaaatttatccatgccattgccgacccattctggctcatccatttccgcatcatcgtaaatgctatccagccattgccggtgacggagcgtctctgtcccggaccgccccggtctgagaaggtggggagtgcgaaagggccagaagctgaagaggcactgatcgctttccgtcagctggctgaagataactttggtgaaacggaggaagtcgctccacctactctgcgtcccgttccgcctgtttcgggtaaagccttttattatcaaccagttttatgtacggtacaggcaaaatcaaccctgaccgtggaagaagaacaagatcgattacgccaggctattgacttcacgttattagatctgatgacgttaacagcgaaagcagaagccagcgggcttgacgatattgccgcaatcttttctggtcaccatacactgttagatgatccggaactgctggcggcggcaagcgaactccttcagcatgaacattgcacggcagaatatgcctggcagcaagttcttaaagaacttagccagcaataccagcaactggatgatgaatatctacaagctcgctatattgatgtggacgatcttctgcatcgcaccctggtccacctgacccaaacgaaagaagaactcccgcagtttaactcgccaactattctactggcggagaacatttatccttccacagtactgcaactggatccggcggttgtaaaaggtatctgccttagcgccggaagtccggtatcccacagcgccctaatcgcccgtgaactggggattggctggatttgccagcaggatagtcgccataaaggagtaaatattacacgtcattcaaaggtcaccaacatccgccaatatcagtgctggcagcaaacatttttgggtaaggcgcctactccggttcaggggcactctttcgtcgtatttacagcgcacgcatgtgccgaaaagagggcgaatgttgaatgctaa

SEQ ID NO: 143393 - DNA, 1233 bp, Homo sapiens; identical to SEQ ID NO: 139425
  misc_feature (1)...(1233): n = a,t,c or g

SEQ ID NO: 143394 - DNA, 1575 bp, Homo sapiens; identical to SEQ ID NO: 133350

SEQ ID NO: 143395 - DNA, 3594 bp, Homo sapiens; identical to SEQ ID NO: 116845

SEQ ID NO: 143396 - DNA, 846 bp, Homo sapiens
atgaattactctcacgataactggtcagcaattctggcccatattggtaagcccgaagaactggatacttcggcacgtaatgccggggctctaacccgccgccgcgaaattcgtgatgctgcaactctgctacgtctggggctggcttacggccccggggggatgtcattacgtgaagtcactgcatgggctcagctccatgacgttgcaacattatctgacgtggctctcctgaagcggctgcggaatgccgccgactggtttggcatacttgccgcacaaacacttgctgtacgcgccgcagttacgggttgtacaagcggaaagagattgcgtcttgtcgatggaacagcaatcagtgcgcccgggggggcagcgctgaatggcgactacatatgggatatgatcctcatacctttcactgattttgagctaaccgacagcagagacgctgaacggctggaccgatttgcgcaaacggcagacgagatacgcattgctgaccggggattcggttcgcgtcccgaatgtatccgctcacttgcttttggagaagctgattatatcgtccgggttcactggcgaggattgcgctggttaactgcagaaggaatgcgctttgacatgatgggttttctgcgcgggctggattgcgaagtgccggatccgaaaagaagaactaactcgttgtggagaataacaaaaatggtcatctggagcttacaggtggccattcgtgggacagtatccctgacagcctacaaaacgcaattgaagaacgcgaggcatcgtcttaacgaggcaccgaggcgtcgcattcttcagatggttcaacccttaagttag

SEQ ID NO: 143397 - DNA, 3205 bp, Homo sapiens
tcccggacatccctgggatggggaacatcctgcggatgcccaacagaacacggtggacaacaccaccaaatgttccgggtgtcggacattccagggctggacagcgctctctgatatgctgcctggtcaggggctgctgcacgtcgtgcccattcctgaagctatggcgtacgtactgttacgtccgctgcttgatgatgtgccggaggatgaactgtgcggcgtagcgcccggaagagtattgccggtatcagagcaatggcatccactgttgattgaggcgttaaccagcattccaaaactcgaagccggagactccgtctggtggcactgcgacgtcatccattccgttgcccccgttgaaaatcaacaaggttggggcaacgtgatgtacattcctgcggcaccgatgtgcgagaaaaatcttggcttcacgcccaaggggaaggccgcactggaaaaaggcgcatcgccgggcgacttcccgcgcgaggactatgaaacaaactgggaaggacgctttacgcttgccgacctcaacattcacggtcagccagctcccgagtggatgtggggttgggagcggctcttatcagaccaggataaaactcagggaagcgccttcagctgcaccgcaacattccaggacgctcagaagcaattattacaggcgaggttcattcacctctcaggcctgtgggaacaacaggacgggctgtggctttcgaactggctgtcgctgaaaggccagatcggaggacctgctctgactgaaccacttcgcctttcagtgaacagagggacttggccaccgaagctccgagacgcccggaggcgcagcgctggacgcgctgacaggcgagcgcccacgcctgagggctccaggagccccccgctctctgaggccccgaagctgagctccgaagaactggatacttgcattgaggaagcagcaaacaaaggcatggaagaaactacaacaacagaaggagcaggatctactgcagagaggagctgcacttacggccccgtggggatgtcattacgtgaagtcactgcatgggctcagctccatgacgttgcaacattatctgacgtggctctcctgaagcggctgcggaatgccgccgactggtttggcatacttgccgcacaaacacttgctgtacgcgccgcagttacgggttgtacaagcggaaagagattgcgtcttgtcgatggaacagcaatcagtgcgcccggtggcggcagcgctgaatggcgactacatatgggatatgatcctcatacctgtcagttcactgattttgagctaaccgacagcagagacgctgaacggctggaccgatttgcgcaaacggcagacgagatacgcattgctgaccggggattcggttcgcgtcccgaatgtatccgctcacttgcttttggagaagctgaatatatcgtccgggttcactggcgaggattgcgctgggttactgcagaaggaatgcgctttgacatgatgggttttctgcgcgggctggattgcgaaaaagtaaaccttggtctggataataatacctggggcggtggtttttccaaatattgtctggttcctggtgaaattctcaaaattcatcgtcatgcgttgtgggaaatccctgatggtgttgattatgaggacgcagccgtacttgaccctatctgtaatgcctacaaatccatcgcgcagcaatcgaaattccttcctggtcaggatgtggtcgtcatcggcactggcccactcgggctgttctccgtacaaatggcgcgaattatgggggcggtaaatatcgtcgtcgttggtctgcaagaagatgtggcggtccgcttcccggttgcaaaagaactgggtgcgacggcagtagtaaatggttctaccgaagatgtggtggcgcgctgccagcaaatttgtggcaaagacaatctgggactggtgattgaatgctccggtgccaatatcgcactgaaacaagccatcgaaatgctccgcccgaacggggaagtgatggcgggcgcgatcggcgtcacgcttggcttcctgctggtgcaaattatcaacaccattctgagttacttcgtgatgattaaaccggttcttggttccagttatcgccagtacatcctgagtttatggctgccgttttatctctcgctgccgacgctggtggtcagttatgcgctgggcattgtgctgaaagggcaactggcgctggggatgctgctggcggtgcaaatagccacgggggtgctggcgtttgtggtgatgattgtgctgtcgcgccatccgctggtggtggaagtgaagcgtcagttttgtcgcagcgaaaaaatgaaaatgcttttacgggcgggcaccagacggcgtgggctctactctctctcggaaatggatgacccacaatgggtcggcaatggcatggataaatttgaaagcgccgagtgtgaaaaaaggttcaaggctcgcaaggtcctgcagtgggctgaagaatatagcttgcaggataacgatgaaaccattcttgcggtaacgagggatggggaaatgagcctgccattattgccttatgtacaaacgtcttcaggtaaacaactgctcgatggccaggtctacgaggacctaagtcatgaacagcagtatgaggcgcttgcacttaatcgcgtcaatgtacccttcacctggaaacgtagtttttctgaagtagtagatgaagatgggttactttggctggaagggaaacagaatctggatggatgggtctggcagggccgtgaccgtgaaaccggcgaagtgaaatttacggccagccgtgcggatctggtgtttggttctaactccgtcctgcgtgcggtggcggaagtttacgccagtagcgatgcccacgagaagtttgttaaagacttcgtggcggcatgggtgaaagtgaactcggcgctggtgtcgatcaatccgcaaaacggtgccgttatggcgctggtcggtggctttgatttcaatcagagcaagtttaaccgcgccacccaggcactgcgtcagcaccctatagctgtttccactccctctggccttctcacagttgcacttgctggtcacttgcactacaccgtgaactcctcaagggcatggactcttcctgtggaacactgtgttcccagtgcccagtgcctggcacacgaataa

SEQ ID NO: 143398 - DNA, 634 bp, Homo sapiens
atgcctccatcattacgaaaagccgttgctgctgctattggtggcggagcaattgctatagcatcagtgttaatcactggcccaagtggtaacgatggtctggaaggtgtcagctacataccatacaaagatattgttggtgtatggactgtatgtcacggacacaccggaaaagacatcatgctcggtaaaacgtataccaaagcagaatgcaaagcactcttgaataaagaccttgccactgtcgccagacaaattaacccgtatatcaaagtcgatataccggaaacaacgcgcggcgctctttactcattcgtttacaacgtgggtgctggcaattttagaacatcgacgcttcttcgcaaaataaaccaggtcgatatcaaaggcgcatgtgatcagctgcgtcgctggacatacgctggcggccgcaccacaaccgcattacttcacgcgagagacgtattcaccagagcgggtatccactttgatgacttcgccgatttgtacaaacagcggaactttaaccacagcgccagtagacagggtagccggtttgccaccagtacctgcggtatcacctttcaggcccggatcggtatcaacgatttccagttcaacgaagttcggcgga

SEQ ID NO: 143399 - DNA, 1428 bp, Homo sapiens; identical to SEQ ID NO: 139187

SEQ ID NO: 143400 - DNA, 2610 bp, Homo sapiens
tcattgatttttcctctgtagtgaagcaaccgcgcatccgccaaaatccagttcattgtttgcgccgaatctcaggcggcaggccgttaccgttcccgggcaaaaatccagcgaaggatcgtctaccggattattgtctttgtcaaaataaccattttgcccgttgtatccgcagcctttccctgttttataccaccccctttgcgcccaatagcatacgctttgtgtgagtcgagacgggatcatgatgccgtccatatcgtaaggtgatgtgagatcgaaccgcgcaacgcttttatcaacatagttcggacgctcgatatagtataccagtttacggtaagctccatcagcgattgagccatcggagttaataagctcacgctgagttatccagatagtcaccttagcttgcattagtccgttatatgcacgaatcatcgcagatactcgactatcaatgtttgccaccgttaattgtggttttgttgcctttccggaactgtcaaacgagatcccggatataccgaacggtcgcgccccgtatttctcgccacggaatgtaatttccttcggcggtagcgttccagtttgctgggcctgcatgatttcttctggagtgtactggatattctcaccgtggaatcggtacacctgagcgccgaacttactaccatcaacttcgatgagagtgattatctctcccggatatagtgattgaaggcagttgtgaaacaggctctttccgctttcttcatcataaagttttttgttttcgctcattgatttttcctcttgtttaccgtccggcggcgtccatgcgaacggcttaatgcggtgagagtcacagaagtcgtaaacagcaatgaaatcttccccggcatagacaactgaatactcgcgtcgagtggtgttaaatccagacgatgcaagctgcatgtagcccgtaccaaactggattgagcggtcattgttggtagtggtaagggagccgccgcccccttgaacctccattccactaacgtcaacgaccgttccacctcctgaatggtttaccacctttggagccgagtttgatgcgttgaatccagatgttgccacgctacccgctccagagttgatgtaatcagtggttattttagccagttccgcttgtcgttccatttcgcgcgtgctaagaccgcgtgacgcgttaagctgttccgtcgccgccgtcatctcattgacaaacttcagtgacttgtcggtaagtgcgttcaattgctgttgcttaacaatctgatctccaatctcagccttctgtttggcaagctcgataactttctcctgacttgccagtaatgctttttcttccgcagataattgacgttttgaactagcctcgcgaagaaccgcgatcgtagcctcggtagtaaacaacgcctttctctgtgcggaaagtttttgcccgatctccttgtgctcctgcaataccttaagttgagccttgagtgaaattaactccttgtcgaattgctctgtcggtgagcgtacaattttcgactgcttatttcgttctcggtttcgcttctcgatctcttctgcttctttccttattgcttccttagtttcctcgctgtactgcttttcaagagtgcgacgctgcttcatcgcttcaacgtatcccatctcgcctttttctacgcgagcgttaatagcatcaagctctgaagccaactgatcgtagttgtcgcgagaactttttacaatattctcctgctccttcagtacatcagcgccgaagtcactcattccaggcagtgactgagttgcctttatggctgaggcgataaagtttgagatgtactcatcacccttcgcaagaatcattttaacttgaatcactgtgccctgaacaacgtcgataatcaggtttagcgccccaagtgtatgatcaccaacccatccccacgcgtccgaagcccattgtttaatatcgctccacattttttccaggggtgtggagttatccgcgatcgacttcattcgcttttccattacgtcggcgaataatttcgttgcttcagatactgcttcgggttcacccttcgtgcggcttaacgtgtcgatataggtcagtttacctttttcaaggaagttatattgttcggttaagatctccagacctgtgaccggatccgtttgcgagttttgtccaacgtcagcaatggatttggggttggtgaatgtgccaggtgggttggcaagcaacttcttggggtcgggcgttaattgatggttgcctgaatcgagcggcctggggtggtaacttagctgggaaacttcggcgaaattgcggtgtaaacaaagctgcggcgaaaaacattccccaatgggggtggaagagttgcgttggcttgggtgcgagagttgttgtgtggaggacctgcgaatccagaagagcgtgcagagctcggtaatgaggcaggcagttaaagcctgcagagtcgccgaaaaaaaagggcggattccggagaagaagccaagtataattgggcgtcgagtgtaggggcgtaaaacgagggattgttgccaacgtgtagcttcattgatccttgtgtggcgggccat

SEQ ID NO: 143401 - DNA, 1206 bp, Homo sapiens
atggcgtggcacaaagagcacggcgtagaattacgcgatcgacgattgaattttgaatggtggaaacctgagtatggaattaatctctatcaggattattacaagcaagatggcttcgttgagattccagatcagaataatccgtcattaggtgatatggtaatcatgcagatagggcaaaacgttccggtatggaaccacgcagggatttacctcggtgataatcagatcttgcatcacgccttcggatctcaaactatgaatgatgtaaaattaatcaaactatccggttcgcttgggagacgcttcggcgtctttcacagattcgctgttgactcttacccggaagctatccgggcgctatccagtcagaacgcagctaatgcagaggcagcaattgagaacgcactagctaatgacaaagacgcgatctacatgaagaaggagaacggaaaacgaaaagcagagtacaccaaatcactgaagctaattgctgatgagactgaggcgcgagtaacagcagttgagcagttaagggcaagttttggtgatcagattagcgcaagcaatagcgaattgcgtgaagttatcgcaactgaaaccggagcgctatcgcgtgaaattgaccaactcaaggcagagattggtgatgatattcaggcaagtttgactgatatcagagaggctatagcaaacgagactgaggcgagaacgcaagctgacttgtcattaagcgcgaggcttgggaataatgaggcagcactttctcaaaaacttgattcgtggagcaatgcggattcgactggtgcaatgtacggcgtcaagctggacatctggagcatcggggttctgacatatgtcatgctgagtggggtctcccccttcttggatgagagcaaagaggagacatgtatcaacgtatgcagggtggatttcagcttcccccatgaatacttctgtggtgtgagcaatgctgccagagatttcatcaatgtgatcttacaggaagattttcggaggcggcccacagcagccacatgcttgcagcatccatggctgcagccccataatggcagctactctaagatccccctggacacctcccgcctagcatgcttcatagaacgtcgcaagcaccagaatgatgtgcggcctattcccaatgtcaagagctacattgtcaaccgggtgaaccaagggacgtag

SEQ ID NO: 143402 - DNA, 1109 bp, Homo sapiens
tcattgatttttcctctgtagtgaagcaaccgcgcatccgccaaaatccagttcattgtttgcgccgaatctcaggcggcaggccgttaccgttcccgggcaaaaatccagcgaaggatcgtctaccggattattgtctttgtcaaaataaccattttgcccgttgtatccgcagcctttccctgttttataccaccccctttgcgcccaatagcatacgctttgtgtgagtcgagacgggatcatgatgccgtccatatcgtaaggtgatgtgagatcgaaccgcgcaacgcttttatcaacatagttcggacgctcgatatagtataccagtttacggtaagctccatcagcgattgagccatcggagttaataagctcacgctgagttatccagatagtcaccttagcttgcattagtccgttatatgcacgaatcatcgcagatactcgactatcaatgtttgccaccgttaattgtggttttgttgcctttccggaactgtcaaacgagatcccggatataccgaacggtcgcgccccgtatttctcgccacggaatgtaatttccttcggcggtagcgttccagtttgctgggcctgcatgatttcttctggagtgtactggatattctcaccgtggaatcggtacacctgagcgccgaacttactaccatcaacttcgatgagagtgattatctctcccggatatagtgattgaaggcagttgtgaaacaggctctttccgctttcttcatcataaagttttttgttttcgctcattgatttttcctcttgtttaccgtccggcggcgtccatgcgaacggcttaatgcggtgagagtcacagaagtcgtaaacagcaatgaaatcttccccggcatagacaactgaatactcgcgtcgagtggtgttaaatccagacgatgcaagctgcatgtagcccgtaccaaactggattgagcggtcattgttggtagtggtaagggagccgccgcccccttgaacctccattccactaacgtcaacgaccgttccacctcctgaatggtttaccacctttggagccgagtttgatgcgttgaatccagatgttgccacgctacccg

SEQ ID NO: 143403 - DNA, 1632 bp, Homo sapiens
atgccgcagaaatacagggtaccatcagagaatactgcgaacagcctctacgcaaataaactagaaaatctagaagaaatggatacattcctcgacacatacactctcccaagactaaaccaggaagaagttgaatctctgaatagaccaataacaggctctgaaattgtggcaataatcaatagtttaccaaccaaaaagagtccaggaccagatggattcacagccgaattctaccagaggtacaaggaggaactggtaccattccttctgaaactattccaatcaatagaaaaagagggaatcctccctaactcattttatgaggccagcatcattctgataccaaagccgggcagagacacaaccaaaaaagagaattttagaccaatatccttgatgaacattgatgcaaaaatcctcaataaaatactggcaaaccgaatccagcagcacatcaaaaagcttatccaccatgatcaagtgggcttcatccctgggatgcaaggctggttcaatatatgcaaatcaataaatgtaatccagcatataaacagagccaaagacaaaaaccacatgattatctcaatagatgcagaaaaagcctttgacaaaattcaacaacccttcatgctaaaaactctcaataaattagggaatcatcaatgtaagaaaaaacagacacacggggagccccggacaccgcggaaagcccggaacccgggaagacgagcacggcgtagattacgcgatcgacgattgaattttgaatggtggaaacctgagtatggaattaatctctatcaggattattacaagcaagatggcttcgttgagattccagatcagaataatccgtcattaggtgatatggtaatcatgcagatagggcaaaacgttccggtatggaaccacgcagggatttacctcggtgataatcagatcttgcatcacgccttcggatctcaaactatgaatgatgtaaaattaatcaaactatccggttcgcttgggagacgcttcggcgtctttcacagattcgctgttgactcttacccggaagctatccgggcgctatccagtcaggtagatggatttaaagaatacatgcaaagcgagataggatctcgtagcaagtttgcaatatttgtggatggcgttaacgtgggacaccatgaagaggaaaaattcaagtgcgcgaaagagataagaatcgtaccgatccctactggctctaagacaggaggtctattccaggttgtattgggcgcggcaataatggttgcagcattctatactggcggcgcgtctctagctttaatgggaacaatgtcctcgtctctgtttatgatgggcggcgctatggtgctgggcggcgtgatgcagatgatttcaccgcagcccgggtggcgcaactttgaagttcaatcaagcaagaataaaccttcgtacgcgttcggcggtgctgtcaatacgaccggcggcgggataccctctcccggtcccgtatggatatcgcgccggaggtggcgcaactttctcagcaggttcttatgccgaggatatgagttaaaattaacccgccttgcgcgggttttttttcgcctgtataatgagtccaccgataaatag

SEQ ID NO: 143404 - DNA, 8046 bp, Homo sapiens
atgaatcaagaaactttaattgcagttattgagcaaatgcgaaagctggttcctgcacttcgcaaggttccagacgaaacgctttattcgtgggtagaaatggctgagctatttgtatgccagaagacctttaaagatgcatacgtcaaggcgcttgctctttatgcattgcaccttgctttccttgatggggcgctaaaaggtgaagatgaggatcttgaatcgtactcacgacgcgttacgtcattctccctgagcggtgaatttagccagactttcggagaggtgacgaagaaccagtcaggaaacatgatgctttcgacgccgtggggcgcgacgacgtggtcgattcgcattaatgacaggacaccgtggaggatgccactaatgaactactcacagattgaaaggatggctcgcaaaggcgtggctttcttcaccgatccgtcaagacctatgaacctgataaaacaaggtgaatacggatatgatgaaaacggattcgagatcccaccaatggaaaaggttattccaatatccggcgcgacgcgaagaccgaacgcgcgtgagattgacggggaaactatccgcgcctcagatattttggggatcttcaataatgatcatgaaataaacgaaggtgactatatagagattgatggcgttcgtcatgttgtcgttgacgcccgtccggttcaggcgtcattagagcctgtcgcctatcgtccgattcgtagatttcaaggtgagattgatgcttggattaaggccgctgaaagcacgctagagcacgctatagagatattcgtaagggatgttcacgacgctcttgttagccgctcccctgttgatacaggtcgattcaagggtaactggcagataacttttaacgaaatccctaaccacgcattaaaccgatacgataaaactggcggtgtcgtcagaggcttagatcatatatggctgacgcaatcaagcaggcaaggagacagcaaaatgcactatgagttatcagcggcggcgcgagccgcttttctatcaaagtacagagactttcctcactacatggaaaacagaaatttcacaccgccgaaggatggcgggatgtggctgaggttcaactacattgaaggggatacgctttatctatccattgacagaaagtgtaaatcttacatcgcaatcgttcagatcggcgtagtgttccctccaggctccggcgttgacgaagcaagattgaaagcaaaagagattgctgattttttcaaagatggtaaaatgcttaacgttggttatattttcgagggtgcaatcgtgcatcaaattgttaaacatgaaagcggtacgagtagacacaaaggagacttaattatgcacttaccaaatggcgcacaaattttcgtggaaacctctcgtggggtggaggttgaggcaaccgctatcactaacgcagataatcctgttgctacagttgcatctaagggagacttggcgaaaggtgattacgttattgtaactcagtcaacttgggcaaagatggttagtcgagtgctaattgttactgacgctcaggaaacaagcatcactcttgctggaattgacacctctgatacccttgttttcccggctggcggtacgatgagcttctcaaaaattactggatggactgagatcccttgcgtacaggagattggtcaggacggcggtgagcagcagtattacacttatcagtgtttgtccgacgataaagagcagcagatcccaacgtttaaatctgcggtctcgctaacgtacactttcgcgcacgaatttgataacccgatctaccctattctgcgtaagctggattcttctggtcaggtaacagcggttcgaatgtacgtgccgaaagcgagcgaaatgcgtatgtgggctggcattttgtcgtttaacgacatcccatccactcaggttaacgaaatggaaacggtggaactatccgtatccctgaaagacttcaaacttccggtgacgttcaccatgccaaacggcgaggatgcgactattatttttacagtgcgccacctttccagtaaagaagtgcaagatatgtatgcgaagcagggcgaaatgaatgatagcgatttcatcactaagatcgcgtcaggctggaatctggaagaagaatttaacgaagagaatgcgcgtaaactggtacagtattacccttccgcagcgtacaatctgacagccacttatattaaggcgctcgccggacaccgcgcaaaaactaaaaaaggcggaaaccgccgacagaagagcagttgcgatcgggtgggtctaagtctttctgactatggaagacgaggaaaccggaacgataaatcggcgatgctgaaaatggtgaaagcgtggaatgtttttacgtcaatgctcactcagtggagaagttcaggcgctgaagcttatggtcttgactataatgtcttgcggggttatatggttgataaggtagcaggtctgtcgcttgacgttgatgtgtcaacagtgcagcgcgccgtcaagtcgctgaaagagttttcaaaggccaacgaccaggccgctgattctatgggttctttaatcaatgagtcagaggttgcaaaacagaaggccaaagaacacgctgaacaactcaagcgccagagaaaagagtatgaggccgtggagaaggcaatcgatcctacagtatcaaaaatggaaaggttgaagattgcatctcagcaacttgataaactctggcagcagggagtcgttccagatgagacatttttccgtttgggtgaaatgctggatctgcaaaacgcaaaacttgctcgcagccgggctatgcttacggaagaaggtcaggcggcattgcaggaagcgaaagcaaaagagcaggcggcagcacgaagcaaggcgttcatggatgccctgaatggtcaagttaacgcgatcggcaagactcatgctgaattgatggaactgaaagcggctgagcttggtttatcgaaagaagcagcaccactaatcgcaaaacttaaagatcaaggccgggctatgaatgcagcaggtattagcgccggggaatacagacaggcaatgagaatgcttcctgcgcagatcacagatgtcgttacatctcttgcatccggtatgccagtatggatggttgctatccagcagggcggtcagattaaggattcgttcggcgggatcggtaacacgtttaaagtgttgctgagttatattaatccggtcacggcaggtgttggcgttcttgttggttcgttaggtcttctggcgaaagctggttatgactcttacaagtcaataactgatattcagaatgcgcttattgagactggaggttatgcaggtgttacggctgaagatcttgattcagtgtctaaaaagatcgcgcagacaagcaactcaaccattgggagtattcgcgagattgtaacggagttggcgagttctggtaagtacacccgcgagcagatccagaacatcactaaggcgacggcagagtggtcggcagcaactggaaaatcagcaagccaaatcattgctgagttcgacaaaatcgcaagcgatccggtcaaaggtctggagaagttaaacgaacaatataacttccttgaaaaaggtcaactgacctatatcgacacgttaagccggacgaagggtgaaaccgaagcagtatctgaagcaacgaaattattcgccgacgtaatggaaaagcgaatgaagtcgatcgcggataactccacacccctggaaaaaatgtggagcgatattaaacaatgggcttcggacgcgtggggatgggttggtgatcatacacttggggcgctaaacctgattatcgacgttgttcagggcacagtgattcaagttaaaatgattcttgcgaagggtgatgagtacatctcaaactttatcgcctcagccataaaggcaactcagtcactgcctggaatgagtgacttcggcgctgatgtactgaaggagcaggagaatattgtaaaaagttctcgcgacaactacgatcagttggcttcagagcttgatgctattaacgctcgcgtagaaaaaggcgagatgggatacgttgaagcgatgaagcagcgtcgcactcttgaaaagcagtacagcgaggaaactaaggaagcaataaggaaagaagcagaagagatcgagaagcgaaaccgagaacgaaataagcagtcgaaaattgtacgctcaccgacagagcaattcgacaaggagttaatttcactcaaggctcaacttaaggtattgcaggagcacaaggagatcgggcaaaaactttccgcacagagaaaggcgttgtttactaccgaggctacgatcgcggttcttcgcgaggctagttcaaaacgtcaattatctgcggaagaaaaagcattactggcaagtcaggagaaagttatcgagcttgccaaacagaaggctgagattggagatcagattgttaagcaacagcaattgaacgcacttaccgacaagtcactgaagtttgtcaatgagatgacggcggcgacggaacagcttaacgcgtcacgcggtcttagcacgcgcgaaatggaacgacaagcggaactggctaaaataaccactgattacatcaactctggaggtagtgagggagacgaaaaactccagaacatgattaaggcgcaaaatgattactacgctgcggaagatgccaaacgcgctgactggttggctggcgctgaaagcgcattcgctgattacgagggtggtaatttcaaagagctatacaagaaaaaattcggcactgtactagcgaaaaaccgcgcgatgacgccagaacaactattcgatctgtcggtgaagtatttcgaatgggccgaggacaacgcgataaaggcgtcagaatcagccagctttcagggtggcgtttatgaatcgcttgttcataagccgcgcgtcttcacctggaccggataccgactatttatcggtgcaagcgaggccgcaatcattaagtggaagcgtgaggaagaatacagtgaggttatggagttcgtggaatccgtaatcaacgagcaaaaatttcagcttgccgcaaacggcgttattaacgcctcatttatcggcaaggatctcggaatcgacaagccagcttcaataaacatcgaaaactcggcagcttcagcgtcgaccgctgtcgccactactgaggaagcaatgaaagaggctaagttggcgatcaagaaaatgagcgaggccaatttcgaaaaaatgattcggatctggtttcagcttatgcaggctcagcagttccagcctaactggcatcacctttacctatgtcacgaagtggaggaaattattgcaggccgacgcggtaacactatctttaacgtcacgccaggctccggtaaaactgaagtgttctcaattcaccttccggtgtacgcaatgctcaagtgtaaaaaggtgcgaaaccttaacgtatcgtttgccgacagcttagttaagcgcaacagtaagcgcgtccgtgagattatcagcagcaacgaatttcaagagctatggccctgcaaatttggcacatcgaaagacgaagagatgcaggttcttaacgaagacggaaaggtttggtttgagctaatctccgcagcggctggtggtcgtattactggttcgcgtggtggctacatgactccgggattctccggcatggtaatgctcgacgatatcgacaagcctgatgatatgttctcaaaggttaagcgtgagcgtacgcacatgctattgaaaaacaccattcgatcccgtcgtatgcataacgagacgcctattattgcaattcagcaacgactacatgctcaggattcaacatggttcatgatgaatggcggcatgggtatcgagttcgaccaaatatcaatcccggcgcttgttactgaagaatacggaaagacgcttcctgactggttgcagccttactttgagcgagacgttttgtcgtctgagtatgttgaattggacggtgttaagcattattccttttggcccagcaaggaaagtgtgcacgacctgctagctttacgagaagcagatcagtatacctttgattctcagtatcagcagaagccgatcgcgctgggtggctccgtgtttaactcagagtggtggacttattacggcaacagccttgacgctgatgagccagatcctggtaaatatgattaccgattcatcactgccgataccgctcagaagacaggcgagctaaacgactacacggtattttgtttgtggggcaagaacaatgataaggtttactttatcgacggcattcgcggtaagtgggaagcgccggatatggagaggcaatttacagctttcgtcaatcaggcatggaggcacaataaatcaatgggggtacttcgtaaaatctatgtggaagataaggcgagcggtacgggcttaatccagaacctaaggaaaaagactccgatatccatcactccattgcagcgtaacaaagataaagttacccgagctatggatgctcagccagttattaaagccgggcgtgtggttctgccagaagagcaccctatgcttgctgaaattatcgctgagcacagcgcctttacttacgatgacacccatacgcatgatgatatcatcgataacttcatggatgcggcgaacatagaattgctgaccattgatgatcctatcgagagaatgaagcgactcgtcgggatggctaagcggtcattaatgagatataatcatggctgtcaattgaccgccctttttattggaggaaacatgaaaattgttaagcctgatggatataacgatatttttaacggcggtgcagaccgatcgcctaagccatcctttagtctgaagcatcatatcacgtcggatctttctacaacgacaacgcaaccgcggagcgaattgtggatgttattcccgaagagatgccacacaggagatggggctacaacgctaccaagcgctcacgatacgtgcatgtgcaatgagatggaagtgacttggattattgttagcgtaccggaaggagatatgcgatttgtgaagccggagaaattacttctgattggtcgtccgtggtcattaggatcattcgactgttacggtcttgttatggcgtggcacaaagagcacggcgtagaattacgcgatcgacgattgaattttgaatggtggaaacctgagtatggaattaatctctatcaggattattacaagcaagatggcttcgttgagattccagatcagaataatccgtcattaggtgatatggtaatcatgcagatagggcaaaacgttccggtatggaaccacgcagggatttacctcggtgataatcagatcttgcatcacgccttcggatctcaaactatgaatgatgtaaaattaatcaaactatccggttcgcttgggagacgcttcggcgtctttcacagattcgctgttgactcttacccggaagctatccgggcgctatccagtcaggtagatggatttaaagaatacatgcaaagcgagataggatctcgtagcaagtttgcaatatttgtggatggcgttaacgtgggacaccatgaagaggaaaaattcaagtgcgcgaaagagataagaatcgtaccgatccctactggctctaagacaggaggtctattccaggttgtattgggcgcggcaataatggttgcagcattctatactggcggcgcgtctctagctttaatgggaacaatgtcctcgtctctgtttatgatgggcggcgctatggtgctgggcggcgtgatgcagatgatttcaccgcagccgggtggcgcaaactttgaagttcaatcaagcaagaataaaccttcgtacgcgttcggcggtgctgtcaatacgacggcggcgggataccctctcccggtcccgtatggatatcgcgccggaggtggcgcaactttctcagcaggttcttatgccgaggatatgagttaa

SEQ ID NO: 143405 - DNA, 879 bp, Homo sapiens
atggcagaaggcaaggaggagcaagtcacatcttacatggatggcagcaagcaaagggagagcttgtgcagggaaaatcaaccttataaaaccatcagatctcatgagacttattctcaccgtctgcccgaccattacccctttcggcctgccggtggagccagagcgcaagggattgtccagatgattggcatttttatcgacaccctggtcatctgtacggcaagcgccatgctgatattactggcgggtaacggcacaacctacatgccgctggaaggtattcagcttatccagaaggcgatgcgggattattacaagcaagatggtttcgttgagattccagatcagaataatccgtcattaggtgatatggtaatcatgcagatagggcaaaacgttccggtatggacccacgcagggatttacctcggtgataatcagatcttgcatcacgccttcgaggagttggacaagctgatctccgaccggcctgaaagctgccggcgccccggcaaaccgggggaaccagaggcccccgtgctgactcacgccaccacagtggccgtggcgcatggctgcctggctgtctcccagctcccaccccagccactgatgaccctgtccctgcagtcagtccccctgcaccaccaggtccagccccaggcacatcttgctccagactctccagcaccagcccagaccccgccactgcacgccctgccggacctcagccccagcccgctcccccaccccgccatgggaagggctcctgtagacttcatcaacatcagcaccgacatgaacactgaggtggatgccctcgacccgagcatcatggacttcgctctgcagggtgaggctggaggaatggagtga

SEQ ID NO: 143406 - DNA, 3429 bp, Homo sapiens
ctaacacattagagtacttccatttgctccaccggtaattgtcacagttgtgtcgtctcctctagctgtacttgttacactgccaaaagtgacgtcaggaatcctcaggcgaccactcgcatccctaacagatattgtggtattagtttgcttcattgcaccctcaacgtcacttccgtagttttctaatgttccacccttgtcaagcctccatccggactggttaaatacatagttattcgactgaatcgcgttaccaatcattgcgttagtaataaatccatcctttatgatcgcgctacttagaataacttggccattctcaacaacgaatgggtactgagtctgaccattcatccctgtcattattgcaaatcgtgatgcctcaaacaaaatctgcgccttaactgctgcgcctgaaccaatcagagacatagccataccggcactgtattcttggccgttatacttcagacccagcttgacgccgtacattgcaccagtcgaatccgcattgctccacgaatcaagtttttgagaaagtgctgcctcattattcccaagcctcgcgcttaatgacaagtcagcttgcgttctcgcctcagtctcgtttgctatagcctctctgatatcagtcaaacttgcctgaatatcatcaccaatctctgccttgagttggtcaatttcacgcgatagcgctccggtttcagttgcgataacttcacgcaattcgctattgcttgcgctaatctgatcaccaaaacttgcccttaactgctcaactgctgttactcgcgcctcagtctcatcagcaattagcttcagtgatttggtgtactctgcttttcgttttccgttctccttcttcatgtagatcgcgtctttgtcattagctagtgcgttctcaattgctgcctctgcattagctgcgttctgcgacgcgttgtcggttgcgttatcaacaagccactcgtaacccggcgagttttcgatatcgacagaaatctccccgatgatatcgtcaacgtttgttgatgccatgcctctgacaaaatcagtccagctttgtgtgagtcgagacgggatcatgatgccgtccatatcgtaaggtgatgtgagatcgaaccgcgcaacgcttttatcaacatagttcggacgctcgatatagtataccagtttacggtaagctccatcagcgattgagccatcggagttaataagctcacgctgagttatccagatagtcaccttagcttgcattagtccgttatatgcacgaatcatcgcagatactcgactatcaatgtttgccaccgttaattgtggttttgttgcctttccggaactgtcaaacgagatcccggatataccgaacggtcgcgccccgtatttctcgccacggaatgtaatttccttcggcggtagcgttccagtttgctgggcctgcatgatttcttctggagtgtactggatattctcaccgtggaatcggtacacctgagcgccgaacttactaccatcaacttcgatgagagtgattatctctcccggatatagtgattgaaggcagttgtgaaacaggctctttccgctttcttcatcataaagttttttgttttcgctcattgatttttcctcttgtttaccgtccggcggcgtccatgcgaacggcttaatgcggtgagagtcacagaagtcgtaaacagcaatgaaatcttccccggcatagacaactgaatactcgcgtcgagtggtgttaaatccagacgatgcaagctgcatgtagccgttaccaaactggattgagcggtcattgttggtagtggtaagggagccgccgcccccttgaacctcgccaccctgcgagcaagactcacgaatcatttttttgaacatcatttctacaccctgagaaatccccctcggatctgagccgttgtcaactctaacctccattccactaacgtcaacgaccgttccacctcctgaatggtttaccacctttggagccgagtttgatgcgttgaatccagatgttgccacgctacccgctgcggcagcaagtgatacagcggccccgccggaagatacagatctaaaaacagaagcagcaggcgcaggggttgcctgtgatgccgcagaagcaccagacgaagcccctccagcaaagctccacgtcttaccgcccatcattcctgagatcgtattgaagattaccatttgagcaatcatctttataatcatgctgatgatatttttagcaaagtcagcaaagtttgctttcccggtagtgaggaactgaaccatcatgtccgtcataccgtttagagcacttgatgcgatctcattaacgtttccgtacatatccattgcagagtcgccgtaatcagcgaatgcgctttcagcgccagccaaccagtcagcgcgtttggcatcttccgcagcgtagtaatcattttgcgccttaatcatgttctggagtttttcgtctccctcactacctccagagttgatgtaatcagtggttattttagccagttccgcttgtcgttccatttcgcgcgtgctaagaccgcgtgacgcgttaagctgttccgtcgccgccgtcatctcattgacaaacttcagtgacttgtcggtaagtgcgttcaattgctgttgcttaacaatctgatctccaatctcagccttctgtttggcaagctcgataactttctcctgacttgccagtaatgctttttcttccgcagataattgacgttttgaactagcctcgcgaagaaccgcgatcgtagcctcggtagtaaacaacgcctttctctgtgcggaaagtttttgcccgatctccttgtgctcctgcaataccttaagttgagccttgagtgaaattaactccttgtcgaattgctctgtcggtgagcgtacaattttcgactgcttatttcgttctcggtttcgcttctcgatctcttctgcttctttccttattgcttccttagtttcctcgctgtactgcttttcaagagtgcgacgctgcttcatcgcttcaacgtatcccatctcgcctttttctacgcgagcgttaatagcatcaagctctgaagccaactgatcgtagttgtcgcgagaactttttacaatattctcctgctccttcagtacatcagcgccgaagtcactcattccaggcagtgactgagttgcctttatggctgaggcgataaagtttgagatgtactcatcacccttcgcaagaatcattttaacttgaatcactgtgccctgaacaacgtcgataatcaggtttagcgccccaagtgtatgatcaccaacccatccccacgcgtccgaagcccattgtttaatatcgctccacattttttccaggggtgtggagttatccgcgatcgacttcattcgcttttccat

SEQ ID NO: 143407 - DNA, 2349 bp, Homo sapiens
atggcgacacttgacacttttggttggtgtacgcaggttcaagggggcggcggctcccttaccactaccaacaatgaccgctcaatccagtttggtaacggctacatgcagcttgcatcgtctggatttaacaccactcgacgcgagtattcagttgtctatgccggggaagatttcattgctgtttacgacttctgtgactctcaccgcattaagccgttcgcatggacgccgccggacggtaagatcgggatatgggtagtaaagcctaacagtttgggagcgaagccagtatcacgcgacgtgatggagattaacgtcacgtttatggagcaatttacatctatggactgtagaatggttgcaggtaaacaagaggaaaaatcaatgagcgaaaacaaaaaactttatgatgaagaaagcggaaagagcctgtttcacaactgccttcaatcactatatccgggagagataatcactctcatcgaagttgatggtagtaagttcggcgctcaggtgtaccgattccacggtgagaatatccagtacactccagaagaaatcatgcaggcccagcaaactggaacgctaccgccgaaggaaattacattccgtggcgagaaatacggggcgcgaccgttcggtatatccgggatctcgtttgacagttccggaaaggcaacaaaaccacaattaacggtggcaaacattgatagtcgagtatctgcgatgattcgtgcatataacggactaatgcaagctaaggtgactatctggataactcagcgtgagcttattaactccgatggctcaatcgctgatggagcttaccgtaaactggtatactatatcgagcgtccgaactatgttgataaaagcgttgcgcggttcgatctcacatcaccttacgatatggacggcatcatgatcccgtctcgactcacacaaagcgtatgctattgggcgcaaagggggtggtataaaacagggaaaggctgcggatacaacgggcaaaatggttattttgacaaagacaataatccggtagacgatccttcgctggatttttgcccgggaacggaaaaatcaatgattagtgcaaaaattaaacttgaaattatgactcacgctcaagaagagtatccccgcgaatgctgtggggtagttacccaaaagggacgagtgcaaaaataccatagagtcgataatgttcatcgcgatcctgaaaatcacttcatgatggacgcagtgcaatacgcatgtattgaggacgacgcagactcaaccacgattgcgatcgttcacagccacacaggagatggggctacaacgctaccaagcgctcacgatacgtgcatgtgcaatgagatggaagtgacttggattattgttagcgtaccggaaggagatatgcgatttgtgaagccggagaaattacctctgattggtcgtccgtggtcattaggatcattcgactgttacggtcttgttatggcgtggcacaaagagcacggcgtagaattacgcgatcgacgattgaattttgaatggtggaaacctgagtatggaattaatctctatcaggattattacaagcaagatggcttcgttgagattccagatcagaataatccgtcattaggtgatatggtaatcatgcagatagggcaaaacgttccggtatggaaccacgcagggatttacctcggtgataatcagatcttgcatcacgccttcggatctcaaactatgaatgatgtaaaattaatcaaactatccggttcgcttgggagacgcttcggcgtctttcacagattcgctgttgactcttacccggaagctatccgggcgctatccagtcaggtagatggatttaaagaatacatgcaaagcgagataggatctcgtagcaagtttgcaatatttgtggatggcgttaacgtgggacaccatgaagaggaaaaattcaagtgcgcgaaagagataagaatcgtaccgatccctactggctctaagacaggaggtctattccaggttgtattgggcgcggcaataatggttgcagcattctatactggcggcgcgtctctagctttaatgggaacaatgtcctcgtctctgtttatgatgggcggcgctatggtgctgggcggcgtgatgcagatgatttcaccgcagccgggtggcgcaaactttgaagttcaatcaagcaagaataaaccttcgtacgcgttcggcggtgctgtcaatacgacggcggcgggataccctctcccggtcccgtatggatatcgcgccggaggtggcgcaactttctcagcaggttcttatgccgaggatatgagttaa

SEQ ID NO: 143408 - DNA, 491 bp, Homo sapiens
aaagtttatgatgaatatcgtaagacgaagcgggcggggcggttgaacaatgaaaatcactcctgaacaggctcgtgaggctctggatgcctggatatgtcgaccaggaatgacacaggagcaggcgacgatattaatcactgaagcattctgggctttgaaagagcgcccgaacatcgatgttcagcgtgtcacatatgaaggtggcgcgattgatcagcgagcgcttggcgttaatcgagtgaagatatttgaacgctggaaggctatcgacaccagggataagcgtgaaaagttcacggcgctagtgcctgcaattatggaggctaccactggatgatgaaaagagtgtccatgaacgagtggataatgcccgtattgatttacgctcaaaatactatgttaaacctaaagctgaccatccctggcttacgcgccgaacgcaaagtcatcagcaagttaagcccccgaagttacctaaaaagaagcct

SEQ ID NO: 143409 - DNA, 1065 bp, Homo sapiens; identical to SEQ ID NO: 130116

SEQ ID NO: 143410 - DNA, 2163 bp, Homo sapiens
ttaccgttgcaggagccgcccagagagcggaagaaagacaaataaggggcacaaggaaaaactgtacgccgaatatttattgccggtgtgttcgccgctactgctgactggcgaaaaacccttgaagacaccggaagatctggctaaacatacgttattacatgatgcttcgcgccgtgactggcagataatccgggccctttgcttccccccccgtcggccgtttttgggcctcggaactgtccaagttaaaactgccaatgggcttgggccaatcggacccaatgggttttttgccacctgaaaccttgtggatagaacggtccggtgtggcccaagggttggaatggcccggccaaaagtccgggcaacaacgtggggcccatgacgcctctccatggggtgctttttgtaagcaagtcgttgtctaactgggtcctttggcccggcgtccttccggttaattgcgctctcgctcgttcggggaaacctctcgctggaccgcctgtgaactcttccgaggatggtcacgggcaaaccaacgtttttagtccgtggtagccccattaggactgtgccccctactaccgcttggaaaccgtcaccagggcgctccagggcaaaactcgttcgccgcctacatataatatgtgttcgaattatcttggctccctggttactgtgtcctgtgaagcctacccttcttgtgtactcttccctttgactgggcttcgttttccaacagggttggttggtgtccggtgggcgaaagggccccgggggagttcctacgtgcttttgttgtagcaggtattgttccatgctcagaactccttttagcctggatctgcagctgtggtttgggcagctgcagtggcacccaggagggcagggttcctgcctgcttctggactcacaagcgcaggggcttagtatggctcgtctagctgggggcgttatcgcctgcatgtttggtttatgggtgctgatgggcattggctttatcgcctctatgctccatcttggttcaccaatgcgcgcttttaactcgctcaaccgggtaggggcttcagcactcagtaacgaaatcgccagcggttcgatcttttttgccgtaggcggcatcggctggttgctggcaatgctgaaaaagctgtcaccggcattgcgtacgctgtggctgatagtgacgatggttcttggcgtcatctttgtctggatgatggtgcgtgtgtataacagcattgataccgttccgacctggtacagcatctggacgccgatgggcttcttcctgacgatcattaatttttcactggtgtcatagtccgggcccacgaaagagggttgtggtgtcgcatcacctactacagtgatgttttcttctttaccgccagagacataaatatcttccacaatgtactgcgccagcggaccggacttgcccgtcgagtggatattaatggtgggaatacgtcgtttcggatagatgccgcagcgtaatgtgccgccacagtcgattaccgcgacaccaatttccgcctccgcgggttcaccttctttaaatccgtcaatagcctgccagccagtaagctgtgccagtttgtcaacaatcgcaggccgggtaccggcggtgatatagacgattttttttcccggcgtggctttcagctcaagcgggccgccccagccacccgttcctttttcgatccgaatatgcgtcatgatgttgctcgtctgggcgatgattttgttcgcgccgccaatatcatcttgcactgtgaaggcaaagtggtggtttcgggaattggcaaatcgggccacattggtaagaaaatcgccgcaacgcttgccagtaccggcactccggctttttttgtccatccggcagaagcgctgcacggcgatctggggatgatcgaaagccgcgatgtgatgctgtttatctcttactccggtggcgcgaaggaactggatctgattattccgcgtctggaagataaatctatcgcgctgcggcaaaccgacgtcaccgctgggcctggcggcaaaagcggtgctggatatctccgtagaacgcgaagcctgcccgatgcaccttgcgccgacctccagcaccgtcaataccctgatgatgggtgacgcgctggcgatggcggtcat

SEQ ID NO: 143411 - DNA, 420 bp, Homo sapiens
ggccagtgcacagctagcatgcctgctagctgagtctagaggaacaaagacttacccattacaaacagctggccatagaagcactggccagaaaaattgtgggttgttgtgcgtacggcgagcagccaaaatttacctactatgcacaaacgccgtcaggcaataaacatgtgttggtgaaattcaccgtaccacagcaaaccgcggtcagccaacgttggggtgacctgctaattgctgaatctattgccgcgcaaatcctgcgtgacggtgggatccacgccatcgagtcaacggtgcttgtaacaagtaacaggcaggtattcctcgaagcggaacgctttgactgcaaaggtaacgatggtcgcttgcctattgtgtcgctaaaggcggtacagagagagtttatctattctccgc

SEQ ID NO: 143412 - DNA, 720 bp, Homo sapiens
atggagaagcgaggtctagttgatgcccaatggagttttacccggaaacgtttccggaggggcttccgggttattcgcgcggaggacatacagacgaatgataaacggggacgcgaaacgcggaacgcgacagatagggggatgccatacacacacgatcgacacacaccgcgatacggagggatgcctagtagatatgcaggaacacgggcgggggataaagctgtatgtgtgacagggaccgagcaaggagacaaaggaggcggcaaagcgaactctcgggcagttttgtttcctccttccctcctgcagcccgttcgcctcctctcctgcacacacacgtgcgcgcgcacacatatgcacacacgtgtgaatgcagggtattggccacaccagtttcttctgagctgcggagaccgcttcccgggaagctccgggccggactgggtttcagcggctgctgcagctgctaccaacgcggcctatgtgggactgggcgccggggtcgtggactcaggctcgcggcgtgtctgggagccgctagggtgcttgagcaacgtgtccagctgctgcttctccccagacctgaccccaagtccaggtgtctctgatgcagtggagattgggggccaggaggatgaggactacctgtctagagggaacaacaggattaccatagggaaggaagaagaaaactcagggcaggatattacacagtaa

SEQ ID NO: 143413 - DNA, 2943 bp, Homo sapiens; identical to SEQ ID NO: 142583

SEQ ID NO: 143414 - DNA, 913 bp, Homo sapiens
gtacactgtcagcttcttattagtcatcacccagctgggcttctgcagtgtttattttatgtttatggcagacaatttacaacagatggtggaaaaagcccacgtgacctccaacatctgccagcccagggagattctgacgctgacccccatcctggacattcgtttctacatgctgataatcctgcccttcctgatcctgttggtgtttatccagaacctcaaggtgctgtccgtcttctcgacattggccaacatcaccacccttgggagcatggctctgatctttgagtatatcatggaggggattccatatcccagcaacctacccttgatggcaaactggaagaccttcttgctgttctttggtacagccatcttcacatttgaaggcgtcggtatggttctgcctctcaaaaaccagatgaagcatccacagcagttttcttttgttctgtacttggggatgtccattgtcatcatcctctatatcttactggggacactgggctacatgaagtttgggtcagacacccaggccagcatcaccctcaacttgcccaattgctggtatgtcctgcccacctcaggtgagatagggagagacactggaactgttctggttgtcatagcagagagcacagcaaagctgagccatgaagctggtaatccatcactggaagtgacatatgtctctcctgctcacactgcatcagtcaaagcaagccacatggccgcacctcactccaagggggcagggaagtgcaattctgccatgtgcctggaagtatttggtgaacagcacaaataactgctgtgctacctgatgcagtgaccgtggggattaattggattaatacatagataatgcttagaaaagtgcttagcacgtggtaagcattcatgagcgtta

SEQ ID NO: 143415 - DNA, 3016 bp, Homo sapiens
  misc_feature (1)...(3016): n = a,t,c or g
atgaaggcgtttacctatgaacgagtgaataccccagccgaggcggcacttagcgctcagcgcgtacccggcgcaaaatttatcgcgggcgggaccaatctgctggacctgatgaagctggaaattgaaacgcccacccaccttatcgatgtgaacggcctcgggctcgataagattgaagtgaccgacgcgggtgggctgcgcatcggcgcactggtacggaacaccgacctggcggctcacgagcgcgtgcgtcgtgattacgcggtactctcccgcgccctgctcgctggcgcgtctggtcagttacgtaatcaggcaaccaccgcaggtaatctgctccagcgcacgcgctgcccctatttttacgacaccaaatcacccctgcaaataagcgccttgccccgggaagcggctgcgcggcngcttgaaggctttagccgtcagcacgcggtggtaggcgtaagcgaagcctgcattgccacccatccgagcgatatggcgggtcgcaatgcggttgctggatgcggtggtggaaaccatcacgccggagggaaagactcgcagtatcacactggctgatttttatcaccctccgggaaaaacgccgcacattgaaaccgccctgcttcccggtgagcttatcgttgcggtgacgttacctccaccgctcggcggaaaacatatctaccgtaaggtgcgcgatcgcgcctcctacgcctttgccctggtatcggtcgcggcgattattcagcctgacggcagcgggcgcggaaccttatggtttcctgttagtagtctgaacggagtacacagtatcgcgattggataccagctaaagacatcgcgtgtgtttcatagtgctcccctgtttgctgtgcctgagcctcttgtgaccaaaagctgcaaaggtaacgatggtcgcttgcctattgtgtcgctggaggcggtgcagagtgagtttatctcttctccgggatcgtggccgcaggcaatgcgccgtttgtgtgagcaacaacttgtcactcaccagagcgtggatatcgaagagatattttcgcaattaaccgaagcgacgcgtaaactccaggcccgtagcgccaagggggcgttgacggtcagtttactccccagtttcgccattcattggttggttccgcgactttccagctttaattcagcttatccgggaattgacgttcgaatccaggcggttgatcgtcaggaagataagctggcggatgatgttgatgtggcgatattttatggtcggggcaactggccggggctacgggtggaaaaactgtacgccgaatatttattgccggtgtgttcgccgctactgctgactggcgaaaaacccttgaagacaccggaagatctggctaaacatacgttattacatgatgcttcgcgccgtgactggcagacatatacccgacagttggggttaaatcatatcaacgttcagcaagggccaatttttagccatagcgccatggtgctgcaagcggctatccacgggcagggagtggcgctggcaaataacgtgatggcgcaatctgaaatcgaggccggacgtcttgtttgcccgtttaatgatgttctggtcagtaaaaatgctttttatctggtttgtcatgacagtcaggcagaactgggtaaaatagccgcctttcgccaatggatcctggcgaaagccgctgctgaacaagaaaaattccgctttcgggatcccatatcccagcaacctacccttgatgccaatctggaagaccttctgcctgttcgttggtacagccatcttcacattcgaaggcgtcggtatggtgagatagggagagacactggaactgttctggttgtcatagcagagagcacagcaaagctgagccatgagactacagcatgcagctgcatgcctcttccttttatcgcagtgcgcttgtctgtatgtgtgacagggaccgagcaaggagacaaaggaggcggcaaagcgaactctcgggcagttttgtttcctccttccctcctgcagcccgttcgcctcctctcctgcacacacacgtgcgcgcgcacacatatgcacacacgtgtgaatgcagggtattggccacaccagtttcttctgagctgcggagaccgcttcccgggaagctccgggccggactgggtttcagcggctgctgcagctgctaccaacgcggcctatgtgggactgggcgccggggtcgtggactcaggctcgcggcgtgtctgggagccgctaagggtttttggcaagcgccgcagcccttatgacacgcgagtggactcttccaacggcccttttggggggaaggcccgtgtaaaccccggaccccctatgaacctggtccccgagccaagcctggaggagggaattaaccccactgtaccgtacggactgggtcagcaccccttctccggcggcaaacacgacgcgatcgacgtcattggtcgcacgagccatgaggtcaccggtgccatcacgcagggtacatgcgttacgctcaagtcaaatttggatctagttaacgggtacgaggtagaactgtgtctgtgttgtcatgggtatgtctccgtgaataaaaaacgccagcggcgatggctggcgtatgaggtaataaagcgcgtttgggaaggtgaaatgttggtggtaaatgattcggagtcagcgggggaaggtgtcgcccagaatgcttcagtgattaatatcgtcgcctgctcctgtgtcattcctggtcgacatatccaggcatccagagcctcacgagcctgttcaggagtgattttcattgttcaaaaagcaagtccctgtgagacagtgaagatgacggctgtgcaccaagcctggagagccaccagactgacaggagcaacggaagataaattgacacgcggtagttcgctaaactgccgtgaagtgcggcaccccgtaggtcagacaaggcggtcacgccgcatccgacatccaacgcccgagccggttgcctga

SEQ ID NO: 143416 - DNA, 1174 bp, Homo sapiens
atgcagcgttcatgcactggtgaagagtggtacccatccatattcgaggaatcacgttggtataaattagggttggctgcctacaacagagaactcaagaaacaatggcttatacaagagaaagttttgcttttcttttatgacaaatggggcgcgccgcatgaggaagaacgggcgaaacgactggcggaaggatttgcttatgttgaagtattgccgaagatgagtctggaaggcgttgcccgcgtgctggccggggctaaatttgtagtgtcggtggatacggggttaagccatttaacggcggcactggatagacccaatatcacggtttatggaccaaccgatccgggattaattggtgggtatgggaagaatcagatgtttttctattttggtatagaaagtggggctgatccaacaattgaaactgactctggatataattctatggatctagctgtagccctaggctatagaagattgactatctcttgcgtcgtacccatcgcgcatttctttgattaccctcgggactgcgttttcatgttttctgggctgttaatcattctggttcccctgattgtgggttacctcattccgcttcgccaacaagctgcgttaaaagttattaatcaggtattaagctggatggtttaccttattctcttttttatgggtatcagtctggcgtttctcgataacctcgccagtaacctgttggcgattctgcattattctgccgtcagtattaccgttattttactgtgtaatattgccgccctgatgtggctggagcgaggcctgccgtggcgcaaccaccatcagcaagaaaaactcccgtcgcgtattgcgatggcgctggagtcgctaaaactgtgcggcgtagtagtgattggttttgccattggtctaagtggactggctttcttacaacacgcgaccgaagccagtgaatacacgttaattttgctacttttcctcgttggtattcagttgcgcaataatggcatgaccttaaagcagattgtccttaatcgccggggaatgattgtcgccgtggtggtggttgtcagttcattaattggtggtttaattaacgcctttattcttgatctccccatcaataccgcgctggcaatggcctccggtttcggctggtattctctttccg

SEQ ID NO: 143417 - DNA, 1326 bp, Homo sapiens
atgaaagtgacatttgagcagttaaaagcagcctttaatcgggtcttaatttcacgcggcgttgacagcgaaacggctgacgcctgtgcagagatgttcgcccgcaccaccgaatccggcgtttattctcacggcgttaatcgtttccctcgtttcattcaacaactggaaaacggcgatatcattcctgatgcccaacccaaacgtataaccagcctcggcgcaattgaacagtgggacgcccagcgttcgatcggtaacctgacagcgaaaaagatgatggatcgcgccattgaactggctgccgatcacggtattggtctggtggcactacgtaatgccaaccactggatgcgcggcggcagtaacggctggcaggcggcggaaaaaggctatattggcatttgctggaccaactccatcgccgtaatgccgccgtgggtgccaaaagagtgtcgcataggcactaacccgctgatcgtcgccattcgttccacgccgatcaccatggtcgatatgtcgatgattaagcatacattaccacaacgagccgctggcacagatagaaaactcgctatgtcgcgagaggcacaactgcttgagcgtcatggttatgccttcaatgagttggatcttggcaaacgcgagccggttaccgaggaagagaaactcttcgtagcagtatgccgtggcgaacgtgagccagtgacagaagcagaacgcgtgtggtccaagtatatgacgcgtattaagcgtccaaaacgttttcacaccctttccggcggtaaaccgcagccgggcaagaagattgtgattcgcccgctgccaggtttaccggtgatccgcgatttggtggtagacatgggacaattctatgcgcaatatgagaaaattaagccttacctgttgaataatggacaaaatccgccagctcgcgagcatttacagatgccagagcagcgcgaaaaactcgacgggctgtatgaatgtattctctgcgcatgttgttcaacctcttgtccgtctttctggtggaatcccgataagtttatcggcccggcaggcttgttagcggcatatcgtttcctgattgatagccgtgataccgagactgacagccgcctcgacggtttgagtgatgcattcagcgtattccgctgtcacagcatcatgaactgcgtcagtgtatgtccgaaggggctgaacccgacgcgcgccatcggccatatcaagtcgatgttgttgcaacatgaaaacgccggagtgaaaattctccggcgttttggccgtgaattactgctgcggaattgccggtacagccggaac

SEQ ID NO: 143418 - DNA, 1053 bp, Homo sapiens
ttaatcttctgaggcagtgatggtctgacgcgccagcgctggctgttttacgcgtatgacagtctccggaagacggttgttgcgcacgtattcggtgaacgcatcagcctgcgcgccggttccctgcgtaccattacgcacatcctgctgccgctgctgcgcccggcgatcctctcggcgctgatttacagctttgtgcgcgccattaccaccgtcagcgccattgtgttcctcgtcacgccggatacccgcgtagcgacggcttacatcctcaaccgcgtggaagatggcgaatacggtgtagcgattgcctacgggttccattctgatcgtggtgatgctggcgattattttcatctttgactggctgatcggtgaatcacgtacctcccgttcaaaaagccaaaaaccaggcgtaatggagcgcactgctagtttagatacgaagtttgctgcccaaacgggaatttcttcgcccgttaatgggtgaaccgctttaaagccagtatcgacgccttttttctccatcgtcgccatttcagcttcggcaactttggtgttacggcattcgtcaataaaggccgccagttcaggattattttccgccgctttctgcgccagcggatgacccgcagctaccgccaggtaggtacaacccataaaggtgtccgggcgggtagtgtaaacggtcagcgtgttgtcatagtcgttaacgttgaaggtgatctccacgccttcggaacgaccgatccagttacgctgcatggttttaacggtgtctggccagtgatccagtttatccagatcgttgagcagctcgtcagcgtaagcagtgattttgataaaccactgcgggatctctgttacgttcaactttggtatcgcagcgccagcagcagccgtcgataacttgttcgttcgccagtacggtccccagatcttctgattcggcaggtctggggtggtaccccaggatttgctgatgctgctggttgaggccacactttgagaaccactgtttgagcccaggaggttgaggctgcagtgacccat

SEQ ID NO: 143419 - DNA, 2358 bp, Homo sapiens
ttacgcggcttcaactttccgcactttctccggcaactttaccggcttcgtcgccagctcttccggatcaaagtcatcaacgttaatactgcgcagacggctttcttcagctttcaccagaatagcggcttcatctttatcaatcagccccttcaccagcgcgttgtgcgccagttcatccagacgggtaaacggcaggtttttacccagctctttacagatccgctgatgaattgggtcggcggcaatcacatccaccagcgcctcttccagcaagccaaccggattatgctcgctcggcgtcaggtactgaccgcgaccaatgcgggaacgggtggcgttcggcacttgtaaaatcttcgccactttatgatccagcttgtcagaaggtgccagataatgacgtccggtcgggaagatcaccacattcagcagcccggcaaccacgcggttcgggaagttttgcagtaaatcatccatcgcctgttcagcctgatacagcgcatcttgtacgccccaggcgataccaaacaccatgtcagacgccagcagcgttgcgttaccgtaacgatgcgcggtttgcagacccaccatcccggccatcagttcatgatcgtccgggatacagccccagcccattagcgttgggatcaccggaacgctggtcagttcagcaaactgttgtaacagtgcagctgcgtcagcattaattaccccgcccccggcaacaatcaccggacgttcggcctggattaacatttctacagctttttcgatctgcatacggctggcagcaggtttgtagaccggcagcggttcgtacatgtcaggatcaaactcgatttccgcaacctgaacgtcgaacggtaaatccaccagtaccggacccggacgaccagaacgcatcaggtgaaatgcctgttgcagcacgcgaggcaccagcgccgcttcacgaactgtaaccgccattttgctgaccggtttagcaattgcttcaatatctacggcctgaaaatcttctttatgcagacgggcgcgcgggcgcaacgaatggaacgtctggcgcaggaacatggtggactgcagataacccgcccgaaacgactggcggaaggatttgcttatgttgaagtattgccgaagatgagtctggaaggcgttgcccgcgtgctggccggggcgttcctgattcagcagggcgctcattaaatgaagcggttcgataaattggttgtcgtgctggaaggtggcgaaggtcatgacgtagtactggtagaaatcggcggtacagtaggtgatatcgaatccttgccgttcctcgaagcgattcgccagatggctgttgaaattggccgtgagcacactctgtttatgcacctgacgcgatgaccgtgccctgtctgtggatgagtatttctggcgacacatccgccgcattaaaagcggcaggtcgtaaagtgactcaggcaggctaccctgaagatcatctcgatacgttgtacagtcatcaaaactgtgaagtgactggctgggcgcaaacgtcggtgatgtcacatcagtgcgataccttgccgggtgacagcggttcgcctctgatgttgcataccgatgacggctggcaattaattggggtgcaaagttcggctcctgccgcagaaagatcgtctggcgcgtctcgataacacgggccatttcgccatcaaccactaataaatgcccgttgacataattcgatgccggacttgcgaggaatacggctgcgcccattaaatcctgagtatcgccccaacggtttgccggaatatgatcaagaacgcgctgattggtttctggattactgcgtgtcgccagcgtaatatctgttgcataatagccacgggcgataccatttacctgaatattatattgacctagttcatcacaataagctttggtgaacccggcaagagcatgtttagtggcagaatatgcaggtgaccattgtccacctaagtaagagaacaatgaacagatattaataattttgccgcttttctgcgggatcataatttttgcagcttcatagcttaactcgaatgcggcggtcaggttcacatcaatcatcggatcccagtcggcacgaccgaagtccagcaccttattcagcttacaaataccggcattgttaaccagaatatcaactgtaccgaaacgctcacagcaagcagcgataatcttctgcggcgcgccttctgcggtgatacccacctgcatgaagtccacctcaacaccctgtttttcaatcatttcctttgtttcgccgttatctttgacgaaactaggaataaagatatttgcgccagctttggccaacgccat

SEQ ID NO: 143420 - DNA, 3201 bp, Homo sapiens
tcatccagcagtggaaggggggaagcgcagcacacggcagtttggtgattgttcactttccacacccgcaggcagggcgttatccagtagtgccaggagggcttcgccgttgccggaaagtgcctggattgtgacagtgtcacctaaagctgtaatgcgcagcgcactgtctaccagcagcaggctttttaaatcatctttgctgtcgatatctgcggattccagcagcagcgttgccggacgatccccacacaagcgcaagcgaaagtcccagcgatatccgggcgacgacggtgccaggaagccaccgctggcagcgtcgatgtgcatgtcgatgtcgataccggtatcggcctggaatttatccagcgcatcgtgcagcggttgtgggaactcatagttaccagtgtaggtcacgccgaaagtcggcaccacgccgatggtgttttcgtcacaggcttcaatcatgcgtttcgggtccataaacaactgaccggggcgcatagggatctcacgcagctccacatcccagtagcgggcgaatttatgccagcagatttgtaccggaccgcacaccaggtttggtttatccgttggtttgcctgcagcttccatacgcttgcgccaacgccatttcatcgccatcccgccgagcatacaggcctcggaagaaccaatggtgttggtgccaacggcctgaccatttttcggcgcaggcgcatgccacagatcggcaaccatatttacgcaacgcaggtcgatggctgcggattgcggatattcttctttgtcgatccagtttttgttaatggataaatccatcaatttgtggacattttcgtcgtcccaggtcagttcaggatcgagcgccgaggtaggttcatcaaacagtaaaacttccggttccatcgccagcgcccgcgcgatagaaacacgctgttgctgaccgccggaaagatgcaccggatatttcccctgcgcacgttcgtctatcccgacttttgccagatacttcaccgcccgctcgcgcgcttcctgcttgctcaggcccaacacctgaatcggcgcttccatgacgttttccagcaccgtcatatggctccagagattgaagtgctggaataccatcgtcaggcgtgtgcgcagtaagcgcagttgatttttatcggcgactttgagttgaccgtctttgtcgcgcaccagattgatcgtctggccattgaccacgatcgacccttcactcggtttttcgaggaagtctttagagcacagggcgatatactcactgcgaagcgtctcatgcctggtcgcatctacagattgccgtgcattgtgctcctgttggtgttcctcgtccataaagatcacccgattcgccactttacgggcaaagcccatttcgtgggtcaccaccatcatggtcattccttcgttcgccagttccaccatcacgtccagtacttcgttgatcatctccggatccagcgccgatgtcggttcgtcaaacagcatcgcaataggatccatacacaacgcgcgagcgattgccacacgctgctgctgaccgccggaaagctgcgccggaaacttattggcgtgagcagaaagcccgacacgctccagcagtttcagggctttttcacgagccggcgctttatcgcgtttaagcactttcacctgcgccagggtcaggttttcgataatcgacagatgagggaacagctcgaaatgcgggcccgcttcagagttgagcgcaccgtcaagcattgcggtcacggcatagcgccctttagatgtcagtttcatgtcttccttcacctcaaactcgcccttgactgatttagtcgggtatttaaccttcagtgccatttttttatcgtggcgtttgtccctgttgtcggatgcggcgtgaacgccatatccgccctggggttctgtacactgtaggcggttctgttcactgtaggcctgataagacgcattacgcgtcgcatcaggcaacggctgtcggatgcggcgtgaacgccttatccgacctacggttctgttcactgtaggcccggcaccctgcggcacattgccgctgatcaccatgtccacgccgccgaagctgttgttacgcagttgcagatgtttcaccacgccacgaacgtagttagcccattgatagttttcatgtgcgacaatgggcgcatcgagggaaaactcgtcgagctgattttcataatcggctgccatcacgcgaactttacggtcatcgcgtggtgcacaactggatttgccccttatgcggaacatatgcttgaagtgatgtcttctattggcgattatacaaaccgcgtccggcatcacgtccggtgacgaaatttgatcaacgtggtcatcgtcttggtcacggagtatggaacttaatgttcgagagggtgaaataatggcaaagaaccgtagccgtcgtcgaacaaactggcctttgacggcagcggttatctggcctgggaaggtctgatctgcatgcaggaaatcggcaaatgcaccgaagaacatcaggcgattgtgcgtaagtggctggaagagcgcaaactggatgaggtacgcaccagcgaacttttcgacgtttggtgggagttgcaacaacatcgacttgatatggccgatggcgcgcgtcgggttcagccccttcggacatacactgacgcagttcatgatgctgtgacagcggaatacgctgaatgcatcactcaaaccgtcgaggcggctgtcagtctcggtatcacggctatcaatcaggaaacgatatgccgctaacaagctggtgttgggtgccgctcgcgtctggttattcccccatgccgatggtgctgtcgataacagcatgatgtgggtggtgtcgatggcggtagcaggatgcttgtttgtcattcccacggcagcagaaattccgattgtacaaacgatgatgctggcaggtatgggaaccgctccggcgctggcattgttgatgacgctcccggcagtgagtttgccgtcactgattatgctgcgcaaagcgttcccggcgaaagctttatggctgacaggggcgatggtggcagtgtctggtgtgattgtcggcgggctggcgctgttgttctgatttgagggaaaacatgtcggatgcggcgtaaacgccttatctgacctacggtttgtatcgttgtaggc

SEQ ID NO: 143421 - DNA, 3812 bp, Homo sapiens
ttccacattaagcttgtgctcactggggccacctggactgccctcccctactgccacagccacgtgggcctcagagccagcttgaagcccacgcctcccttctgggggcgcgcccccctgggcacacgcccatctcagcaaaagacggagtgtagattaatcaactttcctgagacacctatttttggcaactcatttaaatatgacattgaagtgtcgaataaatcaccggatgaagaagtcaaactacgacgtcatcatttagccagatgtatgaagaattttaagacggatatctatttcgtttccacgtttgaaccgtcaacaaaatcggtcgatttgctcacggttgaaacttttgctggtacggtatgtgaatatgctgacatgccaaaagagtggacaacgacccgaggactttatgatcctacccacctaataagcgcgtcatgtcataaagttgagggcttattttcatttgaggaccgcaccgtggcgacattaatccggctttttattcatcctgttaaatcgatgcgcggcattggtcttacacatgctctggcagatgtcagtggtctggccttcgatcgcatctttatgatcacggaacctgacggtgcggatatagcggttaagaccttcaccggcatccggctcaaagttccatgcccgccagaccatccggccttcagtatcacgaaccaccagacggaagtgactgccctggtcgtcttcgagtgtgatattgctgtacgtggtagtgaccgcttgcgcttgtctccgggccccggtggcagcaacacggattgggtcattttcgggctcctgataaaagaaaaccccggcagcctgctagctgtcggggtgaatttgctggggaagatactactatcagtcgttgctgcagtctccgagagtggacagaactttctcagcgttcttccggtccgcagtgaaggtccctgctttgtggtcattgacgtagacgtcgaactgcccggcctcagagatattgctgatgaagtcaaaacaggcgttatcgccgttacgccagctgtaatcccagcactttgggaggctgaggtggacgttaatatcgccgccttccgctcacaaaaggcctatatctccggtcaggtgaataaatccggtcaacaggcgatcaccaacgtgccactgactattctcgaggccatcaaaagcttccatgcctgcagtctgagtgttttcatggaatttaccaccggattgatgtcgctcgacaccgcgcttaatgagatgctttctcgcgtcaccccactgaccgcccaggaaacgctgccactggtacagtgttttggtcgtattctggcgagcgatgtcgtttcgccgcttgatgttccggggtttgataactccgcaatggacggctacgcggtgcgtttagccgatattgcctccgggcaaccgctgcccgttgccggtaaatcctttgccggtcagccataccatggtgaatggcctgcgggtacctgcattcgtattatgaccggtgcgccggtgccggaaggctgcgaagcggtggtgatgcaggagcagactgaacaaatggacaatggcgtgcgttttactgctgaagtgcgtacgggcaaaatattcgccgtcgcggtgaagatatctctgcaggtccgtggtgatatggatgacggatggctggcgctgtatgaatcccgcctgaagggaaagctgcacgtaatcagcaagcgatatacgcagcgaattgagcggcataacctgaatctgaggcagcacctggcacggctgggacggaagtcgctgtcgttctcaaaatcggtggagctgcatgacaaacagcaaggtcttgatgcggcgctgattgatgcgccgttagcagtcgatgcacaaacgcctcttagcgagttgctctctcatgtcggacaggcaccctgtgcggtgcccgtggtcgacgaggaccaacagtatgtcggcatcatttcgaaaggaatgctgctgcgcgctttagatcgtgaggggaatcgttttaagaagtttcgcactcgcttcatcgtccattacggcatagcggggagagaattccaggcactgttctaccatgcgagtgacatttttgcctgccaccagcgcaactacgcggaagtgttcgggattatggcgcaccacgtccagcgtgctgcaaccaatcgagccggtcgagcccagaatgtgctttcactttgtcgttcgcgtcacgacgcacgttacgtactgcaacacgcgcttgttctgcttcaccacgaacgattttggtcagatctttacgacgttcttccgtcagcggcggcaggacacacggatgtcgctacccgagagttcgggttcaggccaagatcggacgccataatcgctttttcaacggccggagacattgaacgatcaaacacgttgattttcagtgtacgggaatcttctaccgttacgcttgcagctgacgcgcggctcggcttggccgtaataattcacgacaatgccatccagcaggctgggagaagcacaacccgtgtcatttttgccgatttggggttttggcggctaatcatacatgcctacaggctggatctgcagagagaatttaagggccaacaacagcatatgacctcctgtaatcagcaggcgacggcgcaggcgttgaaaggggatgctcgtaagacctacatgagtgattgcctgaagaacagcaagtctgcgcctggcgaaaaaagtttgacgccacagcagcaaaagatgcgcgaatgcaataatcaagcaacacaacaatctctgaaagacgataataccggcgatcaccgcaccgaggatcccggtatcgatcgactggatcccaagaatgctctggatgttattggctttcagaaccgcggcatccgtggttggcagaatgcctttattggtcaaccagaagtttaccgcgaggttcattaccgcataaccgatgaagccagcgaatgccgctacgcctttattttcgcgtgccaggcccagcgggatggcgatacagaacattcatgttataccgataaaaacatcatcaacattccaaatctgatcgaacagtacggtgtggcgcgcgccatcattgaaacctgggccgctctgccactcagcaccgccaccatgtggggcttcttcatcctctgctttattgccaccgttacgctggttaacgcctgctcttataccctggcgatgtccacttgccgcgaagtacgcgatggtgaagaaccacctctgctggtgcgtatcggttggtcaattctggttggcattatcggtattgttctgctggcgctcggcggcctgaaaccgattcaaaccgccattatcgccggaggatgcccgctgttcttcgtcaacattatggtgacgctctcctttattaaagacgcgaaacagaactggaaagattaattaacccccaaaatatcaagaggttgaaagatggattttaatttaaatgatgagcaggaactgtttgtcgccggtatccgcgaactgatggccagcgaaaactgggaggcctattttgccgagtgcgaccgtgacagcgtctacccggaacgttttgtcaaagcactggcggatatgggtatcgacagtctgctgatccctgaagagcacggtggtctggacgcggggtttgttactctcgccgccgtgtggatggagctgggacgtctgggggcaccaacctatgtcctgtaccagttgccgggcgggttcaacaccttcctgcgcgaaggcacacaagagca

SEQ ID NO: 143422 - DNA, 1818 bp, Homo sapiens
  misc_feature (1)...(1818): n = a,t,c or g
tccactctagaggatccccattattaccacattgcagaagtcagcccagtggtcatcatcatctctatctacggggccacaggcgagaagtacggcttcatcacctaccggtgttctgagcacgcggccctctctttgacaaagggcgctgccctgaggaagcgcaacgagccctccttccagctgagctacggagggctccggcacttctgctggcccagatacactgactacggctattttgagcttcagatcaatcggttggccctcttctctacaaatgtcactgctgaaacaccctacatgcacctggccccacctgttgggactcagctccccctgccccatctgtcacatgacaacagcagcaaaaacagcggaggctgtttaccaggtgcctctgtgagttgtaattatagagagcctgctgtgcgcttggccttggcctctactctgcctctcctgagagcccagtccccgttcttcatgcacaaagacaaagaccctctgttttggttcctgacggtgccacccaagtggttcaggaaaggagaggtgattctatcatccaggcccaggaaaaaaacagaaggaagttggttccccaaaacattctttggttttggaaaatcccatgtgctggttaaagaattttacaatcgtaagcatcatattgcaaaacagcagcacgccgtagaacgcaccccgcgaactgttttgcncaaaaggtttgggcctatagcaaaccgcaaacccagggcgattatgctatcgcacagcatttttctagacgaacctgcctacaggatgctgggcgaaatatgccgtgatttctttcatgcggaccgacccgtagatgataaacactaggccggaagaacacttggcgaagaattgattgggtttactggctgattcaggaaatacggaattaaacttccgtggggcgcgccgcatgaggaagaacgggcgaaacgactggcggaaggatttgcttatgttgaagtattgccgaagatgagtctggaaggcgttgcccgcgtgctggccggggctaaatttgtagtgtcggtggatacggggttaagccatttaacggcggcactggatagacccaatatcacggtttatggaccaaccgatccgggattaattggtggagcccccgagaatggggattctgattcagccttgtacagactgaggaaggagatggaagaattccacttagtggttggatcagacatttttggaaaacaccagcacggcacagaaacggacagtacgacctgcccttcgactctagaggaattcgagacgcaatggtttattacgggcggcatcaatcgcattttattagccactgacggtgactttaacgttggcattgacgatccaaaatcgattgaatcaatggtcaaaaaacagcgggagtctggtgttactctgtcgacgtttggcgtggggaatagcaattacaacgaggcaatgatggtgcgaattgccgatgttggtaacggcaactacagctacattgataccctctctgaagcgcagaaagtattgaatagtgaaatgcggcagatgttgattaccgtagcaaaagatgtcaaagcgcaaattgagtttaaccccgcgtgggtaacggaataccgtcagattggttatgaaaagcgccaacttcgggtggaacattttaataacgacaacgttgatgcaggggatataggcgcaggcaaacatataacgttgttattcgaattaacgctgaacgggcaaaaagcatcaattgataagttacgctatgcccccggataa

SEQ ID NO: 143423 - DNA, 1994 bp, Homo sapiens
cccggagaacgcgcagagtgggatcaaacctggctgtacacaccttaaagccgctgcacgatatggataaactggatcactggccagacaccgttaaaaccatgcagcgtaactggatcggtcgttccgaaggcgtggagatcaccttcaacgttaacgactatgacaacacgctgaccgtttacactacccgcccggacacctttatgggttgtacctacctggcggtagctgcgggtcatccgctggcgcagaaagcggcggaaaataatcctgaactggcggcctttattgacgaatgccgtaacaccaaagttgccgaagctgaaatggcgacgatggagaaaaaaggcgtcgatactggctttaaagcggttcacccattaacgggcgaagaaattcccgtttgggcagcaaacttcgtattgatggagtacggcacgggcgcagttatggcggtaccggggcacgaccagcgcgactacgagtttgcctctaaatacggcctgaacatcaaaccggttatcctggcagctgacggctctgagccagatctttctcagcaagccctgactgaaaaaggcgtgctgttcaactctggcgaatatacgaattcgagtcctgtgtaccacggggcattctctgagcgtccatcggggatgggcgatgttctccatacgttgcccgcactcaatgatgcccagcaggcaatcccagggattaagtttgactgggtggtggaagaagggttcgcacagattccttcctggcacgctgccgttgagcgagttattcctgtggcaatacgtcgctggcgtaaagcctggttctcggcccccataaaagcggaacgcaaagcgtttcgtgaagcgctacaagcagagaactgtgacgcagttatcgacgctcaggggctggtaaaaagcgcggcgctggtgacgcgtctggcgcatggcgtaaagcatggcatggactggcaaaccgctcgcgaacctttagccagcctgttttacaatcgtaagcatcatattgcaaaacagcagcacgccgtagaacgcacccgcgaactgtttgccaaaagtttgggctatagcaaaccgcaaacccagggcgattatgctatcgcacagcattttctgacgaacctgcctacagatgctggcgaatatgccgtatttcttcatgcgacgacccgtgatgataaacactggccggaagaacactggcgagaattgattggtttactggctgattcaggaatacggattaaacttccgtggggcgcgccgcatgaggaagaacgggcgaaacgactggcggaaggatttgattatgttgaagtattgccgaagatgagtctggaaggagttgcccgcgtgctggccggggctaaatttgtagtgtcggtggatacggggttaagccatttaacggcggcactggatagacccaatatcacggtttatggaccaaccgatccgggattaattggtgggtatgggaagaatcagatggcctacggtttacgcattacgttgcaacaacatcgacttgatatggccgatggcgcgcgtcgggttcagccccttcggacatacactgacgcagttcatgatgctgtgacagcggaatacgctgaatgcatcactcaaaccgtcgaggcggctgtcagtctcgataaaaacatcatcaacattccaaatctgatcgaacagtacggagtggcccgcgccatcattgaaacctgggccgctgtaccactcaacatcgccaccatgtggggcttcttgatcctctgctttattgccaccggtacactggttaacgcctgctcttataccctggcgatgtccacttgccacgaagtacgcgatggcgaaaaaccacctctgctggtgcgcatcggttggtcaattctgggtggcattatcggtattgttctgctggcgctcggcggcctgaaaccgattcgaaccgccattatcgccggatga

SEQ ID NO: 143424 - DNA, 1785 bp, Homo sapiens
atgggcattgttgcaaatcaactggagaaggatggacatgaagaaagaagagaatggaagaggagaaagagcaaggccagacatttggaaggttcttgtgacagtccaatgacgccatggtgcactatccagactagaaatctgcaagcacgtcacttgacccgccccaacagcaaacgggaccacacaactatttacaaaaacaattaccagattgatttctcccacccctgtgataggcagtgggtcgtggcctctagtttggcgaagctggggttctacagactagatacacagaagcagaaccagagccaagaaatagcggaatcagagtgcagagtggagagtgaagagcgtcttgaggccctggcccaccctctatccactagctcctcaccatctggcactagcaactgcagccagcagctagccctcaacaccttcctacagactcgctccacagctgatttgaagattcttctatgcaaccgaaacaagaatgagtcgagctcgataccccccaagccattacgtaatatgattgagcagcgcaaaagtttaagcgccgatggcgtaaaaaccgccgtccccaggcaccagcagaccagaaagaccaacaaccaccaccaacagcgccacgaggacagtttctgcttcaccgtggagccatcaatggcgggcagaataaacttggtccggaaacgcttttcaaccctttctggaaagccggtcgcaaaagctgaagaaaaagaccaccgccgtgccgataaacacccactgccaacggacaccgaagccgtgtcgaccaccagtttgctccagttgcaccccataaagacgcccgccagcacaaagaacatcgcggcagagagcagcgcattgcaatatgcatcggtttcatactttctctacctccgggcgacccaaataccggtcggcatcaccagcagcaccagaatcagcagggcgaatgagccacatctttatattccgtactcagataggcagaagagagcgcctccgcatccccagaatcaggccgccaatcatcgctcccggaatgctgccaatccaccgagcaccgacgcggtcagcgcatacacgggcgcgctaaggcagcagatcccgttcagatttacggcaggacgaaagcgcgacatgcggatacgaggaaaggacgcacatggagacgggcaacaaactaccgacgagcacagcacaattgaatcgacaccagcgcaaagtcgcagcacgaacatgcgcgacacggccaaattcatggcacatttcgccacacgtaccgaagccttgcattgtccagaaatgcggatcccggcagcgggatatccccggattgccggcagagcgtatgggccatttgccgccatcggtggcgatcatttgggtggcgtcggtgacctgttgcgcgaggtgcttgcctcggtccggccgggaacttgttcggccagggtcttggtaacggaagggatttccagaacgttaaggcatcgcgcacctgggcggctcctggcggctgcgcaccagacactgatgtccgaagcacgcaccggacgcgcgtcgtcgccgttcatcacaacgcttcgccccgctgtccggcttgtagccagtcgcggatttgcgcacacatacctgcgccatggtactttgataatcgccaacgccgcagctttcccttccatcagccacattttcatcgcaggctgtgtttcacctttaaataaaaacgtaacgcctgatttttcccggctgatttcactggaataa

SEQ ID NO: 143425 - DNA, 3861 bp, Homo sapiens
atgtggctgatgcaaggcgatacctgcggcgttggcgattatcaaagtaccatgtgcgcagccggacagcggggcgaagcgttgctgatgaacggcgacgacgcgcgtccggtgcgtgcttcggacatcagtgtgctggtgcgcagccgccaggaggccgcccaggtgcgcgatgccttaacgttgctggaaatcccttccgtttacctttcgaaccgcgacagtgtttttgaaactctggaagcgcaggaaatgctttggttgttgcaggcggtgatgacgcccgaacgtgagaacaccctgcgtagtgcgctggcaacgtcaatgatggggctgaacgcgctggatatcgaaacgctgaacaatgacgaacatgcgtgggatgtggtagtcgaagagttcgatggttatcggcaaatctggcgcaaacgtggcgttatgccgatgctgcgggcgctgatgtcggcgcgtaacatcgctgaaaacttgctggcaacggcaggcgcgaactgctacaagaagccggaacgcagctggcaagtgaacatgcgctggtacgctggttatcgcaacatatcctcgagccagacagtaatgcctccagccaacaaatgcgtctcgaaagtgataaacatctggtgcagattgtcacgatccacaaatcgaaagggctggaatagccactatgtctcggcgttgcaccgctggtgcgccgtcgtggcgataaaaaaggtgacaccgacgtccaccaaagtgcgctcgggcgtttgctgcaaaaaggggaaccgcaagatgcggcagggcttcgcacctgtattgaagcgttatgcgatgatgatattgcctggcaaacggcacaaactggtgataaccaccctggcagcagagctgaatgcgaagacgttacaacgattgcccggcgataactggcgcgtcaccagctactctggtttgcaacagcgtgtcacgtatcgcccagattatgccggatcgtcattgatggacaacttgatctcgggaaaactatttcgcaacgtcgcgcttgtggctaaaatagccgccatttttcagctactggataagaatgtgaccgtatcttctcatcgacttgaactgttaagcccggcacgcgatgccgccattgcccgcgaagctattttgcacggtgccgatgctgtttatatcggcggccctggttttggtgcccgtcataatgccagtaatagcttgaaagatattgccgagctggtgccgtttgcccatcgttatggtgcaaaaattttcgtcacgcttaacaccattttgcatgatgatgagctggaacccgcgcaacggctgattactgacctctaccagaccggtgtcgatgcgctgattgttcaggatatggggattctggaacttgatattccgccgattgaactgcacgccagtacgcagtgcgacattcgtacagttgaaaaagcgaagttcctctctgatgttggcttcacgcagattgtgctggcgcgagagctgaatcttgatcagatccgcgcgattcaccaggctacggacgcgaccattgaattctttattcatggggcactgtgcgtggcctattcgggtcagtgctacatttctcatgcgcaaacagggcgtagcgccaaccgtggcgattgctcgcaggcgtgccgtttgccatacacattgaaagacgatcaggggcgggtggtttcctatgaaaaacatctgctgtcgatgaaagataacgatcagactgccaacctcggcgcgctgattgatgctggtgtacgctccttcaagattgaagggcgttacaaagatatgagctacgtgaagaatatcaccgcccattatcgccagatgcttgatgccattattgaagaacgtggcgatctggcgcgcgcttcatcaggtcgtactgaacatggtaccgagctgattatccgccgcctggcaaactatctcaatccggataaaaagaaactggcggcgaaaggcattacgtcggtacgttcccgcgtgaccaacctcaccgagctgttgccggggatcacccatgagcaggtttgcgaggccataaccgaggcctttttcgcccattatggcgagcgcgtggaagcggaaatcatctccccgaacaaaacgccagacttgccaaacttcgccgaaacctttgcccgccagagtagctgggaatggaacttcgggcgttctgctgaatacgtccacggcggcgtataccacgcctacaacccggacgtggtgcgcacgctgcaacaagcggtacaaagcggcgagtacagcgactatcaggaatacgcgaagctggttaatgagcgtccggcaaccacgctgcgcgatctgctggcaattacgccgggtgaaaacgcggtcaacattgctgatgttgaaccggcaagcgaactgtttaaacgctttgataccgccgcgatgtctatcggcgcgttaagcccggaagcccacgaggcgctggcggaagcgatgaacagcatcggcggtaattcgaactccggtgaaggcggcgaagacccggcgcgctacggcaccaacaaagtgtcgcgcatcaagcaggtggcttccggtcgctttggggttactccggcgtatctggtcaatgccgacgtcattcagattaaagtcgcccagggcgcgaagccaggcgaaggcggtcagttgccgggtgataaagtcacgccttacatcgccaaactgcgctattcggtgcccggagtgacgctgatctccccgccgccgcaccacgatatctactctatcgaggacttagcgcagctcattttcgacctcaagcaggttaacccgaaagcgatgatctccgtgaagctggtttccgaaccgggagcttatgcggacttgatcaccatcgcaggctatgacggcggcaccggcgcaagtccgctttcatcggtgaaatacgcagtctgtccgtgggatctggggcttgttgaaacccagcaggcgctggttgctaacggcttgcgtcacaagatccgtttgcaggtcgatgtcggcctgaaaacgggtgtcgatatcatcaaggcggcgattctcggcgcagaaagcttcggcttcggcactggcccgatggtggcgctcggctgtaaatatctacgtatttgccatctgaacaactgcgcaacgggtgtagcaactcaggatgacaaactgcgtaagaaccactatcacggcctgccattcaaggtgacgaattactttgagtttatcgcccgtgaaacccgcgagctgatggcacagcttggcgtaacacgtctggtggatctgattggtcgcaccgacctgctgaaagagctggacggtttcaccgccaaacagcagaagctggcagctgtcgaagctgctggagactgccgaaccgcatccagaaaagaatctgtcattcttaatgaagtactcaatagatttgttgatgctttaacaaatgaagttcgctatgaagtatcacaaaattggcttgatacaggaaacctggcctttctgaacaaaccattagaactcactgaacatgaaaaacagtggattaagcagcatcccaatttaaaggtgctggaaaatccttactcgcccccctattctatgacggatgaaaatggctcggttcggggcgttatgggggacattcttaatattattaccttgcaaacaggtttaaatttttctccgatcaccgtttcacacaatatccatgctggaacacagcttagccccggaggatgggatataatacctggcgctatttatagtgaagatcgagaaaataatgttttatttgctgaagcctttaataccaagccctaa

SEQ ID NO: 143426 - DNA, 708 bp, Homo sapiens
atgtggctgatggaaggcgaaagctgcggcgttggcgattatcaaagtaccatggcgcaggtatgtgctgcgcaaatccgcgactggctacaagccggacagcggggcgaagcgttgctgatgaacggcgacgacgcgcgtccggtgcgtgcttcggacatcagtgtgctggtgcgcagccgccaggaggccgcccagcatttgctagtatcccgcctacgcctgcggcggtactcacgattgccgcctgcgccactacacgcttgcggacccttgacggtatgcctcgcgccggaaaatctgactcagcagcaccaggttttgcggacgtgcaccgcgccaggagtagatcgactggtcatcgtcacccaccacggcttacagcgtgagcagattaaaaagactattgaagcgacggctcctggctgttttgaagttttcattcacaacgacatggaagcggcaatgaaggtgaaatccgggcaactgggttattacatcggcgcgtgtaataccggtgcgggcgcggcattgtcgattgccatcgcggtgataggctataacaaaagttgcaccattgccaaaccaggcattaaagcgaaagacgagcatatcgccaaaatgatcgctgaaggaaaagtggcgtttggcctttccgttgagcacgtcgaacacgcgattccgatgctgattaaccatctgaaataa

SEQ ID NO: 143427 - DNA, 474 bp, Homo sapiens
atgggcgtgctgggcattacctgcggcgtaatggtttgggctgggattgcgctgcttggcctgcatttgattatcgaaaaaatggcctggctgcatacgctgattatggtgggcgggggcctgtatctctgctggatgggttaccagatgctacgtggtgcactgaaaaaagaggcggtttctgcacctgcgccacaggtcgagctgccgaaaagtgggcgcagtttcctggaagcgattatctactttggctcggtgttctcattgtttgtcggtgataacgttggcactaccgcgcgctggggcatttttgcgctgatcattgtcgaaacgctggcgtggtttaccgtcgttgccagcctgtttgccctgccgcaaatgcgccgtggttatcaacgtctggcgaagtggattgatggttttgccggggcgttatttgccggatttggcattcatttgattatttcgcggtga

SEQ ID NO: 143428 - DNA, 622 bp, Homo sapiens
atgaccttagaatggtggtttgcctacctgctgacatcgatcattttaagcccgttccccaggctctggtgcaatcaacactatgaccacctcgctcaaccacggttatcgcggcgcggtggcgtctattgctgggcttcagaccggactggcgattcatattgtgctggttggcgtggggttggggacgctattttcccgctcagtgattgcgtttgaagtgttgaagtgggcaggcgcggcttacttgatttggctgggaatccagcagtggcgcgccgctggtgcaattgaccttaaatcgctggcctctactcaatcgcgtcgacatttgttccagcgcgcagtttttgtgaatctcaccaatcccaaaagtattgtgtttctggcggcgctatttccgcaattcatcatgccgcaacagccgcaactgatgcagtatatcgtgctcggcgtcaccactattgtggtcgatattattgtgatgatcggttacgccacccttgctcaacggattgctctatggattaaaggaccaaagcagatgaaggcgctgaataagattttcggctcgttgtttatgctggtgggagcgctgttagcatcggcgaagcatgcgtga

SEQ ID NO: 143429 - DNA, 1106 bp, Homo sapiens
  misc_feature (1)...(1106): n = a,t,c or g
atggtgcacattgtggcgcttatgagccccggtcccgatttcttttttgtctctcagaccgctgtcagtcgttcccgtaaagaagcgatgatgggcgtgctgggcattacctgcggcgtaatggtttgggctgggattgcgctgcttggcctgcatttgattatcgaaaaaatggcctggctgcatacgctgattatggtgggcggtggcctgtatctctgctggatgggttaccagatgctacgtggtgcactgaaaaaagaggcggtttctgcacctgcgccacaggtcgagctggcgaaaagtgggcgcagtttcctgaaaggtttactgaccaatctcgctaatccgaaagcgattatctactttggctcggtgttctcattgtttgtcggtgataacgttggcactaccgcgcgctggggcatttttgcgctgatcattgtcgaaacgctggcgtggtttaccgtcgttgccagcctgtttgccctgccgcaaatgcgccgtggttatcaacgtctggcgaagtggattgatggttttgccggggcgttatttgccggatttggcattcatttgattatttcgcgtcttgcgctgattgttcccggtctgctgcaaaaaaacggcggctggcggcgcatggctattatttctgcggtcattgcgctggtctgccacgcaatcgctctggaagcccgcatcctgcccgacggtgatagcggacaaaacctcagcctgctgaacgttggttcattggtcagtntgatgatctgtacggtaatgaccattgtggcttctcgcaatcgtggctggctgctgctacccattgtctatgcctttgcgcttatcaacctggcgctggcaaccttcatgcccaatgaatacatcacccatctggaagctacgcctgggatgctggtgcacattggcttatcgctcttttcctatgccacgctaattatcgccgccctgtacgcactgcaactggcgtggattgattaccaactgaagaacaagaagctggcgtttaaccaggaaatgccgccattgatgagtatcgagcgtaaaatgttccacatcacgcagattggcgtggtgctgta

SEQ ID NO: 143430 - DNA, 1041 bp, Homo sapiens
atgcgtcagtacaccgacgaatatcttgataacattacaccgccgttcacgaaagccttgtttacctacgtcaaagagcggaagtacaccttttgtacgccggggcatatgggcggcaccgcatatcaaaaaagcccggttggctgtctgttttatgattttttcggcgggaatactcttaaggctgatgtctctatttcggtcaccgagcttggttcgttgctcgaccacaccgggccacacctggaagcggaagagtacatcgcgcggacttttggcgcggaacagagttatatcgttaccaacggaacatcgactgatgcatggcgtcagcgttttggtggcacagcgcgtctgtatggtgaaaaagcgttgcaactgtttgctgacgcgcatatttgtgtggttggtatcggtggtgtcggttcctgggcggcggaagcgctggcgcgcacggggattggcgcaatcacgcttatcgatatggatgatgtgtgcgtcaccaataccaatcggcaaattcatgccctgcgcgataacgttgggctggcaaaagcggaagttatggcggagcgtattcgccagattaacccggagtgccgtgtaacggtggtggatgatttcgtgacgccggataacgtagcgcagtatatgagcgtgggttattcgtacgtgattgatgccattgatagtgtacggcccaaagcggcgctgattgcttattgtcggcgcaataaaatcccactggtcacaaccggctgcccagtctatgatatttttgttatagcagcactgctcggcgtcaccactattgtggtcgatattattgtgatgatcggttacgccacccttgctcaacggattgctctatggattaaaggaccaaagcagatgaaggcgctgaataagattttcggctcgttgtttatgctgggcaaacaggctggcaacgacggtaaaccacgccagcgtttcgacaatgatcagcgcaaaaatgccccagcgcgcggtagtgccaacgttatcaccgacaaacaatga

SEQ ID NO: 143431 - DNA, 516 bp, Homo sapiens
atggttcacatccaatgcacatatcaaggtatcgtcagattttcaacaaacaacgtcaattatttccatcgtattccgtccaacatcacgtacatcatatcgtcaacatgtgcgcacaatcatgggcgacacacatcccccaaatcatcatcagatgtcgtcatcaccgtcaggtcaaccagcatctggtcaacatcaacgtcacaacacgacacacatgcatccacagccagcgtggtgccacacccgcaactgatgcagtatatcgtgctcggcgtcaccactaatgtggtcgatattattgtgatgatcggttacgccacccttgctcaacggattgctctatggattaaaggaccaaagcagatgaaggcgctgaataagattttcggctcgttgtttatgctgggcaaacaggctggcaacgacggtaaaccacgccagcgtttcgacaatgatcagcgcaaaaatgccccagcgcgcggtagtgccaacgttatcaccgacaaacaatga

SEQ ID NO: 143432 - DNA, 1168 bp, Homo sapiens
atgccttatggtgaggaacagaacaaaggcgagtacagcaagcatagtatgcacatctactgtagaacgttggttagcagtgctaccagtcgtccatacatctcatcttatgaccccgagattgatgactcctgctttcactcgacctggtcacctaggctaagacgacaaaatcagatgctttatgtcaagtcagccttatctagtttggtcgacgctcttcaagagccacgagggattctaattcctctgggccagacagaagccctcgtgaaggcagctttaaacgccgccagattcagtcttaactcacacacgggaccctatgagacagcttgcaaaacacctgctagattccgggtggcaccccggggacacacactgaattgccggctcccggggaaccacgtcgagggcctaggagagagcttccgacgttccttggccagtccccggcgataccccccagagaacccctggatgaccgtcgagggtgcgcgctcggtatacccggagggccctgtgcgaagaaattagcaaaatgaacgagaacctgccgttgtacgcgttcgctaatacgtattccactctcgatgtaagcctgaatgacctgcgtttacagattagcttctttgaatatgcgctgggtgctgctgaagatattgctaataagatcaagcagaccactgacgaatatatcaacactattctgcctccgctgactaaagcactgtttaaatatgttcgtgaaggtaaatatactttctgtactcctggtcacatgggcggtactgcattccagaaaagcccggagcatgcggcgccagtctgcacgtcacatagactcgtcagctatgggggtgcaccagtcgctgcatcacccagagatgcgtgccgctcacagtactctgcgacagcagctcggatatgctgcgtactagacgcgctgaatagcacgtgtgatcctacccacatgactcatgtttcgagggatatctccgtggatacgcggaggaaaccgaggcggcaggaacgcgagggagctgtaacatctcttggtggctcagacctcaggactccttggcttgcaacaataacgcagatgcttacgcaggctacctctatcggcagtaagacaatgtgtttacccgctgagtacaacgactga

SEQ ID NO: 143433 - DNA, 285 bp, Homo sapiens
acccacagtggaacagcagcatcttcatctccacccacttagctctacaacagaagcgcagacaagcagagtatggtgcccaggagcctagcagaaggatagttgggggaaaaggatcaggagctcaggtagatgaagaagaagaggaggaggaggaggaggaggagaaggaggaggaaaaagaagaagaaggagaagaagaggaagaagaagaagaagaagaagaagaagaagaagaagaagaagaagaagaagaagaagaagaagaagaagatgttgttgttg

SEQ ID NO: 143434 - DNA, 215 bp, Homo sapiens
catttttcttcttcttcttcctcctcatcatcttcttcttcttcttcttcttcttcttcttcttcttcttcttcttcttcttcttcttcttcttcaaagattcctctggagttctgcaggctatataggaagcaaggctgcatctgcttctggggaagcctcggggagattttactcatggcagaaggcgaagcaggagccagcccttcacatgg

SEQ ID NO: 143435 - DNA, 393 bp, Homo sapiens
ttaagaagggacatatgatccagttctagccaatactaagtgagagaagtttgcagggggtttctggggaaattttcttgctcttaaaaatagtgataattccttcttcttcttcttcttcttcttcttcttcttcttcttcttcttcttcttcttcctcttcttcttcttttctcttcttcttttcttcttctttcttcttctttcttcttctttcttctcctccttctccttctcctccttctccttctcttcttctccttcttctccttctccttctccttccttctttcttctttcttcttctttttttggtgttatttctctggatgttgttaccttggcctggcaaagtgctaggattacaggggtaagccaccgcacccagcccat

SEQ ID NO: 143436 - DNA, 1896 bp, Homo sapiens
ccacataggattccgtggcaagagtactattttgctgctttcatgtaggaaggtattgccccccttgcagtcaggccctcaaagcgcttgtacgtgtaattgatgaagacccagtctttgttcttgtagtcgcaggagacaatgctggtggtgttacctgttggcttaagaatatcagattctggaaactcatcgaagtttgaggtatcatcaatgcttttgatttgaaggtggagggatgttctctaatacctcaaaattagatccttggctttctcagagatgggaacttctggaggaaaagtcaaagtttctttccagttcatcaccttcttatatgtctcttgaggaagtcctctgaaaccatgcaacttaccgatgagcatctcatacatgatcaccccaagcgaccaccaatcacagagcttgttgtacccggtctgcatgaacacctcaggagcaatgtaggggattacaggtgtgagccaccgcacctgaccaagagaaacattttctgcattctttcagaagccacagatattacttactagctgacgtctatttcttttccaggtttctgctttaggctaacgtaattgttaccacttactgaaatcactggggaggctgtggttcagattcctataaaattctgtcctatgtgcttttttcagtcctgtgcaaagatctggacgaggggaatgcagtggcacctggaagcttggagatgccagaaaccgcagagccctaaagggggtgtcacagcactggctcaggaagcccctaagtctgggctcctggaagggcagttcatgccaatgcccccccaataccttgctgtccaaaagaaggttgtctggtttgatgtctctgtggatgaatccaagttggtgaatagagtctatggctaatactgtttctgctatataaaactgagtctcctcttctgtcagagtgtctttatgacctttcatcgtcaagtaattacctccaggcaggaactccatgattaggtagaggtttagcttatcctgaaaactatagaacattttcacaacccacaaactgtctgcctccactagaatgaaagcactgctacaactgtgctttacctgctctttttcaagcatatctgctttacggagtattttcattgcatacacatgtcccacttgacaagtagctgtgatttttacctcaccaaatgctcctctgcctattacttttaaggactcaaaatcttccaatccaagtcttgttctcttcaaacgaagaaactctgtttccttccgaaggaaaacattgccaatattaattacctcctcatcttttaggccttcttcttcaattttttcaaacaaaattctttacctcatttctcgttcttcatgttgagcgataaggttgctataaaaattctccagtgtcactttggtcattgtcaccctttcctttgtgtggttactcatggatgagcaaggacacagactttcctctaagcccttaccgactttttcctctggctgttgcttttccactctcttcttaagaattttccctgccttttcctgtgatgaagacggcggcagcaagcaactcaccagagcccagggagaggcagggctggggacggcggagagccgcagacgccccttcggccagtagtctcgacttgaaggctggcgaagccccggcggcggcagccaacgagccaaagacgggaggggacgcgtgagggactctgagacagggggcaacaggcggttacgactacaggactacaggcacgtgccaccatgcccagctaatcttttcttcttcttcttcttcctcttcttcttcttcttcttcttcttcttcttcttcttcttcttcttcttctcccttccccatggg

SEQ ID NO: 143437 - DNA, 261 bp, Homo sapiens
ttagtaaactacttcttcttcttcttcttcttcttcttcttcttcttcttcttcttcttcttcttcttcttcttcttcttcctcttcttcttcttcttccttcttcttcttcttcttcttcttctcctcctcctcctcctcctccttctccttctccttctccttctccttctccttctccttctccttcagatctgggatggcaggaagaatgggacgagaggaggggcacctggggagggaagggcgcctcccctgcat

SEQ ID NO: 143438 - DNA, 195 bp, Homo sapiens
ttactcatcatcctcctcctcctctcgcttgtgtttctttttacagtgaacagaaacaatggcctgttcttcttcttcttcttcttcttcttcttcttcttcttcttcttcttcttcttcttcttcttcttcttcttcctcttcctcttcctcttcttcttcttcttcttcttcttcttctttcttcttcttcat

SEQ ID NO: 143439 - DNA, 399 bp, Homo sapiens
ttagaaaggctgtctgctccttgcatctctctcttgctctctcgctctctctcttccctctctctttcctctctcctcttcttcttcttcttcttcctcctcctcctcctcctcctcctcctcctcctcctcctcctcctcctcctcctcttcttcttcttcttcttcttcttcttcttcttcttcttcttcttcttcttcttcttcttcttcttcttcttcttcttcttcttcttctcgatcctccaggggataccatccagggggcaccatccaggggataccatccaagggataccatccagggggcaccatccagagggcaccatccaggggataccatccagggggtaccttccaggggataccatccagggggcaccatccagggggcaccat

SEQ ID NO: 143440 - DNA, 159 bp, Homo sapiens
tcagtgtttcttgaagtcctctgcacctgtccctggtgtgagtaaaacaacttcttcttcttcttcttcttcttcttcttcttcttcttcttcttcttcttcttcttcttcttctccttctccttcttcttctctcctcctcctcctttcttccttcat

SEQ ID NO: 143441 - DNA, 429 bp, Homo sapiens
tcatgtttgaaaatagagtttcttcttcttcttcttcttcttcttcttcttcttcttcttcttcttcttcttcttcttcttcttcttcctcttcttcttcttcttcaccgaaagcatttgatctgtgtcactcttgggtgtctgaggtggctggggcagctctgtgtcaggctgcagggcagctgtgcttggctccaaactctgggttgggttcatacctatgcgtgtgtctgcaccttcttcttggaccagcaggtagcagggcgtattcttctcgtggaagatcctaggagttctctgcttcagtgctgccttctcctggatgccacctctgtgctgtcggttccagaaaaacatgcattttataaggacatgaaggtaggtgcactgctctggaatcacttccatccagtttaacctggagcccat

SEQ ID NO: 143442 - DNA, 282 bp, Homo sapiens
ctagagaacttctgagagggggaaatgtttacattgggccttagagcattctttctttctttcttcttcttcttcttcttcttcttcttcttcttcttcttcttcttcttcttcttcttcttcttcttcttcttcttcttcttcttcttcttctcgtgaactgaggggtgtgttgtactctactctcaggccctgagatctcatgcagatctgattttgcacagggtcccacacctctccagggagcccctcaaacagccttaggtaatcttgcatctccat

SEQ ID NO: 143443 - DNA, 264 bp, Homo sapiens; identical to SEQ ID NO: 120611

SEQ ID NO: 143444 - DNA, 708 bp, Homo sapiens
tcaacgatggccaagtttacaacttagttcaggggttatagaataacaagatgggctgcttcttcttcttcttcttccttcttcttcttcttcttcttcttcttcttcttcttcttcttcttcttcttcttcttcttcttcttcttctttcttcttcttcttcttcctccttctgtccccaaccacttctagagactcttggcaaaattggatgggaattttctgacactgcctctgcttgtacaatactgagaagtcaggaagagcttgagttggctgtaattctaaagggtgaatggatgctgatggtgtttcctcagcctcccaaagcactgggattacagacatgatccatcgtgcccagtcacacagatcttttctgatggcttgcttttgtgttttgtatctctgctctgtttgatttggcagaaaaggctcctgcgcaaagccacgtgcaagtctccctgtatgtcttggctgctcctgtgctcctgatggaaatgtgtcgggggacattattcttgaaacatcaccgttggtctgcatttcttgaaattcacacaaagaggtatcatcattgcttaagctttcaatcatagacatttcattactattttgagaaagatctttagtttttccaagattcgctaatgatgtaaccacattggccaatgtacttaaatctccctgacatgattcagccaccat

SEQ ID NO: 143445 - DNA, 274 bp, Homo sapiens
ttgcccttccttcttatatctttccacattctagttctcctcctcctcctcctcctcctcttcttcttcttcttcttcttcttcttcttcttcttcttcttcttcttcttcttcttcttcttcttcttcttcttcttcttcttcttcttcttcttcttcttcttcttcttcttccttctccagttactccccatcttgaggaaacatgagacagctatatcaacactcataacacaaagtggagaacggcaggtgctacagaagcccagctgga

SEQ ID NO: 143446 - DNA, 252 bp, Homo sapiens
ctaaatgaagataatgttgaagaaaattggattcttcttcttcttcttcttcttcttcttcttcttcttcttcttcttcttcttcttcttcttcttcttcttcttcttcttcttcttcttcttttttttttcagatggagtttcactcttgtctcccaggccagggtcacgatcatgaatgtcactgtcttccacctccacatctcgtcccactggaaggtcttcagaggcaatgtgtatgcagactgtcat

SEQ ID NO: 143447 - DNA, 1734 bp, Homo sapiens
atggaaccagagaatgacacagggatttcagaatttgttcttctgggactttctgaggaaccagaattgcagcccttcctctttgggctgtttctgtccatgtacctggtcactgtgctcgggaatctgctcatcatcctggccacaatctcagactcccacctccacacccccatgtacttcttcctctccaacctgtcctttgcagacatctgtttcatctccactacaatcccaaagatgctcattaacatccagacacagagcagagtcatcacctatgcaggctgcatcacccagatgtgcttttttgtactttttggagggttagacagcttactcctggctgtgatggcctatgatcggtttgtggccatctgtcatcctctgcactacacagtcatcatgaaccctcggctctgtggactcctggttctggcatcctggatgattgctgccctgaattccttgtcacaaagcttaatggtattgtggctgtccttctgcacagacttggaaatcccccactttttctgtgaacttaatcaggtcatccaccttgcctgttctgacacctttcttaatgacatggggatgtattttgcagcagggctgctggctggtggtccccttgtggggatcctttgctcttactctaagatagtttcctccatacgtgcaatctcatcagctcaggggaagtacaaggcattttccacctgtgcatcacacctctcagttgtctctttattttgttgtacgggcctagagcttccatctccaccaacaaccattcagggaggaattcacacttccacatggaggcttttctttcagaaaaccagtcaaggattttcagagaaacaagaattgcagcccttcctctttgggctgttcctgtccatgtacctggtcactgtgctcgggaacctgctcatcatcctggccgcaatctcagactcctgcctccacacccccatgtacttctttctctccaacctgtccttcgtagatatctgttttgcctccaccatggtcccaaagatgttggtgaacatccagacacagagcaaagtcattacctatgcaggttgcatcacccagatgtgcttttttgtactctttatagtgttggacagcttactcctgaccgtgatggcctatgaccagtttgtggccatctgtcaccccctgcactacacggtcatcatgagccctcagctctgtggactgctggttctggtgtcctggatcatgagtgtcctaaactccatgttacaaagcttagtgacattgcagttgtccttctgcacagacttggaaatccctcactttttctgtgaacttaatgagatgatccaccttgcctgttctgacacctttgtgaacaacatggtgatgcattttgcagctgtgctgctggacggtggtcctctcgttgggatcctttattcttactgtaggatagtttcctccatacgtgcaatctcgtcaactcaggggaagtacaaggcactttccacctgtgcatctcacctctcagttgtctccatattttatggtacggggctaggggtgtaccttagctctactatgacccaaaacttacactcaactgctgtcgcctcggtgatgtacactgtggtcacccccatgctcaaccccttcatttacagtctgaggaataaagacataaagggggctctgacacaattcttcagagggaaacaataa

SEQ ID NO: 143448 - DNA, 1414 bp, Homo sapiens
aaaatcctctctcgctgtgggcagccacaatccaatcacctaggggcccagatagaacaaaaaagcagaaaggagtcaaattttctctctctctctctctcaatacaaggccagcaacgatgcccacgatggggatggtgggctggggagactgctctgggaaaggaagggaaggtgaggggccctgatctccaggcctcagccctgaccctgctgaagagtctccaggaggcaccaccacagcggcccacttctggaaggttccatcccctgcaggcctggtctccacaagctctgtgtcctgggtctgttcctccccatcccgctgccaggtcagcgtgatctccgcagggtagaagcccagggcccagcacctcagggtggcctcatggtcagagatggggtggtgggcaacgtgtgcctttggaggatctgagaagagtcagaaaattcaggcactttgcactcctcatgggaaaccccagcagcacccatgttccaggtaggtcctgaactcctctgcatattcctctgcctcatagaagcgctgggtgatctgagccacggtgtccgccgcggtccaggagcgcaggtcctcgttcagggagatgtaatccttgccgtcgtacgcgtgctggtgatacccgcggaggaggcgtccgtcgggccccatgtcgcagccattcattccctggagggtgtgagaccctagccggtccccgcagtcagcggcggagcagctagccccgccccctccccgcccaacccgcgggggccttggcgtaccctgtggtccactcccaatactgcggcccctcttgctccacccacggctcccgcggctccatcctcggaatcgcggcgtcgctgtcgaaccgcaggaattgcgtgtcgtctacgtactccacggcgatgtagcggggctccccgcggccgggccgcgacacagcggtgctgaaatacctcaaggagtgggagcctgggggcgaggaggggctgagacccgccagaccctcctccggaggcggctccctgagtcctgcgaccccaacctccgcgtctgggaaaaatatgagtcccgcggggtgcgtgggactttagaacctgggaactgcggcgacactgttcttccttttcttcttcttcttcttcttcttcttcttcttcttcttcttcttcttcttcttcttcttcttcttcttcttcttcttcttcttcttcttcttcttcctcttcctcttcctcttcctcttcctctccttctccttctccttctccttctcctccttctttcctcctcctcctgctcctccccgcccccctcctcttcttctctggaaaagttgtacctgagcatatgaaataggacagagaccagtttctttctttcttttttttttttattagctgcagt

SEQ ID NO: 143449 - DNA, 2369 bp, Homo sapiens
agcttccatctccaccaacaaccattcagggaggaattcacacttccacatggaggcttttctttcagaaaaccagtcaaggattttcagagaaacaagaattgcagcccttcctctttgggctgttcctgtccatgtacctggtcactgtgctcgggaacctgctcatcatcctggccgcaatctcagactcctgcctccacacccccatgtacttctttctctccaacctgtccttcgtagatatctgttttgcctccaccatggtcccaaagatgttggtgaacatccagacacagagcaaagtcattacctatgcaggttgcatcacccagatgtgcttttttgtactctttatagtgttggacagcttactcctgaccgtgatggcctatgaccagtttgtggccatctgtcaccccctgcactacacggtcatcatgagccctcagctctgtggactgctggttctggtgtcctggatcatgagtgtcctaaactccatgttacaaagcttagtgacattgcagttgtccttctgcacagacttggaaatccctcactttttctgtgaacttaatgagatgatccaccttgcctgttctgacacctttgtgaacaacatggtgatgcattttgcagctgtgctgctggacggtggtcctctcgttgggatcctttattcttactgtaggatagtttcctccatacgtgcaatctcgtcaactcaggggaagtacaaggcactttccacctgtgcatctcacctctcagttgtctccatattttatgacagagcttcagtttccatcatcaaccatccagggaggaattcatacatccacatggacgacaccttccttccagaaaatccatcaggtcacatcaacaagatgaaaccagggaatgatacacgaatttcagaatttcttcttctaggactttcagcagaaccagaattgcagcccttcttctttgggctgttcctgtccatgtacctggtcaccgtgctcgggaacctgctcatcatcctggccacaatctcagactcccacctccacacccccatgtacttcttcctctccaacctgtcctttgcagatatcagttttgtgtctaccactgtcccgaagatgctggtgaatatccagacgcagagcagagtcatcacctatgcaggctgcatcacccagatgtgctttttcctactatttgcagtgttggacagccttctcctagctgtgatggcctatgatcgcctggcaacagagcaagactctgtctcaaaaaaaaaaaaagagaagaagaaagaagaagaagaagaagaagaagaagaagaagaagaagaagaagaagaagaagaagaagaagaagaagaagaagaagaagaagaagaaaagaagaggaagaaaagaaaaatgccaaagtcacatcacaagatgaaatcatggaacaatacaataattttagaatttcttctcctgggaatttcagaggaaccagaattgcaggccttcctctttgggctgttcctgtccatgtacctggtcactgtgctcgggaacctgctcatcatcctggccacaatctcagactcccacctccacacccccatgtacttcttcctctccaacctgtccttcgtagacatctgttttgtctctaccactgtcccgaagatgctggtgaacatccagacacacaacaaagtcatcacctatgcaggctgcatcacccagatgtgctttttcttactctttgtaggattggataacttccttctgaccgtgatggcctatgaccggtttgtggccatctgtcaccctctgcactacatggtcattatgaaccctcaactctgtggactgctggttctggcatcctggatcatgagtgttctgaattccatgttacaaagcttaatggtgttgccactgcccttttgtacacacatggaaatccctcattttttctgtgaaattaatcaggtggtccaccttgcctgttctgacacctttcttaatgacatagtgatgtattttgcagtagcgctgctgggcggtggtcccctcactgggatcctgtactcttactctaagatagtttcctccatacgtgcaatctcatcagctcaggggaagtataaggcattttccacctgtgcatctcacctctcagttgtctccttattttatggtacatgcttaggggtgtaccttagttctgctgccacccacaattcacacacaggtgctgcagcctcagtgatgtacactgtggtcacccccatgctgaaccccttcatctacagtctgaggaataaacacataaagggtgctatgaaaacattcttcagaggaaagcaatag

SEQ ID NO: 143450 - DNA, 2574 bp, Homo sapiens; identical to SEQ ID NO: 143212

SEQ ID NO: 143451 - DNA, 4005 bp, Homo sapiens
gtggcaggagtaggtccattacatttggggcgttatgcatggcgatctaggcatttcaatgaaaagccgcatcccggtttgggaagagttcgtgccgcgcttccaggccacgctggaacttggcgtctgcgcgatgatttttgctacggcagtcggtattccggtcggcgtgctggctgcggttaaacgcggttccattttcgatcacacagcggttggcctggcgctgacaggttattcaatgcctatcttctggtggggcatgatgctgatcatgctggtttcggtgcactggaacctgacgcccgtctccggtcgcgtgagcgatatggtgttcctcgatgactccaatccggtaaccggttttatgctaatcgacaccgccatctggggtgaagacacggaacttttatgggggccgcccccataagaatcttgcctgcctatgggctggggactattccggttgcgggctttgggcggatgacacgctcctcgatgctggaagtgctgggcgaggattacatccgcaccgcgcgcgccaaagggctaacccgcatgcgggtgattatcgtccatgcgctgcgtaacgcgatgctgccggtggtgaccgttatcggcctgcaggtgggaacattgctggcgggggcgattctgaccgaaaccatcttctcgtggcccggtctgggacgctggttgattgacgcactgcaacgccgcgactatccggtagtgcagggcggcgtattgctggtggcgacgatgattatcctcgtcaacttgctggtcgatctgctgtacggcgtggtgaacccgcgtattcgtcataagaagcgcggtcgtcgggctggtttacgtcgtcatcgtgctaaacacggacggttccgccgtcaggttcaggacagcttcggtaaagaagcacaagaacgccataccctgacccacgaaattcgcaatctccagcaactcaacgcgcaaatggcccaggaagcgatcaacctgacgcgcgcgctgaaaggcgacaataaaacccagggcaactggggcgaggtagtattgacgcgggtgctggaggcttccggtctgcgtgaagggtatgaatatgaaacccaggtcagcatcgaaaatgacgcccgctcgcggatgcagccggatgtcatcgtgcgcctgccgcagggaaaagatgtggtgatcgacgccaaaatgacgctggtcgcctatgaacgctattttaacgccgaagacgactacataagtagctcggaccgcagtctaaggcgtcgtactgcaccggacagtcgatcaatgtcaccggcggtcagcgggcgctttaaaccgcgggtcgtggtcgccatcgcgctggacgatcagcagcgcatcgtcgacaccttgtttatgaaaggactgaccgtcttcgcccgaccgcaaaaaattcccgcaattaccggcacaaccattcgcaaagatctggtcattctggaacatgccggaaccgtcattcgtacttatggcggagtggtgttgaataaagaggaatccgatccgcctatcgatcataaaacactcatcaacacccacaagaaagagctgattgcagaagctgcctaccgttttgcagatggttccctgctctcgcgctttaataacatcacggtgatgaccaacagcctgcatatcgtcaatgcgctatccgtcactcgaccgctggccttagggtttattaatgtctgggcaataaatatggttctgcacaagtatatcctggtggtaattgagttgttggccaatttgtctgtggcaggtaatcacttgctgtctttgtatccatccctggatactgggaatcatcctgtggcgtacaagtcagatttggttttacccacttcctgcaatacacccaatcggatcctgagtgatatacctcccctgcagcgggtcataatagcggtggcggttgtaatacaggccggactcctcatcatactgctgccccggcaggcggataagctgctgcagctgatgcgggttctcttcattcagcaggttgccccattcatcgtattctgcgcaccattctgttgccccttccgtgctgacaagcgccagcggcaggccgcgatggtcgcagtggtacaggtggatttttcgcgccggcgtgtacaccgggtccatctggttttgcatctgctccacggtcaggccgcacgatgccagccagcggcggctttcctcactcacccggtcagccaggatttcactttccagccggtcgagcatctgcaccaacaccggcgggaacaccacactgccaccgtcttcgccgacggactgctgaagggcatccgccaagctgcggcgctgcgttttcgccagctcaccggtggcagtttcgaccctgatgagtggcgtgaagctccccggctgataaatcgtctggatgcggctcctggccttctgtatcgtggtcaagccgtcgccggtccagcccgattttggacgatctctagctcgtacccgttcaagaactttaactccgccacctcctacagtggcccggcggcgatccgtttactgcgcgccagctgcgggcagacttcgcacactaatctgtatcaaccggcaaataacgactgctatctgtttgataacctttcgaaactgggctttacccagcacctgatgatgggacataacggccagttcggcggttttttgaaagaagttcgcgaaaatggcggcatgcagagcgaattgatggatcaaacaaatctgccggttattttgctgggctttgatggttcgccggtttatgacgataccgctgtgcttaaccgctggctggacgttaccgaaaaagataaaaacagccgtagtgccacgttctacaacacgcttccactgcatgacggcaaccattatccgggggtcagcaaaacagcggattacaaagcgcgggcgcagaaattctttgatgaactggacgccttctttactgaacttgagaaatcgggtcgtaaagtgatggtggtcgtggtgccggaacacggcggcgcgctgaagggcgacagaatgcaggtatctggcctacgtgatatccctagcccgtctatcaccgccacgctggaacttggcgtctgcgcgatgatttttgctacggcagtcggtattccggtcggcgtgctggctgcggttaaacgcggttccattttcgatcacacagcggttggcctggcgctgacaggttattcaatgcctatcttctggtggggcatgatgctgatcatgctggtttcggtgcactggaacctgacgcccgtctccggtcgcgtgagcgatatggtgttcctcgatgactccaatccgttaaccggttttatgctaatcgacaccgccatctggggtgaagacggcaactttatcgatgccgtcgcccatatgatcttgcctgccattgtgctgggtactattccgctggcggtcattgtgcgtatgacacgctcctcgatgctggaagtgctgggcgaggattacatccgcaccgcgcgcgccaaagggctaacccgcatgcgggtgattatcgtccatgcgctgcgtaacgcgatgctggcggtggtgaccgttatcggcctgcagcatggtgatgtcgtcggcgtgcgggaactcagtacgaatacggttaataacgctttcgtagatttcgtggatgcagctccagcagccggatacttcggtggtaaagcccatgttgccggttttgaggatctgcacacgttcggcagccactttatccggtccccagttcaggttgttaaaccaggtttcgatcagcttgctgtccacgcgctggcattgcgggtagcgggcaacgatttccgcaatcccttcgcccgtcaccttcgcaatgcgagggttaccttcagccataaagatcagcacgcattttccgtcggcaaaatgggtgaagtgttgggtgccatcttcagcgtcatacaaacgagcgattga

SEQ ID NO: 143452 - DNA, 1713 bp, Homo sapiens
ctacgaaaattctgcaatgtattgaatttgcacgattttgtaggccggataaggcgttaacgccgcatccggcataaacaaagcgcactttgtcaacaatctgtatacccggtggcgctgtgcctctgcgtgcagcgccatccggcagcaatacttcattccctgtccgataagggcgggaattgatttgtgagcaatacagacacgcagttccaggctgcgggtcaccttctcacatttgcctttgtccacatgatcccgggcgatccggtgatgatcatggcgggcgaacgtgggatctccccagagcgtcacgcgcagctgctggctgaactcggcttaaataaaccgatgtggcagcagtatctccattacatttggggcgttatgcatggcgatctatgcatttcaatgaaaagccgcatcccggtttgggaagagttcgtgccgcgcttccaggccacgctggaacttggcgtctgcgcgatgatttttgctacggcagtcggtattccggtcggcgtgctggctgcggttaaacgcggttccattttcgatcacacagcggttggcctggcgctgacaggttattcaatgcctatcttctggtggggcatgatgctgatcatgctggtttcggtgcactggaacctgacgcccgtctccggtcgcgtgagcgatatggtgatcctcgatgactccaatccgttaaccggttttatgctaatcgacaccgccatctgggacaccaaaccgggtctgtatgaaccgacttcgccaccgattatcaccgataaaaccatcgtgatggccggttcagttaccgataacttctcaacccgcgaaacgtctggcgtgatccgtggttttgatgtcaacaccggggagctgctgtgggccacatgcacagcctgtacaagccgcgtgaaaattggaactcgttggaaccgctgcctgcagaacaatgagcagacggaatacaaaaccgtgcgcggattaacccgcggtctaatgttattaaatatgttaaataaacttgatggcggtgccagcgtccggctgatggcagaactcagcggcctgcatcgcaccactgtgcggcgactgctggagacgctgcaggaagagggatatgtccgccgtagcccctccgatgatagttttcgactgaccatcaaagtgcggcaattaagcgaaggatttcgtgacgaacagtggatttctgcactggcggccccactgctgggcgatctgttgcgcgaagtggtatggccgacagatgtgtccacgctggatgtgatgcatgggacgtggcgcacttcaaacagcataaaaactacggtcatcaccagcaaaagcacgctcgccattgccccggaaagcccggtcattagcgctgtggtgaaggtaaccactttttccgagtccatccgctgcagcattcgctccggcgacatatgcaaattaagaaaaggcaacatctcctgcaatttaaaaagtttgcgcgtcagctccttattaaacttcggcagcatagagataaattcgttaaacgatgccgccagtacgccgaccagcgcggttagtgcgatcagcatcaccaccactacaatcgtaatggcaacggggcgttgtactccccgacgaataaaccatgtgacgagcgggttgaggacgatggcaaaaaacagcgccagtaacagctgcacatga

SEQ ID NO: 143453 - DNA, 947 bp, Homo sapiens
atgggtggtggcatcacttatcttcttgaaaaagcgcgcgagaaatcgaacgccaaaatgattgttatcgatccgcgatataccgatacggctgccggtcgtgaagacgaatggctccctattcgcccgggcaccgatgccgcgctgttttttctgctggcgagtttatcgctggtgacacatgctgcgttgtgtcaggatattgacgcagatttcatgtcgaggactaccatgaacaagtttttatttgccgctgcattgatcgtcagtggcctgctcgttggctgtaatcaactcacccaatacaccatcaccgaacaagaaattaaccagtcgcttgcgaaacataataatttctcaaaagatatcggtttacccggcgtggctgacgcccatattgttctgacaaacctgaccagccaaattggtcgcgaagagccgaataaggttaccctaaccggagacgccaatctggacatgaactccctgttcggtagtcagaaagcgaccatgaaactgaagctgaaagcgctgcccgtgtttgataaagaaaaaggtgcgatcttcctgaaagagatggaagtggtcgatgcgacggtacaaccggaaaaaatgcaaacggtgatgcagacgttgcttccctatttgaaccaggcattacgcaattactttaaccagcaacctgcttacgtcctgcgcgaagatggcagccagggcgaagcaatggcgaaaaaactggcgaaaggcattgaagtgaagccaggcgaaattgtcattccatttactgattaatcacgagggcgcattcgcgccctttatttttcgtgcaaaggaaaacgtttccgcttatcctttgtgtccggcaaaaacatcccttcagccggagcatagagattaatgactgcaccatcccaggtattaaagatccgccgcccagacgactggca

SEQ ID NO: 143454 - DNA, 1830 bp, Homo sapiens
atggtgggaagcggaaaatatgcttattcagcagcttctggtgggcgacgaagtgctacgaaagtaatggtagttgtaactgacggtgaatcacatgatggttcaatgttgaaagctgtgattgatcaatgcaaccatgacaatatactgaggtttggcatagcagttcttgggtacttaaacagaaacgcccttgatactaaaaatttaataaaagaaataaaagcaatcgctagtattccaacagaaagatactttttcaatgtgtctgatgaagcagctctactagaaaaggctgggacattaggagaacaaattttcagcattgaaggaagaacagaagtgacagtgattctactggaactgggttcccttcacaaactggcaaaaccccaggttgatgggacagaagtaacatgccaggtggctgcatctcagaagtctgttgcctgcgatgtaggctaccctgctttaaagagagaacaacaggtgacttttactattaactttgacttcaatcttcaaaaccttcagaatcaggcgtctctcagtttccaagccttaagtgaaagccaagaagaaaacaaggctgataatttggtcaacctcaaaattcctctcctgtatgatgctgaaattcacttaacaagttttgaagatgttggtccaaaattcatcttctccctgaaggtaacaacaggaagtgttccagtaagcatggcaactgtaatcatccacatccctcagtataccaaagaaaagaacccactgatgtacctaactggggtgcaaacagacaaggctggtgacatcagttgtaatgcagatatcaatccactgaaaataggacaaacatcttcttctgtatctttcaaaagtgaaaatttcaggcacaccaaagaattggcggaagctcgatggcaagccagagtgacactgaactgtgaaggcattttaaattgttgtttggcctacaatgttggtctcccagaagcaaaaatattttccggtccttcaagtgaacagtttggctatgcagtgcagcagtttataaatccaaaaggcaactgcaggaggctccaaccatccccactcaccctggaacttcagattctgaatctccactctctagagctcttttcagtgattaaatgggctgttgttggcttatcaaataagaaccgtaatatcttcatggaatgctactatgagctgaatgggatgcctgagatactgcctctaggaagcaaagtggctcaaggctatattgtgtttgtatgcgcttctgggttcttcgctcggattttggttctggtggagcgtgtccatgggcggcccgtggccctgtcatctggcggtgttgtcagagataagagagaaatagcaccactgtccccagcccgagcagagaatgggcatcttaggttttctgtctcacctgtattgggtgcttcagatactttctccgggaaccagatgagttgttttgaggggccaccaaccctaatctacggatttcaggctctttccttgttggtgtttgcagagtttcatcctgaatcctcctcttcattctgcagattgtctctgggcccattccctgcgcaggtccctatctccagccagcctccccttctgagttccagatcagtatttccatcagccaccaaatttctccagctagacagtctttgttcagtgaccaatcatttaccagcagaacatacagaagagtggctccctacaggggagaatcctagcactgcaaatcatgagacaatagactctgtgtatgacagtgattcctatgccccttcaggtgatccatag

SEQ ID NO: 143455 - DNA, 1491 bp, Homo sapiens
ttacaatcgggggggttctgcggctttatttggctgccgatgcaattcgccggtattgtgggcgatggtgtgtgggtaaggtctgggcggcgcgtttccgtttgtttgctgctggcgctcgatcactctgtgcacccggctattgctggcaagctggtggcgtttatgcagggaatcggttttatcatcgccgggcttgccccgtggttttctggcgtgctgcgtagtatcagcggcaattacctgatggactgggcatttcatgcgctgtgcgtcgttgggctgatgatcataaccctgcgttttgcaccagtacgttttccgcagctgtgggtcaaagaggcatgatgcgacgcttgttcctgcgctttgttcatgccggatgcggctaatgtagatcgctgaacttgtaggcctggccctgggcgcgaacgtctgcgacgtatggcgttgccaatggaagatgaagcgctggtactgttgctgattgaaaagatgcgcgaaagcggcgacatccacagccatcacggctggctgcatctgccagatcacaaagcgggcttcagcgaagagcagcaggccatctggcaaaaagcagagccactgtttggtgacgaaccgtggtgggtgcgtgaccccagcgccatgttctctttctgttgtagctccagcagtagttcgatgattggcgctagaatggtccccgtccagcgcggtggtcggttcatcggcaatcagcagttttggccgacaggcaatcgccatggcgatcatcacgcgctggctcatgccgccggaaagctgatgcgggtaaacatccagacgcgatgccggatcgggaataccgacctgattcagcaggtcaatcgctcgctgacggcgggtacttttgttgccgccctgatgcaccttaatcgcttccataatctggaaacccacggtgtagcacgggttaaggctggtcatcgggtcctggaagatcatcgccacttcggcacccaccaggttgcggcgctctttttctgagatacgctgcaaatcctggccgttaaactccagtttttctgccattacgcggcccggataatcaatcagccccataatcgccagtgaactgaccgacttaccggagccggactcacccacaatcccgaccacttcgccctgttttacgctgtagctgatgcggtctacggcgcggaacggcgcgctttcgtggccgttatgcacttgaagctccatccaaggtacaataataatctcgcccgcgggaactgaagcatcgtaatcatcggtgaaacgcgacagctcgcagttgagtagtgagagataacgctcatctgccaataatccttgtatctgattaataaagattacactgtctgcgttatttctcaactgaggaatgaatcccggatatcttaaccagcgtggtgcatcgggattgtccccagtcatacggcggaacgtcgccatcgtgcgccgctgcat

SEQ ID NO: 143456 - DNA, 1129 bp, Homo sapiens
atgactttgccgtttaaaccccatgtgctggcgctaatttgcagtgccgggctttgtgccgcctctaccgggctatatataaaaagccgcacagtggaagcgcctgtggaaccgcaatcgacacaactggctgtgtctgacgctgccgcggttacgtttcctgcaacggtttccgcacctcccgtaacacccgccgtcgtcaaatccgcattcagcactgcacaaatagatcaatgggtcgcgcccgtcgcgctgtatcccgacgccctactttcgcaggtgctgatggcatcaacctatccgacaaacgttgctcaagcagtgcaatggtcgcacgataatccacttaaacaaggcgatgctgctattcaggcggtatctgaccagccgtgggacgccagcgttaaatcactggtggcctttccacaattgatggcattgatgggcgaaaacccgcaatgggtgcaaaacctgggcgatgcttttctggcccagccgcaggacgtgatggactcggtacagcgattgcggcaactggcgcaacaaaccggctcgctgaagtcatcaaccgaacagaaagttattaccacaacgaagaaagctgtaccggtaaaacaggggttaaaaaatcaacaaagtgttaacggttcctgcatgacaaacatcggtcacttcggtgctgcgggtaaactgctgaatgcgcataaagttcagttgccgacccgcttgtgggtggcaccgccaacccgtatgaacgccgcacagttgaccgaagaaggctactcaagcgtcttcggtaagagtggtgcgcgtatcgagatccctggctgttccctgtgtatgggtaaccaggcgcgtgtggcggacggtgcaacggtggtttccacctctacccgtaacttcccgaaccgtctgggtactggcgcgaatgtctttcctggcttctgcggaactggcggctgttgcggcgctgattggcaaactgccgacgccggaagagtaccagacctacgtggcgcaggctgcgataattacatcaatggcgcaatgcgatttcggtgcattgccgggagcagaggaacacactatggattacgaatttctgcgcgatattaccggagtggtaaag

SEQ ID NO: 143457 - DNA, 2466 bp, Homo sapiens
ttactgctggcgtagctggagatccagcggcgttttgctgggttcgccgccaatttctcgcgccagtttcggcaccagatatcccgacaccagtgtcagcaactcacgcataatctgccgtgcttcgtcatcactcaccataaaatgcgccgcgccctgtactttatcgagcacatgcaggtaatacggcattacgccggcatcgaacaacgcattactcaggtttgccagcgtttgtgcgttatcgttcacatcacgtaacagaacgctctggttcagcaaagtaacgcctacccggcgcaacttagccatcgcctgacggaatgtttcatctacctcatgggcatggttgatgtgattcaccagcaagatttgcagcgtagaacgggcaaagcattcaaccagcgcctcggtgatacgtgccgggatcacaatcggcagacggctgtgaatccgcagacggtgcgcaacaaccgtcttccggagcctgtcatacgcgtaaaacagccagcgctggcgcgatttagccccgacgtatccccactgttcgtccatttccgcgcagacgatgacgtcactgcccggcgggttgagaagcggtgtaagtgaactgcagttgccatgttttacggcagtgagagcagagatagcgctgatgtccggcagtgcttttgccgttacgcaccaccccgtcagtagctgaacaggagggacagctgccttcacttccggcaaggcgcgggtttcaacatttcccccttcctgctgggtaaagacatcgcccgattcacataacggtccggcgacgacggtttccaccgttggcgcgtgttccagagaacgaccatcagctgccagggcacgtgaccctgctgcatgggcgacaaagtcattccggcaaccattctgggcattcagtccgatcgcgtgattcgcggccaccgctttatgggcgagccggaattcaccatcgataacgccgatcagtatccggaaattctgcgtgagcgtgggaaagtcatcgccgattacgaagaacgtaaggcgaagattaaagccgatgccgaagaagcagcgcgtaagattggcggtaacgctgacgcaaaattcgaagagaaattcctcgcggtgccggctgaagcgctggtttacaccatgaaaggtgaccagaaatacttcccggtgtatgcgaacgacggcaaactgctgccgaactttatcttcgttgccaacatcgaatcgaaagatccgcagcagattatctccggtaacgagaaagtcgttcgtccgcgtctggcggatgccgagttcttcttcaacaccgaccgtaaaaaacgtcttgaagataacctgccgggcctctcgaaaatcggcattagcagcccagatatagcactggagagactcaggattattcaagaagtgctgccagcactcgaaaatgtgattaagcaatttctcgtagattttgatctcttcggaaatgcgcaagcaatacggcaccttcacgatgtaaacacgatcgaggaaggcttcgttgtttttgttattacggaaagtgacccattcggactcgttcgagtgtgcgagaataatcccgttgaacggcagggcggagataccttccgtcccgttgtagttaccttccaatgctgtcatcacccgtacaggcaataaacgcgatattcggaccgctacgcccagcagccaccagtggaaggtaacgcattccccattacaggttattttccagggtagtttgctggaatcgggcggtcgcccggtgaagcgctggtactgttgctgattgaaaagatgcgcgaaagcggcgacatccacagccatcacggctggctgcatctgccagatcacaaagcgggcttcagcgaagagcagcaggccatctggcaaaaagcagagccactgtttggtgacgaaccgtggtgggtgcgtgacagtccaggctatttcgccctgatggttcgcgccaagttcaataactgcgtaatcgtattccggcgttaagcgcaacagcgtcatcggtacaccgatgtcgttgttgagattgcctgccgtataaagcgtgttgccgcactggcttaaaatcgccgccgtcatctctttaacggaggttttgccggaggaccccgtcagagcaaccacgcgcgccggaacttgctggcgaacccatgcagccagttcaccaaacgccagacgcgtatccttgacgattaactgcggcaggtcgatgtccagcggacggctaaccagtagtgcgcctgcgccgccagctttcgcctggtcggcaaaatcgtgggcatcaaaacgttcgcctttcagggcaacaaacaggcagcccggcgtcagttttcgggtatcagtggttacagcatcaagggtgatatctgcaccttgcagttcaccgttgagaatgtcggtaagttggctaagggttacgctaatcat

SEQ ID NO: 143458 - DNA, 929 bp, Homo sapiens
cctgcgcgacggaacgacaaacagacaccagcacaaacagaacaaaaagcccaaacgacaccacacccagaagggaacacactaacacaggcaccgacaacagcgcacacggccgcggcagacagacgcgacaagagcaggcaagcaacaaaaggataaagcaacaagggaaaagaacaaaagagagacgcgaagaagagaaaccaccgaaagaagccgacgcacggacgaaaagaagcggcacccacaaggaagaaaaaaaattatcgtcgccgccgagaaagtccaagtcacacgaggggggggggagagaagaccgctcccccccaccgccgagtctgctcctgcaagtactggcggctgttgcggcgctgattggcaaatctgccgacgccggaagagtaccagacctacgtggcgcagataaaacagccgttgatacttaccgttatctgaacttcaaccagctttctcagtacaccgagaaagccgatggggctgcgataattacatcaatggcgcaatgcgatttcggtgcattgccgggagcagaggaacacactatggattacgaatttctgcgcgatattaccggagtggtaaaggtgcgtatgtccatggggcatgaagtggtcgggcactggtttaatgaagaggtgaaagaaaacctggccttgcttgatgaagtggaacaagcagcgcacgcactgaaaggtagcgaacggtcctggcaacgggcagggcatgaatacaccctgtggatggacggtgaagaggtgatggttcgcgccaatcaactggaattcgctggcgatgaaatggaagaggggatgaactactacgacgaagaaagcctgtcgctatgcggcgttgaggattttctgcaggtcgtggcggcttaccggaatttcgtgcagcagaagtactaa

SEQ ID NO: 143459 - DNA, 5375 bp, Homo sapiens
gaattcctgcaaacccagcgcaactacggtcccccggtcagacccaggatggggccagaacggacaggggccgcgccgctgccgctgctgctggtgttagcgctcagtcaaggcattttaaattgttgtttggcctacaatgttggtctcccagaagcaaaaatattttccggtccttcaagtgaacagtttgggtatgcagtgcagcagtttataaatccaaaaggcaactggttactggttggttcaccctggagtggctttcctgagaaccgaatgggagatgtgtataaatgtcctgttgacctatccactgccacatgtgaaaaactaaatttgcaaacttcaacaagcattccaaatgttactgagatgaaaaccaacatgagcctcggcttgatcctcaccaggaacatgggaactggaggttttctcacatgtggtcctctgtgggcacagcaatgtgggaatcagtattacacaacgggtgtgtgttctgacatcagtcctgattttcagctctcagccagcttctcacctgcaactcagccctgcccttccctcatagatgttgtggttgtgtgtgatgaatcaaatagtatttatccttgggatgcagtaaagaattttttggaaaaatttgtacaaggccttgatataggcccccacaaagacacagggtggggttaattcagtatgccaataatccaagagttgtgtttaacttgaacacatataaaaccaaagaagaaatgattgtagcaacatcccagacatcccaatatggtggggacctcacaaacacatttggagcaattcaatatgcaagaaaatatgcttattcagcagcttctggtgggcgacgaagtgctacaaaagtaatggtagttgtaactgacggtgaatcacatgatggttcaatgttgaaagctgtgattgatcaatgcaaccatgacaatatactgaggtttggcatagcagttcttgggtacttaaacagaaacgcccttgatactaaaaatttaataaaagaaataaaagcgatcgctagtattccaacagaaagatactttttcaatgtgtctgatgaagcagctctactagaaaaggctgggacattaggagaacaaattttcagcattgaaggtactgttcaaggaggagacaactttcagatggaaatgtcacaagtgggattcagtgcagattactcttctcaaaatgatattctgatgctgggtgcagtgggagcttttggctggagtgggaccattgtccagaagacatctcatggccatttgatctttcctaaacaagcctttgaccaaattctgcaggacagaaatcacagttcatatttaggttactctgtggctgcaatttctactggagaaagcactcactttgttgctggtgctcctcgggcaaattataccggccagatagtgctatatagtgtgaatgagaatggcaatatcacggttattcaggctcaccgaggtgaccagattggctcctattttggtagtgtgctgtgttcagttgatgtggataaagacaccattacagacgtgctcttggtaggtgcaccaatgtacatgagtgacctaaagaaagaggaaggaagagtctacctgtttactatcaaaaagggcattttgggtcagcaccaatttcttgaaggccccgagggcattgaaaacactcgatttggttcagcaattgcagctctttcagacatcaacatggatggctttaatgatgtgattgttggttcaccactagaaaatcagaattctggagctgtatacatttacaatggtcatcagggcactatccgcacaaagtattcccagaaaatcttgggatccgatggagcctttaggagccatctccagtactttgggaggtccttggatggctatggagatttaaatggggattccatcaccgatgtgtctattggtgcctttggacaagtggttcaactctggtcacaaagtattgctgatgtagctatagaagcttcattcacaccagaaaaaatcactttggtcaacaagaatgctcagataattctcaaactctgcttcagtgcaaagttcagacctactaagcaaaacaatcaagtggccattgtatataacatcacacttgatgcagatggattttcatccagagtaacctccagggggttatttaaagaaaacaatgaaaggtgcctgcagaagaatatggtagtaaatcaagcacagagttgccccgagcacatcatttatatacaggagccctctgatgttgtcaactctttggatttgcgtgtggacatcagtctggaaaaccctggcactagccctgcccttgaagcctattctgagactgccaaggtcttcagtattcctttccacaaagactgtggtgaggatggactttgcatttctgatctagtcctagatgtccgacaaataccagctgctcaagaacaaccctttattgtcagcaaccaaaacaaaaggttaacattttcagtaacactgaaaaataaaagggaaagtgcatacaacactggaattgttgttgatttttcagaaaacttgttttttgcatcattctccctaccggttgatgggacagaagtaacatgccaggtggctgcatctcagaagtctgttgcctgcgatgtaggctaccctgctttaaagagagaacaacaggtgacttttactattaactttgacttcaatcttcaaaaccttcagaatcaggcgtctctcagtttccaagccttaagtgaaagccaagaagaaaacaaggctgataatttggtcaacctcaaaattcctctcctgtatgatgctgaaattcacttaacaagatctaccaacataaatttttatgaaatctcttcggatgggaatgttccttcaatcgtgcacagttttgaagatgttggtccaaaattcatcttctccctgaaggtaacaacaggaagtgttccagtaagcatggcaactgtaatcatccacatccctcagtataccaaagaaaagaacccactgatgtacctaactggggtgcaaacagacaaggctggtgacatcagttgtaatgcagatatcaatccactgaaaataggacaaacatcttcttctgtatctttcaaaagtgaaaatttcaggcacaccaaagaattgaactgcagaactgcttcctgtagtaatgttacctgctggttgaaagacgttcacatgaaaggagaatactttgttaatgtgactaccagaatttggaacgggactttcgcatcatcaacgttccagacagtacagctaacggcagctgcagaaatcaacacctataaccctgagatatatgtgattgaagataacactgttacgattcccctgatgataatgaaacctgatgagaaagccgaagtaccaacaggagttataataggaagtataattgctggaatccttttgctgttagctctggttgcaattttatggaagctcggcttcttcaaaagaaaatatgaaaagatgaccaaaaatccagatgagattgatgagaccacagagctcagtagctgaaccagcagacctacctgcagtgggaaccggcagcatcccagccagggtttgctgtttgcgtgcatggatttctttttaaatcccatattttttttatcatgtcgtaggtaaactaacctggtattttaagagaaaactgcaggtcagtttggatgaagaaattgtggggggtgggggaggtgcggggggcaggtagggaaataatagggaaaatacctattttatatgatgggggaaaaaaagtaatctttaaactggctggcccagagtttacattctaatttgcattgtgtcagaaacatgaaatgcttccaagcatgacaacttttaaagaaaaatatgatactctcagattttaagggggaaaactgttctctttaaaatatttgtctttaaacagcaactacagaagtggaagtgcttgatatgtaagtacttccacttgtgtatattttaatgaatattgatgttaacaagaggggaaaacaaaacacaggttttttcaatttatgctgctcatccaaagttgccacagatgatacttccaagtgataattttatttataaactaggtaaaatttgttgttggttccttttataccacggctgccccttccacaccccatcttgctctaatgatcaaaacatgcttgaataactgagcttagagtatacctcctatatgtccatttaagttaggagagggggcgatatagagactaaggcacaaaattttgtttaaaactcagaatataacatttatgtaaaatcccatctgctagaagcccatcctgtgccagaggaaggaaaaggaggaaatttcctttctcttttaggaggcacaacagttctcttctaggatttgtttggctgactggcagtaacctagtgaatttttgaaagatgagtaatttctttggcaaccttcctcctcccttactgaaccactctcccacctcctggtggtaccattattatagaagccctctacagcctgactttctctccagcggtccaaagttatcccctcctttacccctcatccaaagttcccactccttcaggacagctgctgtgcattagatattaggggggaaagtcatctgtttaatttacacacttgcatgaattactgtatataaactccttaacttcagggagctattttcatttagtgctaaacaagtaagaaaaataagctagagtgaatttctaaatgttggaatgttatgggatgtaaacaatgtaaagtaaaacactctcaggatttcaccagaagttacagatgaggcactggaaaccaccaccaaattagcaggtgcaccttctgtggctgtcttgtttctgaagtactttttcttccacaagagtgaatttgacctaggcaagtttgttcaaaaggtagatcctgagatgatttggtcagattgggataaggcccagcaatctgcattttaacaagcaccccagtcactaggatgcagatggaccacactttgagaaacaccacccatttctactttttgcaccttattttctctgttcctgagcccccacattctctaggagaaacttagattaaaattcacagacactacatatctaaagctttgacaagtccttgacctctataaacttcagagtcctcattataaaatgggaagactgagctggagttcagcagtgatgctttttagttttaaaagtctatgatctgatctggacttcctataatacaaatacacaatcctccaagaatttgacttggaaaaggaattc

SEQ ID NO: 143460 - DNA, 2582 bp, Homo sapiens
atgttcgccattatcagctactccagccttgctgctgtactgctgaccgcgactctgaccgccgcaggcattatctccttccccgtggcgctctgtctggtgattggtgctaacctcggttccggtctgctggcaatgctcaacaacagtgccgccaatgccgcagcccgccgtgtcgcgctgggtagtctgctgtttaagctggtgggtagcctgattatcctgccgtttgtccatttgctggcagagacaatggggaagttgtcattgccaaaagcggaactggtgatctatttccacgtcttctacaaccttgtacgttgcctggtcatgctgccatttgttgacccgatggcacggttttgcaaaacgattattcgcgatgaaccggaactggatacccagctacggcctaaacatctggatgtcagcgcgctggatacgcccacgcttgctctggcgaacgccgcgcgcgaaacctgcgcattggcgacgccatggacagatgatggaagaaaatatgcttattcagcagcttctggtgggcgacgaagtgctacgaaagtaatggtagttgtaactgacggtgaatcacatgatggttcaatgttgaaagctgtgattgatcaatgcaaccatgacaatatactgaggtttggcatagcagttcttgggtacttaaacagaaacgcccttgatactaaaaatttaataaaagaaataaaagcaatcgctagtattccaacagaaagatactttttcaatgtgtctgatgaagcagctctactagaaaaggctgggacattaggagaacaaattttcagcattgaagatatggacctcggcgatgaggtctacaccgtcgggcgtccacatccgatgatcgacccaaccttacgcaaccagttaattgccgatctcggcgctaaaccgcaagtgcgcgtgttgctgcttgatgtcgtgattggcttcggtgcgaccgccgatcctgccgcctcgctggtgagcgcctggcaaaaagcctgtgccgcgcgtttagataatcaaccactgtatgccattgccacggtgacaggcactgaacgtgacccgcaatgccgctcgcagcaaatcgccacgctggaagatgcggggattgcggtcgtgagttcgctaccggaagccaccttgctggcggcagcgttaattcatccgctctcgcctgccgcacagcaacacacaccgtcattactggaaaacgtcgccgtgattaacatcggattacgcagctttgcgctggagctacaaagcgccagcaaaccggttgtgcattaccaatggtcgccagtcgccgggcagggaaaatggctggcgaatcctgagctgctggaagccgatgcagatgcggaatacgcggcagtgatcgacatcgatctggcggatattaaagagccaatcctgtgtgctccgaacgacccggatgacgcgcgtccgctgtctgcggtacagggtgagaagatcgacgaagtgtttatcggttcctgcatgaccaacatcggtcacttccgtgctgcgggtaaactgctggatgcgcataaaggtcagttgccgacccgcctgtgggtggcaccgccaacccgtatggacgccgcacagttgaccgaagaaggctactacagcgtcttcggtaagagtggtgcgcgcgtatcgagtatcccctgtgctgttccctgtgtatgggcgcgtgtggcggacggtgcaacggtggtttccacctctacccgtaacttcccgaaccgtctgggtactggcgcgaatgtcttcctggcttctgcggaactggcggctgttgcggcgctgattggcaaactgccgacgccggaagagtaccagacctacgtggcgcaggtagataaaacagccgttgatacttaccgttatctgaacttcaaccagctttctcagtacaccgagaaagccgatgggcttttgaagccccgtttccgcccgctggcagcggaaaattctcgacacattagcgacttatcatgagcaacatcgcgatgaacctggccctgggcgcgaacgtctgcgacgtatggcgttgccaatggaagatgaagcgctggtactgttgctgattgaaaagatgcgcgaaagcggcgacatccacagccatcacggctggctgcatctgccagatcacaaagcgggcttcagcgaagagcagcaggccatctggcaaaaagcagagccactgtttggtgacgaaccgtggtgggtgcgtgacctggcaaaagagacgggaaccgacgagcaggcaatgcgcctgactctacgccaggcggcgcagcaaggaataattaccgcgatcgttaaagatcgttattaccgtaacgatcggattgtcgagtttgccaatatgatccgcgatctcgatcaggagtgtggttcaacctgcgcggcggatttccgcgatcgcttaggcgtaggccgaaagctggcaattcagattctggaatattttgaccgcattggctttacgcgtcgtcgtggaaatgatcatttattgcgcgacgcattattattttccggaaaaataa

SEQ ID NO: 143461 - DNA, 2409 bp, Homo sapiens; identical to SEQ ID NO: 130080

SEQ ID NO: 143462 - DNA, 1408 bp, Homo sapiens
gtccctggagcagatggttccaggccctgggcattcttgtgacatggatacccatgccatgccgccagctgctaagtctggaagtggtcatcaagtgatttgggtggaagggttggggggacacgaggaggaaggagaggatgtcattcagaacagaagcatcgggaattggatagattcagttattcattggcggcagcaggtgcgccagcgattggccgatttgcgtttccgaagggaggccatcaggcgctggcgcggacggcattgttttttaatgttcgaaacccgcttctggtgcttggaaaaaggcagtcatataaaaaatcggtttgccgttttgaatagcagcaacccggcgggcgctgaagctgttaccgtcacgcagcgtttcgacatcataaataatcggcttcttactatcgccagggcgaagaaagtaaaaattcatcaaattcgggcttttgttgaagtggctcgtcagggcagcattcgcggagcgagccgaatgttgaatatgtcgcaaccggcactgagtaaatctattcaggagctagaagaagggttagcggcgcaactcttttttcgccgtagtaaaggcgtgacgttaactgatgccggtgaaagtttttatcagcacgccagtctaattcttgaagagctgcgcgcagcccaagaggatattcgccaacgacaagggcaactggcagggcagattaatatcggcatgggggccagtatttcccgcagtctgatgccagctgtcatatctcgttttcatcagcagcatccgcaggtaaaagtacgcattatggaagggcaactggtgtcgatgactaatgaattgcgtcagggcgaattggatttcaccatcaatacctattatcagggaccgtacgaccacgaatttacttttgagaaattactggaaaagcaattcgcgatcttttgccgcccgggacaccccgccattggtgcccgttcgatcaaacagttactggattacagctggacaatgccgacgccacacggcagctactacaaacagttgagtgaattgcttgacgatcaggcgcaaacgccacaggttttggagttgctcctcgctaatgcgctcttccagcgcctcgcaggcaggcaaattagcaaaaggcgtatcgctggtggaaacatccgcctcgacgatcagcgcatcggcgtttttgagctttttgagcaaacgggtgggcaggggagccatatcgtggctacccatatgaatactgccaatcagatgaaaatggcgattgccggggagggtgatatcgatggcaggccaggtgtaatgattaccgcgcagcgcggcccaaagcgtttttacccggtacaacagatccatacgacctccctttgtgaaatatcatgctag

SEQ ID NO: 143463 - DNA, 1821 bp, Homo sapiens; identical to SEQ ID NO: 131867

SEQ ID NO: 143464 - DNA, 1049 bp, Homo sapiens; identical to SEQ ID NO: 138829

SEQ ID NO: 143465 - DNA, 1398 bp, Homo sapiens
ttattgatatgcatcagtgatcagccaactgccccacgcctgctgcccgagcagcggcagcgacagcagcagtagcggcagcattgcaacaatccctattttctcaatcaacatctcttccgctagcactaccgactgctcctggaaaagcaacccgcggccttttacctcctccgtgctagtgtagatcgttctagtatccaaagactggaagaaatctctctcggtgccaaggtggagaaaggagggtggtagacagaggtggacaccaagaaagggaggaaacggaacccgactctgcggtgctgggcccaaggcagccacagctccaaaggggcccccggccgtggccgtgacttgacagagcctccggtctaacttctgatcaattccactgctctcctgacccctcaagacagtcccccattcaagcaccgcgggtacatttgcaagataaaacgccgcagacactaatgcaaatacattgcccgagttcccatcaccctgggttctcccctcgcaggcgtggggcccaatggccacgaacatgtcaggaaaacaaagctggggctgcgaggtggaacgatgaaacggcacacttggcggccgagggcagagcggagaagtcgccaccacagccaccggcgcccctttcttgcctgctcgtagatctgccctccggcccagaagaggccgaggaccatttcttagcccggcctgggctcggctactgccgccgccgcccgcgctctcgggctccgccggctgccgctccgtgttttcccccatcccggcttcacgttcaaggtttagctgcgaggtcacgtccattgacgtcagctccctgtctccctctacgtccgggctgtagccttcgagaacggttgtttcggctcctgttctgtgggcggctgaggaccgccggctgcccggctcggagaagaacaggttagaggaggcagctccagcccatgcataatcagggctccgcggcgcctccattctttcctcctcctcctcctcctcctcctcctcctcctcctcctcctcctcctcctcctcctcctcctcctcttccacctctcctcctcctcctccttctcctccacctcctcctcctcttcttgctctcgctcctttatgtaggatcaggacaaacacaccggccacgttgcagggcatagagtgtcggtgcatatatttagatggcagtagcaaggaacgcgtgcgtgtacggcccgagggccggtggctcggtgactcgctggctaggtgggtgttggggaagagggtgggtagcgtcgctgccgctgccgccgcgggtccgggtgctctgtcccagcccggcagccgagcgcgcagtgtcggagccccctcccaccccgccctcacccccat

SEQ ID NO: 143466 - DNA, 1779 bp, Homo sapiens
ctattcttggctctctgccagagcaaaatatttactttcacgggcgcttttctcctcccctctcctctgccccggttcttctgccctccctcttgctcttgctcggtttccttcctctcgcgttttttccgctctgctccttcttttgtttgttggtttctggtgctgctggctttcccccacccttgtcagcgcccggcttcctcttctctccttcgtgtctcctcgtccttctccccccgtcctcctcctctctccgcttccgcacccttgttgcgtctcgcccgtccggtcgttcctccttccggtttggtttccccgttcctcgccgccgcgcctctgtctttcttctgttccgttcgcctttgccctttcgtctccctttgcgctcgtctctccctcttcttctctcctattctgtttcgctctcgcctccccctctcctcctgctgtgctttttttctgtttgctctccgcggctgctgcctctctctcttctcttttcgttgcgttgtcttcttgtttccttttcttgttttctctgtgtcgcgttgcgtcgttcgtccgttttccttcctttttgtttgtctctgttctgtgcggctttccgtgcgctccctttgtccgctcccccctcttttgtcgcctgccctgttcttcgctcgtcctcgccgcccgtgtgccgcgtgtcgcggcgttcctctgtggtgctccctcctccttgtgcttgtgcgtcccctcttctctttgcttcttccgtgtgccgctcctgcgtccctctgttcttctgtctttcttctttgtgctctctgcctctctttttgctctgtgcgtgttttcctgctctcgtggtttcgctgcctcgccttctctttgtttttcccttgttgttcgtttggctttttgttctttttgttgcgtgcgtttgtgttgattgtttgtgttcttctttacactcccctcgcaggcgtggggcccaatggccacgaacatgtcaggaaaacaaagctggggctgcgaggtggaacgatgaaacggcacacttggcggccgagggcagagcggagaagtcgccaccacagccaccggcgcccctttcttgcctgctcgtagatctgccctccggcccagaagaggccgaggaccatttcttagcccggcctgggctcggctactgccgccgccgcccgcgctctcgggctccgccggctgccgctccgtgttttcccccatcccggcttcacgttcaaggtttagctgcgaggtcacgtccattgacgtcagctccctgtctccctctacgtccggctccgatgtctttttccgtccttcccatcgcgtccatcctttccctccctccttccgtcctcctcctccgtcctcctcctcctcctcctcctcctcttccacctctcctcctcctcctccttctcctccacctcctcctcctcttcttgctctcgctccggccacgttgcagggcatagagtgtcggtgcatatatttagatggcagtagcaaggaacgcgtgcgtgtacggctgagcatgcatgtgtgtacagatgcgtgtgtatgtgcgcgcgcgcgcccgagggccggtggctcggtgactcgctggctaggtgggtgttggggaagagggtgggtagcgtcgctgccgctgccgccgcgggtccgggtgctcttatttccagcaggagaaacttttgaaaatttcccacttttattcactacagacagctgaattaagtccctaactgcgtaatgttccatctccat

SEQ ID NO: 143467 - DNA, 674 bp, Homo sapiens
cgagccactaccgttatggaattaccgcgtcgacgatttcgtggggctccgacactgcgcgctcggctgttgttctgggacagagcacccggacccgcggcggcagcggcagcgacgctacccaccctcttccccaacacccacctagccagcgagtcaccgagccaccggccctcggggtaagccacagcgcgcacacggcagcgacggtgacggttcacacgctttgggttactaccatgcgccaataagggagattagaaacagaaaaggagattacagagagatcagagataagaggtgtacctctctgtgttccttgtcacatagcgcgcgcgcgcacatacacacgcatctgtacacacatgcatgctcagcccgtacacgcacgcgttccttgctactgccatctaaatatatgcaccgacactctatgccctgcaacgtggccggtgtgtttgtcctgatcctacataaaggtaggcaggtatgtgggagagtccagggcaggaacaaacagccacgcgcaatttaactgcagccaaactcaaagagaccttgagccttgccgaattgttttcactcaggccagggtgccccccaggaaaccggatatttttgcaatcagttgtggggattcctggcatttatttcattaaaatgttgctggaaaa

SEQ ID NO: 143468 - DNA, 1434 bp, Homo sapiens
atgatccccctggccagtgcatatcagggacagtgtgactggcggactgcgatcttcaagctggaacagctcccacaacttcgaatcagcctccagctctatcagatcaagctgttcctccgggagtcgatcagcgaatttaacgccgacgccgacaaagttcatcagatgcgcctgcgtaaagagagcggcatctgggaactgtttatccctggggcgcataacggtcagctctataaatacgagatgattgatgccaatggcaacttgcgtctgaagtccgacccttatgcctttgaagcgcaaatgcgcccggaaaccgcgtctcttatttgcgggctgccggaaaaggttgtacagactgaagagcgcaaaaaagcgaatcagtttgatgcgccaatctctatttatgaagttcacctgggttcctggcgtcgccacaccgacaacaatttctggttgagctaccgcgagctggccgatcaactggtgccttatgctaaatggatgggctttacccacctcgaactactgcacattaacgagcatcccttcgatggcagttggggttatcagccaaccggcctgtatgcgccaacccgccgttttggtactcgcgacgacttccgttatttcattgatgccgcacacgcagctggtctgaacgtgattctcgactgggtgccaggccacttcccgactgatgactttgcgcttgccgaatttgatggcacgaacttgtatgaacacagcgattcgcgtgaaagctatcatcaggactggaacacgctgatctacaactatggtcgccgtgaagtcagttactttctcgtcggtaacgcgctttactggatgaaccgttttggtattgatgcccgtaaagagggggagtggatcccgaacgaatttggcgggcgcgagaatcttgaagcgattgaattcttgcgtaataccaaccgtattcttggtgagcaggtttccggtgcggtgacaatggctgaggagtctaccgatttccctggcgtttctcgtccgcaggatatgggcggtctgggcttctggtacaagtggaacctcggctggatgcatgacaccctggactacatgaagctcgacccggtttatcgtcagtatcatcacgataaactgaccttcgggattctctacaactacactgaaaacttcgtcctgccgttgtcgcatgatgaagtggtccacggtaaaaaatcgattctcgaccgcatgccgggcgacgcatggcagaaattcgcgaacctgcgcgcctactatggctggatgtgggcattcccgggcaagaaactactgttcatgggtaacgaatttgcccagggccgcgagtggaaccatgacgccagcctcgactggcatctgttggaaggcggcgataactggcaccacgtcgtcctagcgtga

SEQ ID NO: 143469 - DNA, 1695 bp, Homo sapiens
ggaaaaaataggcctcggcctgaccgcttttgtgctgataaaaacgcaacatcacagcagcgaatggtattgccgctttgtcacggtggttaccgaaatgccagaagtgctggggttctggcgcatggctggtgaatacgattatctgatgcgcgtccaggttgccgacatgaaacgctacgacgagttttataagcgtctggtaaacagcgtgccggggctgtcggacgtcacttccagcttcgcgatggaacagattaaatacaccacttctttacccatcgaataaatatccagaatcaggtcaggacacaacgcgtgcgattatttgctcaattaagctggtatttccgtcgggaatggcgtcgctatctcggggctgtcgccttgcttgtcattatcgcgatgctgcaactggttccgccaaaagtggttggtattgttgtcgatggcgtgacagaacaacactttactaccgggcagatcctgatgtggatcgccaccatggtgctgattgccgttgtggtttatctcctgcgttacgtctggcgggtattgctgtttggtgcgtcttatcaactggctgttgaactgcgtgaagattattaccgtcagctaagccggcagcatcctgagttttacctgcgtcatcgcaccggtgacctcatggctcgtgcgaccaatgacgtcgatcgcgtcgtgtttgccgccggagaaggggtgctgacgctggtggattcactggtgatgggctgcgctgtgttgattatgatgtctacgcaaattagctggcagttgaccttattttccctgttgccgatgccagtgatggcgatcatgattaagcgcaacggcgatgctttgcatgaacgctttaagctggcacaggcggcgttttccagtcttaatgaccgcacccaggaaagcctcaccagtatccgcatgatcaaagcctttggtctggaagatcgccagtcggcgtattgccgcgagcagtccacgtatttggcatcaatgaagagacggacgcctgttagtcgaacatttgttcatccggtgatgaaaagcccttacggactgacgctcaattcccggagaataccgggtccacgcctggacgggagaacatcgatgagtcacatcacaacggaagatccagcaactttacgcctgccctttaaagagaaactctcttacggtattggcgacctggcctctaacatcctgctggatatcggtacgctttatcttttgaagttttataccgacgttctggggctgccaggcacctatggcggcattatctttttgatttcaaaattctttactgcgtttaccgatatgggtaccggcattatgttggattcccgacgcaagatcggtccaaaaggtaagttccgtccttttattctgtatgcgtcattcccggtcaccttactggcgatcgccaactttgtcggcacaccgtttgatgtcaccggtaaaacggtgatggccactattctgtttatgctttacggactgtttttcagcatgatgaactgctcctacggcgcaatggttcccgctatcaccaaaaaccccaacgacgcgcctcactggcggcatggcgtcagggcggcgctacgctgggcctgctgctgtgcagcggtggattcgtgccagttagattataggatctgtgatcggatatga

SEQ ID NO: 143470 - DNA, 1420 bp, Homo sapiens
atgagcctgcacatggtaactgccctcatagggaattctgtgaagaatgaagaagttttgtctttttcaagaatgtcacataaatggaatcatactgtaagcaacctcttgaggctggcgtctttcagcatgtgtgagaaccgtcaagtcgttggcgcgtttgtgacggattatttcgatgacgcccggcaaaatagaaaccacaataatcccgacgatcagcagcttaagagatattgtgaggattcagtccaggcactggctgaagccgttaatctgacaaccaccccttgctggaagcgcctgaaacggctggaggacgacggtatccttatcggcaaagtcgccctgctggatccggaaaaaataggcctcggcctgaccgcttttgtgctgataaaaacgcaacatcacagcagcgaatggtattgccgctttgtcacggtggttaccgaaatgccagaagtgctggggttctggcgcatggctggtgaatacgattatctgatgcgcgtccaggttgccgacatgaaacgctacgacgagttttataagcgtctgctggtatttccgtcgggaatggcgtcgctatctcggggctgtcgccttgcttgtcattatcgcgatgctgcaactggttccgccaaaagtggtggtattgttgtcgatggcgtgacagaacaacacttactaccggtaccgagctcctgcggtgccgctgacggctgccagcacgccgacgccgctgacgaatattttgtaagtaatggcaaactgtcagctcatcgatatccagtcgtcgcgtatccggtgaacaaaacgcaaaatcgtctgccaaatttttctccagcagcagaatactctcgttatgcagcgatattttttgctgttcatgataaatatcgaatgaacgacgaatgaggatcaccgagcagacagagtcatgattatcccttataaaaggttgtacagactgaagagcgcaaaaaagcgaatcagttgatgcgcaatctctatttatgaagttcacctgggttcctggcgtcgccacaccgaaacaatttctggttgagctaccgcgagctggccgatcaactggtgcctttgctaaatggatgggctttacccacctcgaactactgcccattaacgagatccccgccgttttggtactcgcgacgacttccgttatttcattgatgccgacacgcagctggtctgaacgtgattctcgactgggtgccaggccacttccgactgatgactttgcgcttgccgaatttgatggcacgaacttgtatgacacagcgatccgcgtgaaggctatcatcaggacggccacgttgcagggcatagagtgtcggtgcatatatttaatggcagtagcaaggaacgcgtgcgtgtacggctgagcatgcat

SEQ ID NO: 143471 - DNA, 405 bp, Homo sapiens
tgcatgtctttcagtggaccatcagatgattgcaactcatttaaatttactatcccacgatgtacaaggagagcaatatgaattagctccgtgatctctgccaaacttctgtgacatgagtagatcccactgaccatgtcatagttctgacatgaagtgttcacgctgctgggcccagctgctttagagataaggagcaccaccaagcccctcaactggaggctattccagctgtcatgtacaagccccagtaactaaaaggaagcggcaattcttgaccctcagagtaaggtggcttcctggagcagtgaccagaaacgaactttaactcgtgcttactgcacgccagactgggcaaacaacagtcccagctcagcactgcccccggccacccggggtagaaac

SEQ ID NO: 143472 - DNA, 1094 bp, Homo sapiens
  misc_feature (1)...(1094): n = a,t,c or g
tcaagcagggcagtcatatcgtaaaactccaaaataatctcctttgactccatgtcttgcattcaggtcacgctgatgcaaagggtgggctcccatggtcttgggcagctctgcccctgtggctttgcagggtacagccaccctcttggctgctttcatgggctggtgttgagtggctgcagcttttctgggcacacggtacaagctgtcagtggatctaccgttctggggtctggagaatggtggccctcttctcacagctccactaaacggtgccccagtagggacttcttgtggaggctccaaccctacatttcccttctgcagtgccctaccagaggttctccatgagggctccgcccctttgctccggttcccaacaagttcctcatctccatctgagaccacctcagcctggatcttattgttcatatcactgtcagcatttttgtcaaagccattcaacaagtctctggctgtggtaagcagagggtgctgagtgcccaccagcttccgcacctgcatagcgatgttgctgagctcgtcgctcagcaggcagcgaaggctcatgaaggacgtggggtaccccacgatcttctccgcctctgacactacctgattccagtgggccggggactttggaggaccngacccacgccaagagccccacccgaggagttgttgtcgagggacggggacccaccacaggcgaccgcggggaacccgaggctccaagataacgtggcaagtgcaacagcagctgccgaaagttcatggtttgagtctggaagggtctgggacctgggggtatccagaagtgccgcgggaaacaaaccaggggcagaggaggaacttacagtaactaaaaggaagcggcaattcttgaccctcagagtaaggtggcttcctggagcagtgaccagaaacgaactttaactgctgctttctgcagcccaggctgggcaaacaacagtcccagctcagcactgcccccggccacccggggtagaaaccacagccactgcctatgtggaggacgccatatggaggcacgaaatcgtcgaccgggaattcagaccggtagtcgaggcgtg

SEQ ID NO: 143473 - DNA, 6043 bp, Homo sapiens
gggaagctgccaagcctacttcatgcttgcattcggtgcatttgcagacttaacaccatgtggaatcgaccaaggtagcttacacactccagagcagcagctccaactgtacctgaggccctttgaccaaggctggaaccagagcaggggtgtgcttcactgggggaaacttactcatctgggttccctggattcctcagaactagcaggaagaaagattaagtttgctggtctgcagagactgtggccaccctttcccctaggggctcaggcccagggagatcagagttctgcccctgagcccctggatggggttggagttcctgcagggaggcccagcccagagaggaggaaacaccaatccctggatgaatggacaacaggagctcaatctcacagacgcaggactgacccgagtacagtcaccgtctctctcccaaccctgagggacaatccctttgtggcacctggggaagagagtatccagacagctggtcggagtctggcagcgcgggcagcagtgcggcggccacggctcccggcgagaaggtgtcagccgaagcgcagccgctggctcttgctggatccgcaagtcggctaccgactggacagcagctactgcttccactgcctgcacctgccgctcagcagatccctctttgcacagggcaccccaccccgggaatcccaacgccaggagccatccgtggccatggcgggggcttctcggcacccgactgggacgccccggcagctccttgtggcgctcgcctgcctgctcttgagtcgccccgcgctgcagggacgggcatcctcacttgggaccgagcccgacccggcgctttacctgcccgcccggggtgcgcttgacggcactcgccccgacggccccagcgtgctgattgccaaccctggactccgggtgcccctgggtcgttccctttggctcgacccgctccgggatctggtgattggagtgcagccgggggaccggtgcgaagtcacggtactggacgccctgccgcggctcaagggcgcgctctccccgcgccgcttcccctgcaccttcgggccccgccaagtccagtacactcacttcggctcccacagccccggacgcgcccgggtgctgctgcagctgcgctacgacgccccgactcacactctggtgctgcccttcacgctggcggtggacttggtcttctcccagctggagctggtgacgcgtaacaggcctttggtagtggagaagctgcgaagctggagccgcgccatagacaggagagtgctggacttcgcctccctgaagtctggagccacggccacccgcaggtgccggcttaccccacttcctcacgaggacggccccctgcccaagtacgggcgcttggtggacgcggtgggggcccctctccccaggggcaagggcgtagactgtgaggctttcctccgtgctggggtgcgctatcagcacacagccacctcctcgcccaaccgtgactacgtgcccatgatggtggagctgctggggcctgagggccaagacgctgggtccgcgggtgtgctggtccgcgagcacttccagctgctcgtgaggatccgcggcggagccgagaacacaccgcccaggcccagcttcatggccacgatgatgatggaggtggatccactggtgctgacagccctgacgcctgacgcactggccgcggaggacgtcgagtcagaccctggtgacctggtgttcaacattctgaacgcccccactcacccaccagggcacccggggcaacagggctacgtggtcagcaccgacgaccctctagggcttccagtctccttcttcacccagcaggagctgagggagctgaagattgcctatcagccccctgcagagaactcccatggggagcgcctctttcagctggagctggaggtggtggacggagacggcgccgcctcagacccctttgccttcatggtgacagtgaaatccatgaatactctggtcccagtggctagccataacaggggacttgtgctttttgaaggtcagtcaaggcccttgtccagcacccacagcattcctatcagtgataaagataacctggaagaggtgaaaatggctgcagtcaggggcttgagacatgggcagctggtggtgtttggggcacctgctgggtgcaagtatttcacaccagcggacctggcagcagggcgagtggtgtatcagcatgatggcagcaacacctacagtgacaatatcatcttccggatggaggacgggcaccaccaagtggacttcctctttcccctcaccatcctacctgtggatgatgaaccaccaatggtcaatactaacacaggactctcactcactgaagggcaggtggtccagatctctccctttgtactgagtgctactgatattgactctgaggactcaaccatccactttgtgctggagaaccagcccctaaaaggaaatgaggaagagcctcagtgggagttggcccctggttcctcccactcaggccactacctgggggacctgttgctgcagcaggctgaactacctctctcaactgaagatgaagactggcactacatggaaaaggaagggctttatgagaaagtggtgactgagtggctacagagagacataatggaagggagactcttctaccgccatcttggaccacacagccctcaatctgtaatggtccagctggctttccatgtgcaggatgaccatgacccacccaatctctccaaacagcacattttcaccatcaaggtccaaccagtggatatactgagtccacagctgtatccaggaactacactagaaatgactgtacaagaataccaactcactcacttccagaagaatttcctccgatacattgaccaggactctgatgaccagaacctatggtacaccctactgacactcccgactgacacagatggcaaccaccaagtccgggctggagaaattgtgctcactgattcaccagacacactcatcatgcactttacccaagcccaggtaaatcagcataaagttgcctaccagcctccacagaaattgggtattgcaccacgggttgtgcagtttacttaccaggtggaagatgctgcaggcaatagcgtgccaggcacattcacattattcctgcaacctgtggacaaccagcccccagaagtcaccaacagaggctttgctatcttagagggaggcagctttaacctcagcagtaatgagctgcatgttacagacccagacacagacattgaccaaattgtcttcatattagtccggggtccccaacatggacacttgcagtactttaaaagatgtatggtcccaggggaatctttcatgcaagctgatgttattaacgggagtgtctcttaccagcatggcagagaccagacgactaccagtgacactttccatctggaagtaagtgatggggtgcaccatatacccatcaccatcccaatttctgtgcatcccaatgtggctaacagaagtcctaggatctctctcagaagtagttcattattggatgtttctatagacgtactagagaataaagccactgaaattaccatgggtgtcatccatggcaaaaggaaggatgtaggtgacttgatgctgtctttcattgtaaaggacagccccaaactgggcactattctggtaaatggtttgcccacagaacgattcacccaagaggatctcatcaatgggagagtagcctatgcccacactgcaggtgaagttggttttcaaaagcagcacgatgccttcagcctcatcctctccaaagattcttaccaatgggtagtggggaatagcataatagagaaagtacaggtacaagtaactgtgctgcctgtggacaatgtgggacccaaggtcttcgtcggggagtccttcattgtctatgaaggtgagaagaactccttgaccttacaacatctccatgttgaagatgtggacactcatcaagatgaactcctctgcacagtgactagtcagccagcctctggctacctggaaaagattgcatcagctcctggttcaaaaatgtcccagtctggtagccctatcagtgctttctccctcagagatatccaagtgaggcatatcaattatgtacagagtattcacaagggagtagagccacaagaggaccaattcaccttttattgctctgatggcatcaacttctccccaaatgtcttcttccctataatcatcctacccaccaatgatgagcagcctaaactttttgcccatgagtttaaggtactagaggggatgagcctggtcatagacacccagctgcttaatggagcagatgctgacctgccaccaaatgagctccactttcaactcacagccctccctcggcatggacgaatcatacagcagctggctacaggcagccagcccatccacagcttcaccctcaaggagatccaggaggcctccaccattgtgtatgagcatgatgactcagagacaaaagaggacagttttgaggtctggctgagtgacggcaagcacacaacccacaggaaggtacccattgtagtgaccctagtggatgattgaaactccctcacctgactgtcaacaatggcctgaaggtagagaaaaggacactctgagatcatcacaaatcggatcctcaaggccacagatcttgactcagatgataaaagcctcagttttgtcctccattctgggcctcaacaagggcttctacagaggctgagaaaacccagaggagaagtgaggaacaatcttactctgggaatgaactttacccaggatgagattaacagaggcctcatctgctatatccacacaggccaagaagggattgttgacattatcaagtttgatgttactgatggggttaacactttgacagaccactacttctatgtcaccattggcaacttagacagcgtcttccctgaggtaatcagcaaaaggatcaccttgatagaaggtgccagagtgacccttaccaacaatctgcttaccaacagtgacatcaacagctctgatgaacatcactttagcattacacgggctccaagcctgggtcacttagaaagttctgactatgctggggaacccattgcctctttcactcaacttcaattggctagcaacaaaatatcctatgtccatacttcaaatgatgagaaaaagatggacagcttcgaatttcaagtgatcggcgaactctaccctgtgttcagaaccttcaggatcttcatcactgatgtggataataagaaacctatcttgaccatccatagactaacactacagaaagaggatagccaactgatcactctccttgagttgacagtggaagacagtgataccccagatgaccttattctctttaccatcacccaggtccccatgcatggcaagattttgtacaatggtagccgtcccgtgaccactttcaccaagcaagacctgaacaagaacctgattagctacaagcatgacggcagtgagaccactgaagatagtttctccttgactgtgacagacggcactcacactgatttctatgtcctaccagacactgccctggcgacacacaaacctcaagtaatgagggtccagataagatcattagacaataggcttccccagattactaccaacaggggtgccccagccttgaagcgccttcacactggacacatggggcttcctgattaccagcaagtctctgaaggcagaagatcaggacagtccccacagggctttctgaaggtataaagtgaccagagggaccagaggcatgggctttcattatcaaaactgggccttgggaaaccagagcacttcgagtgttttacacaagcttgacatttgatgaggatgaaggatatcctatgtcttggaatgaggggcaggcaacggattcaaagggacatcttctatttctctgttgaagacaatggaagaaaaagcaatgaggaatttgatgagtga

SEQ ID NO: 143474 - DNA, 870 bp, Homo sapiens
atgtggcaccaggatctagcaacccatgaagctgttaccacccctgggtgtgaaggggcccagctgggctatgattgcaatatggacagggaatacgggcactatttatcggactgcttcaaaatcccaatggccattctcattaggaaatccaggaaagatcagtgcatagaggcaggcaggaggccaaggcccttagcagtaggagatgaaagaaggggaacacacagccaggtggttggcttcctctggccccaaaagcatgtggttctttcagaagtcctgcagttctgcacggacattagtcatcctgtagcagagaagataattgcctttgatgagttaaggacagattttaagagccccatagaccagtgcaatcctgttcatgcggaacataatgcagaagaggctatggatggagtattctggcagcaccagctgaagagggagcagagacacggccctgagttagaggaggaaaacgccactcctgcttctatggcagctgacttctgcctggacactgcctctcacagacggttgacacaaaggccctccctgcagcaacgtagagccactgccccaacacagatccatttctggggatgcagcccaaccatcctgcataaattacagatcccagccagtcgactggggaagttctcctgctttgatccaagaggaaaagcacgtatgcacaacaccatgaggaagaaggcttcttccatcggaattcacaggtctcagcttgtttctggaggagaaggaaaccaaggcaggaggcctagcttggagaacttccaagggtttgtgggcagagcaagagcctctgagccgtttctgccagaaacattggacaagagctga

SEQ ID NO: 143475 - DNA, 687 bp, Homo sapiens
atggcctgggtctccttctacctactgcccttcattttctccacaggtctctgtgctctgcctgtgctgactcagcccccgtctgcatctgccttgctgggagcctcgatcaagctcacctgcaccctaagcagtgagcacagcacctacaccatcgaatggtatcaacagagaccagggaggtccccccagtatataatgaaggttaagagtgatggcagccacagcaagggggacgggatccccgatcgcttcatgggctccagttctggggctgaccgctacctcaccttctccaacctccagtctgacgatgaggctgagtatcactgtggagagagccacacgattgatggccaagtcggctgtgtggcctcctctgagctgactcagctgcctgcagtgtctgtggctttgggacgtacggccaggatcatctgccagggagatagcataggtgactctgatacaaactcgtaccagcagaagccaggtcaggtccctgtgctggtaatttatggtgacagcaaccagccctcagtgattcctgagcaattttctgactgcatatcagaggacatggccaccttgattattaatggggcacaggatggaaacaaggctattactgtcgctcggaacagcactgcttctcatctcacagtgacacagcatacagtgaagtga

SEQ ID NO: 143476 - DNA, 672 bp, Homo sapiens
ttagtcttctttcccccttttccctcctctgtctgtgcctatcccccgacttttgcatctgaccaaaggacgaatgagggagacgttcctgcagatcggggcagcaactttcctcagctggtctctgggctccgggagccagagagcgctgatcctccgcggtctgcggcccatggaagaggaggaggaggagccgtgatgggctagcgacagcactgaggagccccgagagagctcagccttgccagccagctccgcggtcccacgcgggttccctcgagctcgctccgtggggagcgcgcagcgtgcttggaaccggagcatccagagaggatgaggcggggacccggcccaagttgggtgcatctctcgggcgtccggcagcggctgtatctcggcatgaattaagaagctaggaagatggagcacggcacactcctcgcccagcccgggctctggaccagggacaccagctgggcactcctctatttcctctgctatatcctccctcagaccgccccgcaagtactcaggatcggtgagtgagccccaggctgcctgctcgggagacgtggtcggtcgccgcaccaacgcgggtgtagcgggtcccgggcgaggcagcgcgcggcggcgcaggagccggagctggggaaggtggaggtcagtgctcat

SEQ ID NO: 143477 - DNA, 1131 bp, Homo sapiens
atggtcgtctgtcagcaccatcacaagatgcactgcgcatccctctacggctacacttccgtacggtggctgcacagggggtttctctaccagggccatgcactcctaggactggatgcccctgacggccacagctggaccagtacaggggttgtttcggaacatgtagagcagagagctggatgggttctgttgccagaggcacaggaagcatcttcagtgacttattttcaaggtgcatatctgaaaattaagcagaaggccgtgtatgatgaagcatggttcacaaggttcgcaatagcaaaaacatggaagcaacccaggtgcccatcaaaggtggatgagataaagagacagtgctacctatacaccacgaaattctatgcagccgtaagagagaatggaatcacgtcctctgcagcaacacggatgcagccgtgttctgcctccactctggtgtggactctgcactgggacccacagcccggtcagtccctccccgccaccttccgcttctgctctggtgtggaccctgcactgggacccccggcctgctggtctagacaattctgtgctcagcaccaggactgccaaggagagctgggcgcctacggacagcccaccccaacccccaacaaggaaatgctggaagccctgaggtggaccctgcggtactcagtcagcactcaatacatgactccagaggacaaggaggtggtgctcagacgacgagtaagtcgccttaatctccttacttcacatccacccttcaccacctggagtgatcagcgattttacactctcttcacgactctggaggatgaggaggtggcgctcagtaagcactcaatacacgactctggaggacgaggagggagcgctcaaaagaacacagcccatgagcatcactactgtgccatcacctggcaaaggtccgtcaatacacgactctggaggacaaggagggagcgctcagtaagttctcaatacacgactctggaggacaaggagggagcgctcagtaagcactcaatacacgactctggaggacgaggaggtggcgctcaatggcgcctcaacccaggatctggactgcgcctcgacctgggatctggactcatggaggaatga

SEQ ID NO: 143478 - DNA, 918 bp, Homo sapiens
  misc_feature (1)...(918): n = a,t,c or g
accactcgatttgaaggtgtctgcaagcgagctccagtccgctgtcaagatgcttctggccatggtccttacctctgccctgctcctgtgctccgtggcaggccaggggtgtccaaccttggcggggatcctggacatcaacttcctcatcaacaagatgcaggaagatccagcttccaagtgccactgcagtgctaatgtgaccagttgtctctgtttgggcattccctctgacaactgcaccagaccatgcttcagtgagagactgtctcagatgaccaataccaccatgcaaacaagatacccactgattttcagtcgggtgaaaaaatcagttgaagtactaaagaacaacaagtgtccaaggttattgatacagaagttaattcttggctttagagtttccagtggtaaccttcctagccctgggatagaaagtaactccttggactatggaagagaagtccgagaggagaggatgatggcagacactattgagttccctggagaagagctctctgcctggcccccagcagagcctcgggacactaataagtgcacagtgaggagcacgcactggactcagcgtgcggtgaggaaggcgctaccgctgtcctcaggatccacgggtgcaggagcggggaaaaacctgggtcggtgctgagaggagactggaggcacggggacgtgttacttgagactggagggagtgggctgagcccagagctcactgggcccctccccatcctcagacagaggagtgaagcaacgtttctctggggtggtttctggctccctgggtnctcatgggtcaggactttctcagctgggaccaaacattttttgggaaantttcttttgatggccancctagcagagtgggncattnggggatcanaaccttngagggtttgaatc

SEQ ID NO: 143479 - DNA, 202 bp, Homo sapiens
gctctggcttcatcatgtgcagcggcaaagagaacccggacagtgatgctgacttggatgtggatggggatgacactctggagtatgggaagccacagtatccttggagcactatgggggctgagatgccatccaccagcaatggtgaaagcagcaagcaggaggccatgcagaagacctgcaagaacagcgacatcgagaa

SEQ ID NO: 143480 - DNA, 639 bp, Homo sapiens
gcgccggggcaggtggggctgctggaggcgaggcctgcctagggcagatagctcacaagtagatcctccgcaggtctccgggcgctgtgatcgtgttgcactgagggcagagcttcttggcacccagggtccgcagccagcactcctcgcagtgcacgtgccaacactggatggacgttaggggcatcgagtacgagtccatgcagatgaggcatttgtaacggtccccacgagattagctgccgttcaagttctctgacccgagccttcagagcctcaaacgtggtcacagctgaaatcttcggtgattttctcgatgtcgctgttcttgcaggtcttctgcatggcctcctgcttgctgctttcaccattgctggtggatggcatctcatcactggcccatttagagaactcaggtgtgatgcgcgtgctgggagggccgccatttaggactgcgccccgaagtgcctctctctccttggcttcaccaggctcctcgcctgtgcaggggatgacatcagcctctgtgtattgtggcttcccatactccagagtgtcatccccatccacatccaagtcagcatcactgtccgggttctctttgccgctgcacatgatgaagccagagcctcggaagcc

SEQ ID NO: 143481 - DNA, 1891 bp, Homo sapiens
atgacccaggcgtctgggaaaggaggtcctgaagatccagatagccgttcaccggtggtgggttgggctatttggactgaatggattgttcatcagataggaccagtgacaagaaaacatacacttaaagaaagaggaagaagaaatgaaccagttgaaacagtaattccaaactttgcccacaaagtgacaagtccagctcagaaggcacctccaccactgcctccaaaaaatgtaccagctaccccaccccgaacaggatcccccttaacaattggaccaggaaatgaccagtcagccacagaggtcaaaattgaaaaactaccatccatcaatgacttggacagcatttttgggccagtattgtcccccaagtctgttgctgttaatgctgaagaaaagtgggtccatttttctgatacatccccggaacatgttactccggagttgactccaagggaaaaagtggtgtccccaccagctacaccagacaacccagctgactccccagctccaggccctctcggccccccaggccctcctcacaccctgcttcccacaggctctggcttcatcatgtgcagcggcaaagagaacccggacagtgatgctgacttggatgtggatggggatgacactctggagtatgggaagccacagtatccttggagcactatgggggctgtggcggccctcccagcacgcgcatcacacctgagttctctaaatgggccagtgatgtctggccggagtgtgagttgcccctctgtcccagcagagatgccatccaccagctatggtgaaagcagcaagctggaggccatgcataagacctgcaagaacagcgacatcgagaagctgcctggggctgctgccattggccgaaagggcaggaaagggaacaggaaggtggcggtggaggagcctacgccagagcagtccctcctgcagctggtggccaggccctttacacaatctccagatggccccaacagccctatgaggaaggttactatccttatcccggttttgcagaggaggaaactgaagttcagagaaggtagcttaccaaaggtgtctgcccagggcattcagtccacacctctgaacctggcagtgaattggcgatgtgagccttcaagcactgacctgcgcatagattacaaatataatacagatgcaatgacgactgctgtggccctcaacaatgtgcagttcctggtccccatcgacggaggagtcaccaagctccaggcagtgctcccaccagcagtctggaatgctgaacaacagagaatattgtggaagattcctgatatctctcagaagtcagaaaatggaggggtgggttctttgttggcaagatttcagttatctgaaggcccaagcaaaccttctccattggttgtgcagttcacaagtgaaggaagcaccctttctggctgtgacattgaacttgttggagcagggtatcgattttcactcatcaagaaaaggtttgctgcaggaaacagaaagcaaaagcaaagctatggaggcctaaaggaatgggaatgtgttggtggtcgcttgatacttggtgcttgtgtgcatggagcagaagtcttcctggtccatgcaggggcgtcagcatattttaactgcactaatttgggcaaactgtcattcagcaattgctgtatccatttcatcttcgatgtcatccccttctatgtttccaaaaagataaactcagagttatggattgtagaaaacataagcttaggttttaaatgacaaagcattgcatatcaatataaatttcagggaagatgtcacatatcttccatcccctcccctggaatcaccttagggcatccagacacaaaacaccctttacctatgtatcaaa

SEQ ID NO: 143482 - DNA, 374 bp, Homo sapiens
ctatgagtgagaacatgcgatgtttggttttttgtccttgtgatactttgctgagaatgatggtttcaagcttcatccacgtcccaccaaaggacatgatgagcatattttccatatgtttgtcggctgcatcaatatcttcactttgagcaagtgtatgttcatatccttcactcaatttttgatggggggggtcctcccgcttctgattgccatcaaccatcaatgactcaggtaaccaaaaatggataaaacttcgtttccgctccacggttttatcctcttcctgcaccgtataaagctcggtcacaggaatagcgatgtggaagatgcgattcgccaaagtaccagcgggccgcaaaaactcgttggcc

SEQ ID NO: 143483 - DNA, 951 bp, Homo sapiens
ttaagtagcaatgaaggtttttaaccgtttacttatactgctactttcagccaatcttttcccttcttcaaatagtctgtcctctaaaggtttagactccagtgttttagggtccaaaaagggccattgggaagaggcctgaccgatagaccatctccaaactgaaccatccatccatagataactgagttgacgtgactgacacatattccagtcaataaactcctgcagtagatcagcctgctcaattgctttaaggacatttttcttggatgtttcctgaacttcccctcccaaaagaaactcatccaaaataaaataagccttctcaaaattaaagatgatatctagttcacagacactgccgaaatacttgtcaagtaattccacataacgatgaattatttccagggtaattagttcattgtcctgatcctcaatagcacagcaaaaatacagactagcatatcttttgtaaacaatcttcagatctcgccactcaaggaagctgcacattttaggtttccgtgctaaaacggtctgaacaagttctcttgtgatctttttcttctctttgtctgatagtgggacataccatttttgcagtcgaagctttccctgacgactaaaaagcaacataaactgcatcggaggcagcgcgggtaaccgctgagtccaaggcagccgattggaggtttcttcgctgaggggaggtgcgaaccggaagccgggccacgtgacccggaagcggcgtttgccgggcccgagcgcccgcgcgcccgcgcgctcttgcaggtgcctccgggacgcgcgcgggcggctgtcctgcttgtttaatgataggaggacgggattctgcagcgtccttagcctgtgagtgagaacatgcagtgtttggttttttgtccttgcaatagtctgctgagaatcatggtttccagcttcatccat

SEQ ID NO: 143484 - DNA, 738 bp, Homo sapiens; identical to SEQ ID NO: 125507

SEQ ID NO: 143485 - DNA, 723 bp, Homo sapiens
tcagtcgctggatatagaattggaataaacaggcttaacaaatggcacaacacctaccacatttggtctttggttctcacagtggaagcctctgggagcttttatcccattaggtgtatctcctaattctatccctcccccctccccacaccccacaacaggccccagtgtgggatgttccccttcctgtgtccaagtgttctcattgttcaattcccacctataagtgagaacacgcggtgtttggttttttgtccttgcgatagtttgctgagaatgatggtttccagcgtcatccatgtccctgttgtttcctgagtttttaatgatcgccattctaactggtgtgagatggtatctcattgtggttttgatttgcatttctctgatggccagtgatgatgagcattttttcatgtgtcttttggctgcataaatgtcttcttttgagaagtgtctgttcatatccctcacccactttttgatggggttgtttgattttttcctgtaaatttgttggagttctttgtagattctggatattagccctttgtcagatgagtagattgcaaaaattttctcccattctgtaggttgcgttttcactctgatggtagtttcttttgctgtgcagaagttctttagtttaattagatcccatttgccaattttggcttttgttgccattgcttttggtgttttagacatgaagtccttgcccat

SEQ ID NO: 143486 - DNA, 1205 bp, Homo sapiens
ctacctcttgtaatttatatttttcaattcatcctctgcaaatatgtcatatctttcaaacacagttcttgcaggcacagattctctgttaagccagaatgaaacttgggagagaatgacagtcatgatgcaaggcagataggtttgaatcacaaaatacccaatttttcttttcaggtggaaatgagctgtcattacagtatattcacctgtactggatttaattgtctcctttccgattgattggcccagcaggtcatattgatttaacctagagccatcaggagcaacctgtactgaatcagatgcattgtaagtccaaatataagtgacctctgaagttgtatatgcatagctgccaaatttcagaggacatgaatgagcatccattgggaaatcctccaagtgcattgggcattcagcttgaactgtaagcctcatggtatacagcagagtcccatcatcctgaattcgaagcaacttatttggcattgtcatattatgagctactgattttttcccattgtgaaaaaaggtatctggagtccagattttgctagccattaaattgtttagtcgaaggatattcataggacctttaaattttaaacgttcatctttccatttttgtcgaaagaaaacatcaattgtatattccttcttcaatgctgtgtcaccggcatctaaaaagctacttggaacataggaaataaacaatactttgcccatgaataaatgaataaggggagtcattgtaaatttattgtagtatgaaggatactgagccataatgtttctatgagtgagaacatgcggtgtttggttttttgtccttgtgatagtttgctaagaatgatggtttccagcttcatccatgtcccgagccgcttcatggtcccaaaccaggacccaaagtgctgcttgggcttaaggttgtaattatttgcagccaactggagcagcggacctccttgcttactttgaattcctgggtccagagggaaaaactgggtggtgacagggactggacagggatgccacaggggccccgccgagtccgacggcccggcaggggtgggcaaggcactgggaacagccgccagcttgatacctagttttattcctttgtagtcaaagaagatggccagggagacagcagcgtggtcagagtggtaggagctggccatcggtgagagctgctccat

SEQ ID NO: 143487 - DNA, 1379 bp, Homo sapiens
ctagtttgatggcactgtggtctgagagacagttgttataacttctgtccttttacatttgctgaggagtgctttacttccaactatgtggtcaattttggagtaagtccagtgcagtactgagaagaatgtatattctgctgatttggggtggagagttctgtagatgtctattaggtctgcttggtgcagaggtgagttcagttcctggatatccttgttaactttctgtcgcgttgatctgtctctctgtctgtctctctctctgtctctctctctctccatctctctctctctctctctctctctctccctctccctccgcgtctctctcttagccattacaagcttggggccccagcctttgcagttaggccatcggaaccccaagtaggaaaccttcgccatccacagcgcacgtgaagcatcgtcgcctttgtatacccacgcgaaggggattctcaagcgataattgggacccggtttccagtccgacctgtaacgacgccaggcaactgcatgctcaagtcgatctagagatccccgtgagaacatgcagtgtttggttttttgtccttgtgatagtttgctgagaatgatggtttccagcttcatccatgtcccttcactgagttctagagcccgagttaaagcaatgagctcaggcttctgggctgaagtgcccacagcatggggggcctttatattcaggttttgcacaagggttagtttatctgcttcttgtgctaacagggctgttgctgccagggcccttagacatggtggccagcctttggaaaccccatctagttgttttgagagataggccactggtgtaggccagggccccacagtctggattaaaactccaactgccgttttttctctttctgacacatagagtgtaaagggctttgtcaaatctggtagtcctagggctggggccgacataaatttttcctttaacttacaaaaggcttgctgttgtagaggttcccattcaaagcgctcccaatcgccccactttgtaacctgctgtctgcagatctgagctttcttcttggacaccttatacccacagtcctccaggtgctgaagcagggcatccatcccttttgcgcacctgactgccgtggagtgtcccagcagaaggtcatccatgtacaggagcaagatgcagcctaggtctttagcaggaaacttttgcaggtctcgagccagggcctccccaaagatagtaggggagttctcaaacccttgggtaagctgggtccaagtgtactgagtagtgacacctgactccggatcttcccactgaaaggcaaacagcttctggctctcaggagatattctgatgctaaagacggcatcttttaagt

SEQ ID NO: 143488 - DNA, 894 bp, Homo sapiens
ttaaggaatatcctccaagtcatgctgattgaggacaggaaatgtgcacaaagctccaaagctcttgctgtagctcagtgtacgtcctacctgttgaccccaaaatttcacacagaggggtttatctatgaaaaacaactgtgcaggaatgatcataacatctgtacttacaattgccaaaacgtggttgtaaaattttggagaacagtgcagtggaacgtctaatataattatccgtaagttgttttctgcatttccttttctttcaggtagctttctatcaagatcatctgaaaacttccccaggtctgccttgatctgctttaaatcagagcaggagaaggggacatgtatccgggttgggccaaattcccctcctgctacagcttgaaggggacataaccaatagcctgggggtttttgtggtcctttggagatttctttgcttatttccttctttctaatgtcccagatgtttggtaaacatgcacacctccaccaccttaggctgacaagccacatgtccaggtcttcagtatctcccatcacttccaaacttggttgaagcttcaggccccagtaagcactatgagtgagaacatgcggtgtttggttttctgttcctgtgttagtttgctgagaatgatggtttccagcttcatccatgtcccttttttcaaggttcttagcttctttgcattgggttagcacatgctcctttagctcagaggagtttgttattatccaccttctgatgcctacttctgtcaattcatcaaactcattctccatccagtttttgtcccttgctggcaaggagttgtgatcctttggaggagaagaggcattctggatttcggaattttcagcctttttgctctggtttttcctcat

SEQ ID NO: 143489 - DNA, 912 bp, Homo sapiens
ttagttgactgtcagctgtccttgctccaggatgctgtttttgacaacggatgttttattgcctttgatgttcattaagaagcttggcgcaaatgttgcctttttatcctcgaagaagcctctgtttgtcatgtagcttgtgataaccacattgttgcctttggcttgcggcactgcgaagtgagagtaagtgaatgtcacatcgtttggatcaagacccatttgcagcacaagccctgttttgttcagcggcttgtaagggccggttaaagagtttgatacataaccaagcatgtaaatatcgtttgagttaataccatcgatcgtcatttttgaaccgcgtgaatcagtgaacaagtaccatttgccgttcattttgaaaacattcgcgcgctcgatttcatcagttaccgtgtttgaagtgatcagcggcttcattacttttttcaatgtgtaatcattatttaactctatgtgtgagaacatgcggtgtttggttttttctccttgtgatagtttgctgagaatgatggtttccagcttcatccatgtccggtggaattcggctgtgaatccgtctggtcctggactctttttggttggtaggctattaatcattgcctcaatttcagagcctgttattgatctattcagggattcaacttcttcctggtttagtcttgggagggtgtatgtgtcgaggaatttatccatttcttctagattttctagttcatttgcgtagaggtgtttatagtattctctaatggtagtttgtatttctatgagtgagaacatgcggtgtttggctttttgtccttgtgatagtttgctgagaatgatggtttccagcttcatccatgtccctgcaaaggacatgaactcatctttcatggctgcatagtattccat

SEQ ID NO: 143490 - DNA, 1188 bp, Homo sapiens
atgtggaggaggaacaagggcatagttttaggaatgcaaggtgaattatctcatggtagagaaatgagaacggtttggataggatggactgttcatgcagaaatggagagagagataagggacatggatgaagctggaaaccatcattctcagcaaactatcgcaaggacgaaaaaccaaacactgcatgttctcactcataggcacctaagagagaaaatcttcatcctacccttgggtcaaccacttagtcacgaatctctcatagtggtgtggaatccccggtcaaactggacagctgtgcaagcttttggcttagtgaagtcccacttcttccctaaagatacagtgtcctactcaaggacctgcccccctgaattgtttcttgccgctgtccctgtgctcacaggcatggactatgagatctatgaggtcagggactggggctcccctggatggtctggcctcagagctgctcaacaggagtccatgggcttttccctgaacacctgtgatttaagtacaacaagacctgctaacggttcttcctgggtcaaggggaccgagagatggtatgaagttcccagaagagccagagagagaaagcagaaccgcctaattctgatcctgactgtgcactctccacctggaaaaacgataatcaggtggaaatgcagaggagccacctggagcttgcactgcccccgacagtacaacgaatgtgctgcagacagggcaggtggaaggcgaggagaaaggtttcaggatccagtggcctcatgggtgatgagatggggtcccactgtgttgcccagactgagtgatgttattgtgacacagcttcagactcagtccccaactgtgcactgtgggagccacagcagtggaaatgtacgtgcacgtgcagcagcccaagggtggaagctgcagaggctggagggaggtgatgttgccaagcaaatgcagcagaaccagcctgactgcctgaaactgtgcctcaaaatagggaaaaacagggagaaacctgtaagcaggagcactagatgctacagccctgctgctcaaagtgtggtccatgaactagcagcatcaccaccacctgcagaagctcaggtcccactccctgctgaatcagaatctacagctcatgaagaaccccaggtggtttacaagcatactgaagtttga

SEQ ID NO: 143491 - DNA, 1725 bp, Homo sapiens
atggctgtgctttggtcaaggataggccaagccaaggtcctggtccccgtggccgtgtactgcgggagcatccctcggaccagtgctgggccccgggtgctcccgcctggaagcatcccctccagtctgcctcatggagaaggttctctccagcctgagccaagagccctgctgaacaacgaggaaccgtcacagctcctgcgtggactcggacagctgggtggcctcaagctggacaccccttccaagggctggcaggcaaggaatggtcaccccaggaacctcagggccttgtctttgggggaccagcccctggtgctcctcccttctccggagtcagaggccaacagcgtggccagggacaccatccagattaaggacaagctcaagaaaaggaggctctcagagggcttggcagcgtcttcccgagcctctctggatccagggggaggcccccaaggagttcccctgcacagcaccatcccccgagccacctctcagaggctgctgagggtgcccaggccgatgcctctcatccagagcatccctaccacccctgaggccagcggagtcaaagagaagggcctggacctaccggggagcattccgggtcctcacgagttgagacccggtgctcaggagcccgttacctccaggccagggagtcctcacaggcctgagggccccacgcacgcgaatgacaaaggacagatccctgctgatgttgttccagacccagtagatatgccgttagagatggctgacgccgcagccactgctaaggaaatcaagcagatgcttctagatgcggtgcctctgtcatgtaacatctcaaaggccatgctcccaaattatgatcatgtcactggcaaggcaatgcttacgtcacttggcctgaagttgggggatcgtgttgttattgcaggacagaaggttggtacattaagattttgtggaacaactgaatttgcaagtgggcagtgggctggcattgaactggatgaaccagaaggaaaaaataatggaagtgttggaaaagtccagtactttaaatgtgcccccaagtatgcgaccccacagcagaaaggactgaggccaagacaggccatgccgatcagggcccctgccttcctgcacgtggcagccccgccccaccctgtgcgaacctcacagaaaacccaccaccgctcaggctcctccgcaggccccaaggaggacatgggcacccgtgacgatgtccccgaaggtgcggatggttcagaattaagggatctcagaggctgtacttctgtgttcagcgcgcacagtgcctggcaggaacagatgttgaatgaacgtctgtcagtgtctctgcaagagcagaggtgtgatcatcagcataaaaagcccaacagaatcaacaaagtattagaagtaatgttagctcagcaaggttgccaagtacaagatcagtttctaaaaatcaatagttttgtctacatcagcaggacatggatgaagcgggaaaccatcattctcagcaaactatcgcaaggacaaaaaaccaaacaccgcatgttctcactcatagggcaggctcatctaactgtgtgcttagaagctctagagcagaacttgcacccaccaggaaactgcctggagacacaacagtcaattaataacccaaaatatgcccactatgaaactccctcccacccggagagcttcagccactttacaacctag

SEQ ID NO: 143492 - DNA, 2376 bp, Homo sapiens
ctggttttaacttcatatcgctgacagaggcactgaagaggatagcaaagacagtcttgaaatgccaacaccacccttccctcatctccaggcagtggccacatggtgcggagagagaatctgtatgcttgggggaaggagagctcagccattctgggactttgcattggaactcagtgtggccagcaccaagtagaactctgccagtgcccttaggtgtttctcctaatgctatccctcccacgtcctcccaccccacgacaggccccagtttgtgatgttcccctttcctgtgtccaaatgttctcattgttcaattcctacctatgagtgagaacatgcaggtgtttggttttctgtctttgcgatagtttgctgagaatgatggtttccagcttcatccatgtctctgttgtttcctgactttttaatggtcgctattctaactggtgtgagatgatatctcattgtggttttgatttgcatttctctgatggccagtgatggtgagcattttttcctgtgtctgttggctgcataaatgtcttcttttgagaagtgtctgttcatatccttcacccactttttactggggttgtttgtttttttcttgtaaatttgtatgagttctttgtagattctggatattagcactttatcagatgagtagactgcaaaaattttctcccattctgtaggttgcctgttcactctgatggtagttccctttgctgtgcagaagctctttagtttaattagatcccatttgtcaattttggcttttgttgccattgcttttggtgttttagacatgaagtccttgcccatgcctatgtcctgaatggtaatgcctaggtcttcttctggggtttttatggttttaggtctcatatttaagtctttaatccatcttgaattaatttttgtataaggtgtaaggaagggatccagtttcagctttctacatatggctagccagttttcccagcaccatttgttaaatagggtatcctttccccatttcttgtttttgtcaggtttgtcaaagatcagatagttgtagatgtgtggtattatttctgagggctctgttctgttccattggtcgatatctctgttttggtaccagtaccatgctgttttggttactgtagtcttgtagtatagtttgaagtcaggtagtgtgatgcctccagctttgttcttttggcttaggattgactcagcaatgcgagctcttttttggttccatatgaactttaaagtagttttttccaattctgtgaagaaagtcattggtagcttgatggggatggcattgaatctataaattacctctggcagtatggccattttcatgatattgattattcctatccatgagcatggaatgttcttccgtttgtttgtgtccccttttatttcattgagcagtggtttgtagttcttcttgaagaggtccttcacatccattgtaagttggattcctaggtattttattctctgcaaaaagttgtggagatgcttgaagaagtggtagtctgttgatgagaggtcaggtgaatatgaaggatgagccaaaacttggtagcccaatgcattgaacttttgaagcattggttgtgcgacgtgtggttgggcgttgtcatggagaagaattgggccctttctattgaccaatgccagttgcaggtgtggcagtttttggtgcatctcatagatttgctgagcatagtcctcagatataatggtttcaccaggattcagaaagttattgagctttttcacctttccaatttgcttcaaatgccaagcgaccctggaatggtcgacgtcaagctctttggcaacttcttgtgtggttgtaagaggatcagcttcaataattgctctcagttggcagttgttaacttctgatggctggtcactatgctcctcatcttcaaggctctcgtctcctctgcaaaacttcttgagcactgtacatttgttagcagttccttggccaaatgcgttgttgatattgcgagttgtctctgctgctttatgacccatttttaaattgaataagaaaatcactcgaatttgctttttgtctgacaccatttccatagtcacctgctgagttagtcttctacctcttgatgcctcatcttcctcaatgagattcatcagttgaaaatgatcacttctaacttgaaattctataatgttgaaagtcgttattttcctgaactttctgtagaagttgcaatggaagctggctgtaactagactggtagaaagatggcctcggtacaaatatggtggatctgcagtcaaccatgcttctccaacaggttttctagaaggagatccaagcagtacccactccat

SEQ ID NO: 143493 - DNA, 1434 bp, Homo sapiens
atggggcagaaggggggcccctacaaggtgcatcattggggacagcagcaaattgtcagcactgcacacgatgcttctgcacctggccatcctggcctctatgccctcctccatctggccagcatgcagtggtctccaccttccatgcctccatttccacttctgcaaaatggggatgatgctggaactgtcccaggggattctggtgagcatcaatgggctgtttcacagagcgagtgctcggcccaagtccccggacctgagaggttcacctacaccctctccgagctgccaccccaaagccactccgcgggccttccattggcagatatggtgcaggctcaggcctgtgtctgcagcctgtgcctggaggctggaggttatggactgaactgtgccccccgaaattcacacattgaagccctaacttccaatgtgaccgtatttggagatggggcctttaggagaggttatgggcacgctgcacctggcaccgatgcgggcaaggccttctgcatgttctacgccgtgctgggcatcccgctgacactggtcatgttccagagcctgggcgagcgcatgaacaccttcgtgcgctacctgctgaagcgcattaagaagtgctgtggcatgcgcaacactgacgtgtctatggagaacatggtgactgtgggcttcttctcctgcatggggacgctgtgcatcggggcggccgccttctcccagtgtgaggagtggagcttcttccacgcctactactactgcttcatcacgttgactaccattgggttcggggactacgtggccctgcagaccaagggtgccctgcagaagaagccgctctacgtggcctttagctttatgtatatcctggtggggctgacggtcatcggggccttcctcaacctggtcgtcctcaggttcttgaccatgaacagtgaggatgagcggcgggatgctgaagagagggcatccctcgccggaaaccgcaacagcatggtcattcacatccctgaggagccgcggcccagccggcccaggtacaaggcggacgtcccggacctgcagtctgtgtgctcctgcacctgctaccgctcgcaggactatggcggccgctcggtggcaccgcagaactccttcagcgccaagcttgccccccactacttccactccatctcttacaagatcgaggagatctcaccaagcacattaaaaaacagcctcttcccatcgcctattagctccatctctcctgggttacacagctttaccgaccaccagaggctgatgaaacgccggaagtccgtttaggggaactaactgcacattcaagagaggcgtccgtggatgctgggtctcactgccaaagccgaacacggcttcgggatttcttgccttctcaagtggacctcttgctgtgctgggcggaatgcc

SEQ ID NO: 143494 - DNA, 377 bp, Homo sapiens
taactctgacttactaaaaaagcaaacaaaaaataaagctatgaaaaaattttttattgttatacaacataatgcaccagagtccattcatctctcccctcttaaaaactttttccataaaacaaaaataccgtcttctactttcaaaagaaaaattataatattctcattgtagtatttatacaagaaaaatacaatttctttgttgtccttctataaaaactcacttagggactaacctcacctcctaaactttcttcacatgagtgaacattattagcatttacctggaagccagcttatttttttccttccttgaccttggtcgggctgataagggaagctcattgactggagtcaggtcaataataaccaaa

SEQ ID NO: 143495 - DNA, 483 bp, Homo sapiens
atgatgattaccctggccatgctcacgaaaaatcacgggtacgatcatagtagcctatggcgatcgacggcgctggagccctataatttattgtttgtaatcaactccatcaagcaagagattgtaaaccgggtacagaatccaagagatgagagaggacccaacatggggcagaagcttgaaatcctcattaaagatactctcgtatcgttcctgtcggtccgatcgtgtcgtgacgtacgtgccattcgttcggtcgcaccgtgcgatgattcctgtcgagcgattcatgtatgtcttccgacgatcgaagttcgctcgctccagtctaacgtctgtcgatactcggttatgtcatctattccatcttcggtccgtctgtcttcgtccgtcgatcatatcacgtacggatactggaacgaccatcttaggaacgtcgttgttcgttactcgtactcggttgtcctgcgtcccccttcgtag

SEQ ID NO: 143496 - DNA, 1803 bp, Homo sapiens
ctttacatatatatatatacataatacaataaaaataatcctattttgttgtctggtggaagtatactacaataagctaaataaacattttaattttcaaagtcaaaaactattttatcaatagcttactaaaatgaaatatattaaaatttcctacaataagtgcagaaataaaagacatctaaatggccaccaacttatctactatggaagcgaactagaggaacagcaaaataatatttgtatgtatggatgctccttctgtagataattggacccaaacagaaataaaattcacagttcagtaagatccctaaccctgaccttttttttttcttttttttctccttttttttcatacattcatacagtatcatgtaagctgtgcaaaactttacttagactggcagtttgccatatcagttgcatttgtctttggtacaaaaaataaaacaatcgcaataatgtgcaagtatttgtcttcttccggtcaagtaccgaaatatcgagttttctagagccatcttttttttgttgttttttgttttgttttttatacaatacacagactctgtggcatatatctacatttcaacatagtcctatatacattcaaaaaatctgaaaaagagttggaacaaaaaaacatttaaaccccataatttttccatctatatatcttgttttttctcattagggttttcatcatacaaaatattaccagttttagagtttccccaaaatacaaggcacaaagaatatgctttttttttcttacttgcacagacatttgtgtgtgtgtgtgtatatatatatatatatatatatatatttatatatatcatcttgagctctgacaatgaacatctaatatggcccacaggcacaagtgctgggtgtgccatatacaagtgagattaatggttgtggaaaattagaccaaaaagcaataattttaaaatcaatttaaaccgactgtttaaaaaaatgcttcctcaatttttttgtgtggttcagagcataaatctgccacaatacttggcattttactatttcactcctccaaaatgttttgctttaacagatttttgtaatctgtacctaacatttacttaaacatatgattttcaattctgatgccagtagcagttttaatcatggtttatgctctgaaaatgcaataatcaagtattttggatcatgcttcacttatgctacttagttcttaaaacaatgtaacctaattgtaaatgtttaccataatggctaactgacatgcaaaacagaatgaaaatttacaatggataacgtgacaaaacgcagacatttctgaccagtggtccaatgaggctgattacaccctttgatgttggtatccttaatcctacaaggcctccagggggattcccttctgcagccttctctttcacttgtttaacaaattctgaggtttgcccaggaactggtagacctagagtatctttaatgaggatttcaagcttctgccccatgttgggacctctctcatctcttggattctgtacccggtttacaatctcttgcttgatggagttgattacaaacaataaattatcatattctgtgttgaggccccataatttcactttattaccttcatactgggctttcttctttaaccgacaagctctggaagccagcttatttttttccttccttgaccttggccgggctgttaagggaagctcactgactggagtcaagtcactaatcaccttattcagcttccgaagttcattgcctatctggaggagttctttaaga

SEQ ID NO: 143497 - DNA, 987 bp, Homo sapiens
aatacagaggctctgaaatatttgctggatccatgaatggttgattggctttcattgggctgctgggaggattaaattatgaatgtataaaggtgattacatctcattcctatatacccattacattgatggataagtattaggttctctctcctcttgccagggactttaagaagctgctgaagaacccaagaggaaggtgggagctgttgatggtgagcgactcataccaccatccttcagggagggtgtggttggccatagcatggttaaggagagccaagagcagagatgcttctgagtacaacccagcagggtggaaagaaggaggggtctaccccagtgcacatttgttggaagaaggcagctttcgtgggctcccgacattccattattctagaactacaagttaagaacgagaggagacttggggagactctggtccaattcgtctttcttttttccaggtgtggaattagaggcctgatggagtggagagctttcctcctcatcacctggagcagtaatagtttacaatatacctacagtttcctgggcagatcatcgtgtgcagaccggctgcagagagaagggaactgtttcactttcatcttcctgaaggcaaaggaggagaaaggcacgtcttacatggcagcaggcaagagagcttgtggaggggaactcctatttataaaaccatcagatctcatgagacttattcactaccacgggaagagtatgacagaaattgcccctgtgattcaattaataagacttattcactatcacgagaacagtgtgagagaaattgcctccgtgattcaattatctccacctgcccttgacacacgggaattattaaaatttaagaagacccctccagagaaagcaacaaggcaccatcttggaagccaagagaggagcccttactggacaccaaacccgccagcacctccgtcttggacgttccagccttcagaaccatga

SEQ ID NO: 143498 - DNA, 1665 bp, Homo sapiens
gctgcagtgagccgagatcgcgctactgcactgcagcctgggcgacaaagggagaccctgtttcacgcacctgcggcagccgggcccggcagggacgagggctcggcggcgcccccgggaagagcgcggtccgggccctgggtccccgtccaggaggcgccgctgccgcagtgagcacgtcgggccgggtcttgagctcgcgccggccgcgctccccgcgtcccgagctgtggcggccgcgtccccgggcggaaggctcacgctcggtgacgccgcgctgtcccagaacctcagcgactttgcagactcactggtgacccaacggtgcgccccgccgccgccgggcggaagtcccgcccctgccccggagaggaagttccgcctcatcgagcgcctgctcaagttcctgctggtgggcgacagcgacgtgggcaagggcgagatcctggagagcctgcaggacggcgcggcagagtccccgtacgcctacagtaacggtaaggcccggcccgcggcgcgcgctgctacgcggggcccgagcccggcgagctgggcacggagctcgcccgcccacagctccttcagctcacaccggatcgcttacctgcctggaagtcttgtctggcatgttcctcagacaggtgtgtgagcgtacattgccctctccagcttcacaaacaaatgagtcatcgaagtgacctttttcttagtacctggattaaggcagttccaccctcggcaccgtgtccccacaaaccttcctgggagcaagttttcctcccgccacgttggtcagggtgtgtgtgcccgggtcctggaagacttcagaaggggttaatcctggcttgactttatttctctctctgctgccagcaggacccacttcaccaggtcagcaaggaggaggcagcttcccttggggccacgccgtgcctcctccgtgtgcgctgctgccatggctgcttctgtcgataggcatgtacgtgaaaatgcacacccgtgggtgttcgctactgtcagcgtggattcagcaaggttttgttccctcgtggcatcagtcagcgtggattcagcaaggttttgttacctcgtggcattaatcagcgtggattcagcaaggttttgttcccttgtggcatcagtcagcgtggattcgcaaggttttgttccctcgtggcatcagtcagcgtggattcgcaaggttttgttccctcgtggcatcagtcagcgtggattcgcaaggttttgttccctcgtggcatcagtcagcgtggattcgcaaggttttgttccctcgtggcatcagtcagcgtggattcgcaaggttttgttccctcgtggcatcagtcagcgtggattcgcaaggttttgttccctcgtggcatcagtcagcgtggattcgcaaggttttgttccctcgtggcatcagtcagcgtggattcgcaaggttttgttccctcgtggcatcagtcagcgtggattcgcaaggttttgttccctcgtggcatcagtcagcgtggatttgcaaagttttgttcccttgtggcatcatactcctttcctgtttggtttgggactcccatggcccccttgatgttggagcctcttcaggtggcacctgcgtcctgggctatgccctgagttcccggagctccctgtgtcctg

SEQ ID NO: 143499 - DNA, 2436 bp, Homo sapiens
atgaattccaaagttcctgctctccggaaggtggagaccaagagaaagtactgccacatagttataaggaagctgaaaaatgaactcttagaagcaaaacgtagaagtgggaaaactcaacaagaggccagcagagtttgtgttcactgtcacagaaacctgggcctaatctttgaccggggagacccttgtcaggcttgctcactgagggtatgcagggagtgtcgagttgcaggccccaatggcagctggaagtgcactgtctgtgacaaaatcgcgcagctaaggattataactggtgagtggttttttgaagaaaaggcaaaacgtttcaagcaagtcaatgttctcggcactgatgttgtccgacagtccattttaagaagaagtccaggagctgaagaagtacagagccaagagcaaacccgccaggatgcggaaaagtcagacacttcacctgttgctgggaagaaggccagccatgatgggcccaagagaaagggatttcttcttagcaagttcagatcggcaaccagaggagaaatcataactcccaaaactgacactgggcggagctatagcttggacttagacggtcaacattttcggagtttaaaatcacctcctggttcagacaggggaagcactggctcatcagatctcaatgaccaggaacctggtcctaggaccccgaagaaaaatcggaacaatggtgtgaccccaggcactcagagttcaccagccccaagcacacgaactgtgacctcagtcatcagtagagagtatggttttgaaaattccatggatttggctgctattgaaggtacctctcaggagctcacaaagagtcaccgcagaaacacttctggcacaccttccatagcagtgtctggaacctctctctcctcagatcagagtcgatctgagttagatttgagtgagtcatttacagaagactcagaggatactgtaagcataagaagcaagtctgtccctggggctttagacaaggactccttggaagagactgaagaaagcattgatgccttagtgtcctcgcagttatctacaaacactcaccgtctggcaagtggcctatcaactaccagccttaacagcatgatgagcgtttacagtgaaacgggagactatggcaacgtgaaagtcagtggtgaaatccttctccatatcagctactgctacaaaactggtgggctgtacatttttgtcaagaattgcagaaatctggccataggagatgaaaagaaacagaggacagatgcttatgtcaagtcatatcttcttcctgacaagtcccggaacaacaagcgtaagaccaaaatcagaacaggcaccaatccagaattcaatgaaacactaaagtacactatcagccatacccagctggaaacaagaactctgcagctctcagtctggcactatgatcgatttggacgtaatagcttcctcggggaagtagagattccttttgactcatggaactttgaaaatccaactgatgagtggtttgtgcttcaacccaaggtggagtttgctcctgatattggccttcaatacaaaggagagctgacagttgttttacgttacattcccccagaagagaacctgatgcttccaccagaacaactccaaggaaataagacttttaaaaagggaaagaagaaggagtcacctgtaatctctggaggaatactagaagtgttcatcaaagaggcaaagaatttgacagcagtgaagtcaggaggcacttctgatagctttgtgaagggctacctgctccctgatgatagcaaagccaccaagcacaaaactctggtaataaaaaagagtgttaaccctcagtggaatcatacattcatgttcagtggcatccatccccaggatataaagaatgtttgcctagaacttactatctgggacaaggaggccttttccagcaacatctttctgggaggagttcgtttgaattctggaagtggtgtgagccatgggaagaacgtggattggatggactctcagggggaagagcagcgcctttggcagaagatggccaacaaccctggaactccctttgagggtgtactcatgcttcgttccagcatgggaaaatgcctgatcataggcgatgacgaagactttacctggcaggcttcactgggaaagctgccctccacacaccagacttggtgcacagccagcgtatggcagtctctgtggggtgttgcagtcaaagactcagaccccctggccaatcatgctctttcacatatttacattcctagccctgtgccttcatttctaggccctttatctgaggccttgggcaagaggtcttcaggttcctctgctgagatcttatggggggaaaatggaagagtgaagttgatgcttcctctggttttagactgtgactga

SEQ ID NO: 143500 - DNA, 2779 bp, Homo sapiens
tgtgcatctagatgatctggtggagtttacacttcagaggcactggtaatgccaaagatttatttgcctctcattcattaagaagaaaaaagaaagaaaatgtaactaattgaagagtctggatgacaattatctttttcaaaacccaccatcttcctggagtctgcgttgttctcttccagaatagatgttgagcttttaaacaaacctgcagtagaagcaagccctctccaggaaatcccaatctctttccaaacagggacagcaaaggttctctctgttgtggctggtttttccctctcttctgggaattggtttgccttctgagagcatcccaaggaaaggggaggtgcgccccaaattggcgaggctctgccaaataccaaaggctcttctttggaagaagactcctcctttggacaagctgctgaaccctgcccgaagaaaccacatgagccagcagttgctgccctcccgaagtggtcctcggaggcagcgcaccccttcattttggcgaaccgaggaggaagggaggaaccgtgtgggggaaatctagaacttctggttccccaaggacccagcagactgtgttctggctacaaggtgatcactgccaccaggctggagctcacctgggagactccaagtggaagccgagcctcggttctgcctctccaggcaacgcgggaggcccagcgggaaggcaggaggcggcggcggaggaggagctctactgagccgcaactgtggcgacagcaaccggagtcgcagccgccgccacctgcacctggcgcctagcccacgtaagccggcggaggcggagggagacgcggtacccctgggctgcgttagagcaggcgggaggacggccgcagggttcacgtgttgggggacagggctacggtccaggtggccggttggagacggtctcgagagcagtgtgtcggttgcccctggagagatcccgaaagggcgccctgggccaaggggcagttctaggctgcaaaccgcggccgccgagccatttaaatggtttccgagtggtttggaaagggctctgtggccgggacgcggacacccctctctctctgtttcgactctgcacttttccgggtgcgctctccaggccagagttgggcccactttgctgatcaagggagaagagttcttttcttccgtggcgggaagaaatccaactgccacgcaccaaccactcaccatctcgttagaggacctgttgacttaaggacctgcatatcgcggctatggtttgcctgtggcatatgactcaaagatgactaagaatggcacagtagaatcagaagaagccagcactcttacactggatgacatttctgatgatgacattgacctggacaacacagaggtagatgagtacttcttcctacaacctttgccaacaaaaaaacgaagagctctgctgcgtgcctctggagtgaaaaagattgacgtggaagaaaagcacgaactccgagccatccgcctctcacgagaggactgtggctgtgactgccgagtgttctgtgatccagacacgtgcacctgcagcctggctggcattaagtgccaggtggatcgtatgtctttcccatgcggctgcactaaagaaggatgtagtaacacagcaggtagaattgaatttaatcctatccgtgttcggactcactttttgcacacaataatgaaacttgaactggagaaaaaccgagagcagcaaatccccacgctgaatggctgccacagtgagataagtgctcacagtagttctatgggccctgtcgctcactccgtagaatattcaatcgcagacagttttgagattgaaactgagccccaggctgcagtgctgcacctgcagtcggctgaagaattagattgccaaggagaggaggaggaagaagaggaggatgggagcagcttttgcagcggagtcacagattctagcacgcaaagcttggcacctagtgagtcagacgaggaggaggaggaagaagaagaggaagaggaggaggaggatgacgatgatgacaaaggagatggcttcgtggaaggtttgggcacccatgccgaagttgtccctcttccttcagttctttgttattctgatggcaccgccgttcacgaaagccatgcaaagaatgcttctttttatgccaactcttcaactctgtattaccaaatagatagccacattccaggaactccaaatcagatctctgagaactattctgaaagagacactgtcaaaaatggtaccctttcgctggtgccttacactatgaccccggagcaattcgttgactatgcccgacaagcagaagaggcctatgggtgcctcccacttacccagctggccaacccctctgtaatcgtttgctgctcctcttccgaaaatggatagcgggtgttgccctgcaatagtttatatcctgaacacaggtccaatcaccctcaagtggaatttcactcatacttgaaaggcccctcccaagaagggtttgtctctgcattgaatggtgacagtcacatttcagagcatcctgctgaaaattctttgagccttgcagaaaagagcatattgcatgaagagtgcatcaaatcacccgtggttgagacagtccctgtttagtagcttaaattattctaggaccaactcttctcttatttaaggcactgtatttaattggatttcctgggctcatcatttgttaaactgaagaccaagaaaacttggacggtggttaatcttccagactgg

SEQ ID NO: 143501 - DNA, 369 bp, Homo sapiens
  misc_feature (1)...(369): n = a,t,c or g
aatacaggcctttttcacaaaggaatgactgtgctgctccgtcttccttcttttttgtttgcgaggccacagggaaatctggatcctctggtgaaaaagcaaatcnnnnnnnnnnnnnnnnnnnnnnnnnnnnngctgccgccgccagttcttgtaaatgtcctcacttggtttctgggcagcaacttccttgacttgcctggggagcggatctgagctgcatttaccaagccatgcccaggggaagtgatcagtgtgggaccgtgaagctggatttccccaggagctccctccaagcttctgcgatgatgataagactcgggatgaaccaaggatctggaaccatgcgacaatgcgaagcctaaaccc

SEQ ID NO: 143502 - DNA, 1830 bp, Homo sapiens
atgtcagccgaggtgcggctgaggcggctccagcagctggtgttggacccgggcttcctggggctggagcccctgctcgaccttctcctgggcgtccaccaggagctgggcgcctccgaactggcccaggacaagtacgtggccgacttcttgcagtgggcggagcccatcgtggtgaggcttaaggaggtccgactgcagagggacgacttcgagattctgaaggtgatcggacgcggggcgttcagcgaggtagcggtagtgaagatgaagcagacgggccaggtgtatgccatgaagatcatgaacaagtgggacatgctgaagaggggcgaggtgtcgtgcttccgtgaggagagggacgtgttggtgaatggggaccggcggtggatcacgcagctgcacttcgccttccaggatgagaactacctgtacctggtcatggagtattacgtgggcggggacctgctgacactgctgagcaagtttggggagcggattccggccgagatggcgcgcttctacctggcggagattgtcatggccatagactcggtgcaccggcttggctacgtgcacagggacatcaaacccgacaacatcctgctggaccgctgtggccacatccgcctggccgacttcggctcttgcctcaagctgcgggcagatggaacggtgcggtcgctggtggctgtgggcaccccagactacctgtcccccgagatcctgcaggctgtgggcggtgggcctgggacaggcagctacgggcccgagtgtgactggtgggcgctgggtgtattcgcctatgaaatgttctatgggcagacgcccttctacgcggattccacggcggagacctatggcaagatcgtccactacaaggagcacctctctctgccgctggtggacgaaggggtccctgaggaggctcgagacttcattcagcggttgctgtgtcccccggagacacggctgggccggggtggagcaggcgacttccggacacatcccttcttctttggcctcgactgggatggtctccgggacagcgtgcccccctttacaccggatttcgaaggtgccaccgacacatgcaacttcgacttggtggaggacgggctcactgccatggagacactgtcggacattcgggaaggtgcgccgctaggggtccacctgccttttgtgggctactcctactcctgcatggccctcagggacagtgaggtcccaggccccacacccatggaactggaggccgagcagctgcttgagccacacgtgcaagcgcccagcctggagccctcggtgtccccacaggatgaaacagctgaagtggcagttccagcggctgtccctgcggcagaggctgaggccgaggtgacgctgcgggagctccaggaagccctggaggaggaggtgctcacccggcagagcctgagccgggagatggaggccatccgcacggacaaccagaacttcgccagtcaactacgcgaggcagaggctcggaaccgggacctagaggcacacgtccggcagttgcaggagcggatggagttgctgcaggcagagggagccacagctgtcacgggggtccccagtccccgggccacggatccaccttcccatctagatggccccccggccgtggctgtgggccagtgcccgctggtggggccaggccccatgcaccgccgccacctgctgctccctgccaggccgggaatgctgctgctgctgctgctgctgctgctgctgctgctgctgctgctgctgctgctgctgctggggggatcacagaccatttctttctttcggccaggctga

SEQ ID NO: 143503 - DNA, 4263 bp, Homo sapiens
gagtcttttttttccttctttttatttccactgccttggagcaggtttatcacgttagagcattaattctttccccttctagggcactgcatcagagcatgggggacagaacaaagaaccagccaagaagaaaaggaaaaaataaatgaaatgcctgagttaatgtgaactttggggcttctgcttcatttttacccaacaagcaacaatgccccttgtcctgtagtccacaccgatgttggcatcttggttctgaacccactgaattcaactgcaccttcagttagaaggaatcttcttggcaggtcctgctactgaaaaatggctggccttaggcaagccgttttgcaaaaagcacagctgaaagcctgagtttgggagcctgcacccaccccgatgaagctccacgggagcaaatacagagcctccaggcagtgctatggtccaggctggcttcgtttttccaaggagcctttggtgagttcaattatctggtaaatatccagcgcttcaccctggggaatcccgtatctcctttccatcccagttgggttggaaggggttttacaatccatggtcacttccttcctgaggcaccggtcaatatcgactgcactgaaaaaggcgactgactggggcaagtcattcagacccagcttgtaggcaaacatgcacctggtcaagaggttggtgatctgcaaggccagggcagcgcggtagcggtcctcctcccgcaccaggtagcgaacctcgtcatggatgctgatgcagaagcgcccatctatggcaaactcttcaaacagccacttcatggccacaagcatgaggtgtaagtagtcaacagcagagctctgtaccacccaattcacacggctggtcataaactcttcctggacagccgagggctccagggctcggctgatgcagcagcccagcaccggggtacgtggtatgtcagacgtagcaatgctctcaagcttattgaacatttctgactctgtgccccccttccatgcccgttcagcaaccacctcccacttcttccactgtgacttccttgcagtttctctctggaccttgcgcagatcctgcagggaaatccagccaccctcagtcctgtccactgggaggttcaactccctcaccagccactcgccctcatccgacagccgataccagcggaggcccttggtggcagcgtacatctgctgggccttctcagctgcctcctgctgtgtgagccggtggttaaactgcattagtaagcgctcagcaaagggctgcccagcaccatagatgcggccgtagttgaagattttggcatgctcacggctgatgcccacagtagtggctgtcttactgtgtagatcagtgcccctgctcttcctgccctgcagtgtcatccacccaaaggctgtgcagccatgcatgccggcaaagtgggcgtctccaagcacagctgcaatccacagctcttgggagtccacatcagcacccacaagggtgtagccaggtggggcctgcaccatggctttcaactcactgcctactcggtcaggccgggcattgctggcggtgagccatgtgggctccacagcccggcgagtgatggtgccggcagtcaccacttggggcaggatggccccatagaggccttcctcatcatagtcggggtgcctgatcacagcacggggcagagctgacctgggcagccacaccaccatctgggagctgatacgtttatgggcgttcctccagaaagaaatcattttgttgatttccagagcacggggcccactggcacctcctgggccagcctgcagggtgccatcctccatcttgggcaggaagtccttggcaaaggggcttcccacattacagctattaccatccttgtgaggcagcttgaaaaaccagcagccagggatgtccacgtcgttgtaaggtccattgccatggtgatagctgggctgggtgtccttggggccaccacgggcagtcagagctaggggttgacctggcactgcagctcgcaagttctccatcttggcctcagcctccacttctaagtaatccagttcttctaccgtttgccatatggcactattgtcagtgagcaggaactcctccgccaggccggcctcctggggcatcagctgctgcttcccctgttcgagacagtgcttcctgtacagggactcgatggctctgtaggggcagaccaccccagctgactccagggtggtacctgtcggcagcttggccaggttgtcccgccgcccaggcaccaagtagccccagccatgacgctctgagtagtgcagagggaagccatcccaggtaagtgccatgagtttaggtgtgacccgcatctgcaggctgaggaggctggggcccggggtccatgcagggtcgtctagccgggggcagagcttccggtaccatccagggtgtccaggaaggtgctggggccgcttgggcaggagctctgtggtccccttcagcttctgcaagcaggcgcgggccatgacatcttgttgaaactcctcctcctcactgcaggggccgaggtcttcctgatccatgggatcaccaggggccccagccccctcgatgggcaacttgctggctgtggctggttccttcttcaccttcttagctttcttctgcttaaattcttgcaggtcccactccaggtcccagagccaggggtcttctttgtacctctctcctgagagcagctggcaggcatcattggccagatccatcaacgacttcttcatctcccgctggagctcctcataagtgccctgtgcctctgccaggtaacgctcccagttctggttgacaggcaggtaggagacacccatctccagcatgccggccagagtcactgggtggggacacctctccaagaagagcggtagctgctgctggaaaacctcatgggtggcccacacgtcctgggcacagtactgcatcaggtcctggaagttctcacgaatgtccttcatggtgcccttcacaaacagttctcgaggctccttctctaagggaggcccccctacataaagtctgtgcacctctgccagactgttgacactgctgatgtccagccagtcccaggatgagatcgctgggcctcttctggctttcctctgggacttctggccttgttttgtggggggctggaccttgtgtttgccctgcttggctgctatccacagactgcgctggaagctgcttagccctgagatggccatgtgcatgctcatggtgtccaggaaacgcatgcgggaaccctggatcaggtactgctccctgatatgagctcggtcaaaggaaacattgtgccccaccactaactgctcctgccagtctctctgggtggggctgctggcaccagtagggacctccagggggatgaggtcagccggcgacagctggctggtccaagagtaacgctcttccaccagccgctggctgcaccaggaataccaggccgagggggatatggccaccgccaatgtggggcaagttccctctgccaagcagacctccacgtcgaacaccagggcccgctcctcggggatggccacgggtacggcctccccctcggggccgtaccgggtccagccctccgcccaggcccaagccgggggcttcgggggcagctgggcctgcaacagcaagttggccgcctccaggtagggcaggctctgcttctgggccaggaggcggaagtgctggtccaggttgtccccgtagaggggcggcaggcgcagctccacgtcgggcaagggcacggctggctgcccccagagcccgtgcttctgcaggtgctcgacgctgcggcgcaccgcggcctcgccaggcatctcccctccttgcccgaagatttgctcgtgcagccctctcgagagcatctggatgtccaatgggttgtgccgcagctgcccgccctccgaggatagcacttgcggctgctgaggctgctgttgctgctgctgctgctgctgctgctgctgctgctgctgccgccgccgctgcccgtcgctggggtcggacgcggggacggagctggagacccagcgccccggagctggaaccggccctggcccgacggtggcgccggccaccttcctccagagcaggcggctcatggttggtgcagggacccccacgctgggagtcagaacacctggctttgggctccagcttggcttcttttactggctggaagacgtggagagagacacgtcc

SEQ ID NO: 143504 - DNA, 781 bp, Homo sapiens
aactggtgcctgtggtggctcgttggtctttgtctcttagaaggtggggaataatcatcaccaatgaagaccaccaaattatcacgccccccgtgctgccctgaggaagtagaagctcctcgctgcttctggcacttcagcgggaagttggttggggcgggatcgcgcgccctctggtggcaccatggttcagcacagacgctcttgctcacagtttcgcggcggatgtgcgccccctcctggctgtcctgaaatacctttcctcgggcagcctcggggaccatgaagccacagcttccccagtcgttcctgaggagctgaggagaaggaggctgggtcgtccctggccacggtccccaggtgttcctagagagccagcggcgtctcccgagtaggtcctgaatgcctttttcacaaaggaatgactgtgctgctccgtcttccttcttttttgtttgcgaggccacagggaaatctggatcctctggtgaaaaagcaaatccagttgctgctgctgctgctgctgctgctgctgctgctgctgctgctgctgctgctgctgctgccgccgccagttcttgtaaatgtcctcacttggtttctgggcagcaacttccttgacttgccggctcaacgggacagacatgggacaagtgtgcctgatcatggtggcgttgccaagaagcagctgtcgcactgccatgggttctacgtgtttcttgggcagaggacgcatgggaccagaatgggcaccaggaatggtggtgaacaaaggccccat
